United States Patent Application Publication US 2007/0054278 A1 - sequence listing, part 54

SEQ ID NO: 95112 - DNA, 367895 bp, Homo sapiens
  misc_feature (1)...(367895): n = A,T,C or G
taggttatagctcattatgtatgaagaaacctttaggctgttaaacttaatttaacagcatgcatgtaaaatgtcaagtgtaaccggtaaaagaacagaaatgcagtgattaacatcccaacccatcccaagtgaggaaataaatgcagtaagaaaacaaagaacactatcattactcaatcagacgactaattaaaaggcacgaaaaagtacgtagtaaaaatgtgaaaacaaagccaggtattttagaaatgatgatttttaaaaggtaaattgctattagtaataaactaataaactatattttattaattttagagctctagaataaatagcacatagttattcaaaaatgtatttctttaaaagcttagctattgatatgatttggatgtctgttccctccaaatctcttgttgaaatgtgatttgcaatgttggaagtggggcctggtggaaggtgactggatcatgacggcaggtccctcatgaatggcttagcaccatcaccttggtgataagtgagttctagctcagttagttcatgtgagatctggttgtttaaaagtgtgtggcacctcccaacccactcttgctcttgctctcaccatgtgaagtgatggctgcccatcgccttccaccaatgattgtgagcttcctgaggcctccccagaagcaaatgccagcaccatgcttcctgtacagcccacagaaccaccgtgagcccattaaacctcttttctttataaattacccagcctcaggtgtttcttttctttctttcctttctttcttcctttctttctctttctttcttttttcagggtctggctcttttgcccagactggagtgcagtggtgtgatctcggcacacctcagcctcaacctcccaggctcaagggatcctcctcagctccttgagtagctgagactacaggctcaagccaccaggcccagcgaattcttgtattttttgtttttagagatgaggtctcactttgttgcccagctggtctcgaactcctggactcaagggatctgtccacttcagcctcccaaagtgttgggattacaggtgtgagccactgtgcttggcctcaggcatttcttcattaatagcattgcaagaatggcctaatgtagctatttttatacaaaaagatgagctatttacaagtcattctttgctacccacctctatatttgtcaaaaatttgaagcataatatagctttcttatatgatcataaatggcttaaatttgttacatttctgtgtgtcaaggaatggtgctgagttccaagatgataccagtttttacaggtttgtggccatcttcgaaatgtctgcttaataggccttctttttaaagaagacaaatcatcactgaaaattgaagagaaaaatcgagtgttatttatatgaaacttaaacatgtgacattatgtattcttcttctttgggtacttcccagatgtgattatgatctacatagttttgctaagacaactcaataatttgtaaagaggcttagcattaaaatgttccctatttgtgattacccattgtactttaaaattgttcctgctaatttttcatttctgatgatccaagtgaagagtatttgccaaacacccacagtatcaaatctaagatgctaaaggcagcctgcaaagggaacaaagggaaacgaattctagaggagactctacaagttaaggttctatgtaattgttgggtagacgcaaaacggactggaggaaacattgcttttgatacacctgctgaatagttccctttaagggttgtcctccctcacccccaaagaaaatggattactaggctgggctaggtggctcatgtctgtaatcccagcactttgggaggctgaggcaggtggatcacgaggtcaggagatcgagaccatcctgactaacaaggtgaaaccccgtctctactaaaaatacaaaaaattagctgggcgtggtggcgggcgcctgtagtcccagctgcttgggaggctgaggcaggagaatgccgtgaacccaggaggcggagcttgcagtgagccgagatcaagccactgcactccagcctgggcagcagagcgagactccatctcaaaaaaaaaaaaaaaagaaagaaagaaaagaaattggattactaatctgagacttcagagtagatgatgggtaaactgattgatgatgctagtcttctaagtatgtttgtttatattctacctcactccacaaaagatttgagtgtgtttataacgtgcaatttcctctaagttgaaaaaaaaagaatgaaaaaacagagtggtggaaaatatataaagaaaaggcatataggctgggctcagtagctcatgcctgtaatcctaacactttgggaggccaaggtgggaggatcacttgaagcctagaattcgagaccagcctgggcaagggagaccccatctctacaaaaaataaaaaaccttagccggtacagtggtgtgctcctgtagtcccagctacttgggaggctgaggtgggaggatcacttgagtcctggagtttgagggtacagtgtgctgtgatcatgccactgttctccagtctggacaacagagcaagaacttgtctctcggggaaaaaggaaaagaaaaagaaaaaaaaaaaagaatagtaatataaatctaggccagatgtctctaaacttggcagtggtgcattaggatcacctggggaacttttaaagctcctgatgcccatgtggcaccctgtactaattaaatcataatgcctgggagtgggaggcagagaggagcagtagtaaaaattcccaaatgtttctatgtatagcaaaatttggaaactaagctgatgttctcagccttaagtgcacattagcatcacctgggaggctgttgaaactactgatgtcagaatccattaaatcatagcctctgatgctggttaccgggcacttagtctatttgaaagctccccaggtgattgcaatgtacatgctgagtagagaaccacagcattgggggaaagttggtatatagttacaaaagggattttttttttaatgggttcttttatggcttaagaccatgaaactggttctgagcttcctggtggccaaagtagatagaaaaacacagtcggttttaataattttggtcatctgccatgcaaaagcttaccagtttcttgaaagcaaaagagcttttcttcatagatctgaaataaatgtctagtttattagtcttctcacagaggatgttgatgtcatggatcacgattttataaacaccccacaataagtgacatatggcaagtttcatattatagttcctaataaccatccctcagggaaagacaaggacatgaccctgagtgcagggctataggctgttgcggtgggtgtgtgggagtagatgataaaagacaggaagagaaactgccacacccctctacagtttccagataacatagccttacccaaaggcgaagcctggaattatgtacctccaggatgtggaaggcgtgtcctgtgtaattagaaattataattttctatcagcacattttaagaattatttatttatgtatttatttatttagagacacagggtctttctctgtcatccaggctggagtgcaatggcacgatcatagctcactgtaaccttgaacttctgggctcaagtgaacctctagtctcagcctcctgagtagctaggactatgggcccatgccaccacacctggcaaatttttaatttttttttttttttgtagggacaggggtctctctatattgcccaggctggtctcgaactcctggcctcaaatgatcctcctgcctctgcctcccaaaatgctagcattattattcaattacttttcttcctttataatataaactgtacaaattttacaaaggtttggctagtgagggtaggtagagaagcactgactcccatccatgagggtcacaggctagggcaagggcatctgagaatgcgtgtgtgtgtgtgtgtgagagagagagagagagaaagacagagtgtgcacgtgtaccttttgtttatcaaaagactttagggttgtttttttttgtttttgttttttttgagacggagtctcgctctgtggtccaggctggagtgcagtggcgcagtctcggctcactgcaacctccgcctcccaggttcaagggatcctcatgcctcagcctccccgagtagctgggattacaggcgcccgccaccacgcctgggtaatttttgtatttttagtagagatggagtttcaccacattggccaggctggtcttgaactaccgatcttatgatccgcccgcctcagcctcccaaagtgctgggattacaggtttgagccaccgtgcccggtctaaagactcgaggtttgaaagggttgaaaaacctcagtattgaaagaatggacagaaatctgacttttaaatagtcctccataaatagttctcattgggggttttgtggcctgtaagtactgtggacttgacggctcaagacttctagagaaggcttctgagtaggatgttgactccatggggctaagtcgtcaaaggaaacccattctacggcacaggttttaagccagtcatgctgcaggaaggcaaaggagagcttaaggtagcatgggtgggctcttttgaaaacgaactagcagggcgaacagcagatatttagttatgtagctggcaacgaggaatatgattccttcgggtcacgcgagttctctctgaacttccttgaatgaaaatcctaaatgcatcctggtaatacccaagtaggcactttgacgtttccttttcaaaggcaaatggaatgttctgccgtctgttttctttttgaactcccaactgcacttaacatctaaatttaaggaaaggcttccgaaaaagtcgactgacgaatttctttcacttatttaaagtagtctcttgcagtcctataaatcggaaggattaaatgaactgcttgctagagaaacggtagctgggtggtgggaagaatcctacggtggctaataagacgtctcgatcatttgcatatgcaaaggataaccttaagcttgagtttgatatttcacgttgcggctcacaaatgaactgctttttattcaaagaaccatgctgtctgttttcgcgtgggtgggtgtgtaaccggggcgggcgctatgttggttttgttccctgcaaggttgacacaggcaatggcgacttgcggccacactggggcagcctctcctcggctggcagccgggccgggcggctcgctcccgggagctgacaatgtagccaagtcctgctcgtcggggccgcaaagaatttaaaggggtctagaaacatccatcttttccccttttcacagttaacagcgagctcagggctctcggtaaaaagaccaccgggaggaagaaacgctcagggcgtttttgttattgttcgcaaaatcctctatcgcccccaaacgtccagcccgccccctccctaaagcggaggggaaaccgggagaggagggagggtcgnnnnnnnnnnnnnnnnnnnnnnnnnnnnnnnnnnnnnnnnnnnnnnnnnnnnnnnnnnnnnnnnnnnnnnnnnnnnnnnnnnnnnnnnnnnnnnnnnnnnnnnnnnnnnnnnnnnnnnnnnnnnnnnnnnnnnnnnnnnnnnnnnnnnnnnnnnnnnnnnnnnnnnnnnnnnnnnnnnnnnnnnnnnnnnnnnnnnnnnnnnnnnnnnnnnnnnnnnnnnnnnnnnnnnnnnnnnnnnnnnnnnnnnnnnnnnnnnnnnnnnnnnnnnnnnnnnnnnnnnnnnnnnnnnnnnnnnnnnnnnnnnnnnnnnnnnnnnnnnnnnnnnnnnnnnnnnnnnnnnnnnnnnnnnnnnnnnnnnnnnnnnnnnnnnnnnnnnggcgggagggaggcgcgggtcgcggggagggaaagcccggccgggtctgcgccgccgccgcgcgcagggagaggcgccggggctgccgcccggtgctcggcgcgctctcgggagccgcccgcccgctggtcccgcagccttccgggaggaagcggtgccggcagcgtccagggcgcgctctcgggcaccctcacctgccggcgcccggccgcttacccggcagggcgtgcgcagggtagggtgcgggaccggggggacctggaggcagaggggagaaccggccgtccgcgccgcagcacagccgctgggagcgcctcagaccccgcgcggggcgccggctccatggcgaccgggctcggggagccggtctatggactttccgaagacgaggtgagtggcacccccttcctgctcgggactccccggggagttcctatcccgcgccggcagggggaggggaaaggggccgtccccggggtgctcgtgcccagcgtctgcaggggagccccaaagcgggagcgccccggagcgggatccaggggagcttgggtccttccgcaccccccaccctccgcaagccgagctcattgtttgtaaataaagcggcgcgacgcccttggagctgggggttcactccgcagctcctcgcttttgggaggagagggagggggcatgcgtgcctctcttccctcttcctctccaagcagcgtctcccggggctgttgggcaactttccgcctctcgcccctgcagcccgggagtccatgatgcatgtcacgtctgggtcgcgcggctggagacccgggactgcggagaagccggatcgtttccccctggaactttctctctcatgattgtgtggatcagcaggcgctcagaagcctgtgcgtgcttatcccggcgggaatgggggacacgctgcgtgtgtccctcccctcgttttgcaaagtctacggccaggattgtggatttcggagcctcggtgggggaggtgttcaaggctggtggcaggtgctcctggaaacttggggaggaagcttgcagccctgccattttttcctcccgaggattcaaagcccggcacctccggggtgggtggggagaggaaagcttaattgatctcttttattaataaagcgactgaataagycacgcctcccaggcggtcggtttcactggaaagggctttgtttttaccttcactctctcttccgtgtctcccactccccccttttgaaacaatcctgctaaatcactgcctagtcctctctcgaccagccacgctcggctcttattggtatgttgctctgccaaaaaggggggtgggacgcttgtcgcgggcgcggcgtgacaggcaggctggatggagcaggtaggagtggtttgccatctggcggggtgcgcgctcaggtctggctcccctttcgagaggtgaattttacaacccaagaagcattactcagcagggaggtatttcctatcctggttgtgcatttcatgaaaagttgatgcctggaaattcaggcgttctcgatttctctttcttcccctccctcctttcttttcagaggttccctctttctctcgtgttgggggtggggttggaagaaaggctattatctgagacaggctcgcgttatggctccgctttctgcggctctcctaccctggcatggtgtgtgtgtgtgcctgtgtgctacgtaagtgtggaatgaaaggtattttggggtgggaagggtgtttagggtatgaatttttttcttagcggtgctaggcaaagcttgatgtatttatttgatcaaagaatgatcacagtgcaaataatgtgtgatttgtgtgtttattttgcctcgctgtgcttttgtaaaataatttcccgttttgtgtaactacctggggataggtgacagtagcattgtttcattgacccggggggcttctcctctccctcctggcttctctctttgaggagctttcccttgcatcctctacttctccatttaattagtggcagtagagggcaggccctgagttgcagagacgcagacattcctaaacaaaggggctgcttgggttgacgtattgtggggggtggggggtgaggacagctgcatttcatcctaggttcttttaaaaaatgttttaataacatgattatttgtaaaaactcccccgaaaaaacgattttaagagtgttttgggaagtgcagctggataaatgaaacacgttaatgtcactgttgtttgtgctttatttacattggcagtgagtgtcagaatctacctagagcacatcttgccacttttgtccacaggagtcactactaatcatcataactgatgtctagtgtgaaagtgaagcttggaatgtaaacagaggccgagtgtgtgttggcatgtgactggattcactcctgcatgttgctagaagggaatttggggctgtataggaaatagcaagaggtgatgaagacaccttttattatctatttattgccatgtcgctggtagtatttagttccacacacattgtatttcacaagatgagtctcatccgtcttcctttttcaactttctcctaccagtgaaaaaataagccagggcagttctgatgacttcacatttcattggtatttgtttttcatgggctgtcacgttgcccttcagagaatcagggaatgccttcgtagaatattaacgacaaattgttgaatttgcacagcttgttttgtctccctgaattagtatgtgtaagaaaaaccaatggaagattttagcaggctctgaaagtagaatgcccgctgaagcaaacggcagggttgttcttccaaggcgtattaaatatgggtacacttagtttgcagacttggtgtgctgcagaatatcacatatgaagatattttgaccgctatttagaagagtgacctcataaatcttttagcaaagtagacacacatacctaccacatttcttaaaagtagattcgtattttgatttgagattgttgaaaagcatggtatgtttggagtgcacttagttatgtcccatctcataaagactgtcgagctctctgcactgctgatgatgaagcattgcatgaacccagaaaacggggatgccaaagcacagggcttaggtgctgttccttgcgtcatcagcagaggtctgtccactttgtagaaggtaaggggttgagatgtgggctttgcttgtgtgaatgtatgtgctgtttaattttttctgtgtgtttcgggcggaggtttctctggtgagttataattcatatttaccctgatttaagtcatgtcactttaggtagccagattcaaaaccatcagatgaaggacttttggtgttagagggattagcagtttaacaaaacttctgattcatggcccaagatcagatttggtttggaatcagaacactttggactagtttctgcatctggcttgagtccttgtggatttcttgttttatttctttatttttggcaatctgtagtgcattttggcatagtttacttatgaatgttaccgctaactttctgaaatcttttattccattttagaaaggtatcatttattgaaaagatttttctactgaacaaaatactgggattgaatggcagcttcttatcacattagatatgacattaagtaatttcgttagtagttaaaatgaagcaaatggcatagaaatgaaggccaggctgacataggataaatggcaccttctctccttatcctgtacaaacacggatagttggctacttttgaatgcctcttctataccaatggtaaaaatccggcttaattggggccacattctagcctagtcacaatcagtggcttgcattatgtcctttgagatgtggcagatctgcttataggtgccagtcaccacggctccctgctggcttgggggtctttctactcatttacatataattatctacttcttaatcaaccattaaggttaacttttggcatggatcctgtatgcttttcagtttaagatgctgtcacttttaagatgcgccatgagagcaaagtgctaagccttgtgcacatactatgtcatttagttctcatgagaactgtgtgaggtrggctgtgatttacagatgaggaatgaaagctcaaagaggttacgtgacctgcataaggacacaaaacaagttaagttatggrgccagctattttgaatagaaaggcctagtttttaacatgctgaatatcctccccttctgacaaatgccttgaaaggtcttactatctagattatttaagataatgtaagagaaataaacaccactggttgcaaactgatggctgctgggcccgatttgaccaggaaccctgcttaatgtggtctctagagtgttttaaagcttggaaatttcatgaaaatggtaaaaatctggcttaattggggccacattctaacctagttacagtcagtggctggcattatgtcctttgagatgtggcagctagttgtgctatggttgcagtcaccactactttctgttgtcwtaggggtctttctacttgtttacatataattatccacttcataacaaacctttaaggctaacctttggcgtggatgccatatttctttcactttagtgtgctgtcacttttaagatatgccattatttcatgtaccacgaagaaaaaattgctgtcaagttatgacatactgtccatcttatgaagcatccttatttcagagaagttgaaatatgagaaaaaggatattttagaattgatgaattacagtgactagaaacctgggaaaactccatgccatcagtttcaatatccccaatcattcagtacttttaagtcaacgagtagtcagatttctgcttttctgtgtttgaggaaagtgctagaaaaagagaagtgctcttaaataggcattagcacagaaggaactgggggcctagatcatagccaactggatggccgtctgtaagtgattaagaatagttgttagtttttaaaaagtggcctgtgtgtattttcaagagattacttgggaaaccctatgtgccatctttgcagctgtgcaaaacggtgaggacaagattgctttcaaaaattgtggtttagattttgcttggatctcaaggtgaatgctgacaggccgttttctgaagagagagaaggcttgcccagtcatgccaagtccaagtgcctgtgtcgggcctagatgctggatggtagactgtatacccaggacatataggtaatgtttgagaaacaaatgttaaaaggacctagttttcatggtgacatttaaaatcagtttttaaaattcatgaatataacatgttgttttaaaatttgattatagggaccgggtgcagtgatcactcctgtaatcctagcattttgggaggccgaggcaggagaatcacttgagttcaggagtttgaggccaggctgggcaacgtggtgaaaccccgtctctacaaaaaatagaaaagttagccaaacatggcggcacgtgcctgtagtcccagctacttgggaggctgaggtggaaggatcacttaaacctggaggcagaggttgcagtgagccaagatcatgccactgcactctagcctgggcgacagagtgagaccctgtctccaaaaaaaaaaaaaaaaaaaagactaatgaatagaatttattttcttcaatgatgtagtgtctgtggaatttrtagacattgacatttgaattttcattatatttagttttattaaatcagaatgttatgattgtttatttcattattgaacatcagtttccttaatttaaggaataaaaataattttgctcaggccagacatagtggctcacatctgtaatcccagcacgttggaggccaaggctggtggatcacttgaggtcaggagtttgagaccagcccrgccaacatggtgaaaccctgtctctacaaaataattaaataaataaatgaaaaaaaaatcagctgggtgtggtggtggacatctgtaatcccagctactctggaggctgaggcaggagaatagcttgaaccctgaaggcagagattgcagtgagccgagatcgcaccactgcactccagactgggtgacagagtgagactctgtcacaataataacrggctggggcagtggctcatacccgtaatcccagcactttgggaggccgaggctggaggatcacctgaggtcaggagtttgagaccagcctggccaacatggtgaaactccgtctttactaaaaatacaaaaattagctgggcttggtggcaggcaactgtaatcccagttactcgggaggctgaggcaggagaattgcttgaacctgggaggcagaggttgcagtgagacaagttcgggccattgtgctccagcctgggcaacaagagcaaaactaaaaataaaaaataaaaaaagaatagtaatagttttgcttaaagggtgaggacagtgacaaatggtgatcctcagatgactgtagtttctttaccattacagaatgcaattcaaatgaaaaccattgcatggtactcaggcatttcttcaatgcagtgtgtgcccacatcaccaggaagcttacttgggaaagtttgttttgggattctggagtacctcaatatatctggtatattttcccaagaaaagtgaataatccttggggggccgaggtggacagattgcttgagcccaggagtttgacaccagcctgggcaatgtggtgaaaccccacctctacaaaaaatacaaaaacttagctgcgtgttgtggcacgcacctgtggtcctggctgctggggaggctgaggtgggaggatggcttgagcctgggaggttgaggctgcagtgagccatgatcatgccactgcactccagcctgggtgacagagcaagatactgtctcagaaaagaaaggcaaacaaacaaagatcaccccaaagaagaactcccaacatattaaaagtcattgagttttgtacccttcaaatggatgaattgtgttgtgtatgaattacatctgaataaaactgtttaaaaatattaagaatgattgagtgtgacattattgcagcagtacattggagtttctgctaaattacttttgcattcatttcaaaaggaagcaactatgcccattgctaatttaataacctgtttgcttgtgcggtgtttaaaatggcatcatgaaaacatggcaatgtgtgatagattaagagccaattaaattttttattttgagttacaagatctgcattaaacagattttattgttgcccttgaatttccagtcttagatgagtagcagcagtgaaaaaaagagatcctaacttaagagttttcaagctttttgatgttgcaggtatttgaataagtgggtctgtcttactgaaatatttgttaattagcgataaagcaaactatatgttgatcttttggtagtccatgctaaggaggattagaataatatataaataatataatggtaataagtatcagggcaggaggattaaagaagggtggaagaagtgtgacaaaatgttactttctgtttttacattgtttctcttccaggtcacaactgtatttcaaatgtatttcattttcagactataggtggcaatgtttgtgctgttcactgtttaatgttactgttggctcgggtgttgcttgttgctggaatatggaaatgatagcataatttagagttgagaataaaaaaaactagatttagaaaactagaaactagatttagatttagtagagactttctaaatagtcctagttctgctgtgtggacccttctgtaactttctgttactctgagaaggagctgataattatcacaactactggtgtttgattagcagagacattcttgattcctgatgcaagaccgtggctgaagttgtagcagggcgtttggtggttggcggnnnnnnnnnnnnnnnnnnnnnnnnnnnnnnnnnnnnnnnnnnnnnnnnnnnnnnnnnnnnnnnnnnnnnnnnnnnnnnnnnnnnnnnnnnnnnnnnnnnnnnnnnnnnnnnnnnnnnnnnnnnnnnnnnnnnnnnnnnnnnnnnnnnnnnnnnnnnnnnnnnnnnnnnnnnnnnnnnnnnnnnnnnnnnnnnnnnnnnnnnnnnnnnnnnnnnnnnnnnnnnnnnnnnnnnnnnnnnnnnnnnnnnnnnnnnnnnnnnnnnnnnnnnnnnnnnnnnnnnnnnnnnnnnnnnnnnnnnnnnnnnnnnnnnnnnnnnnnnnnnnnnnnnnnnnnnnnnnnnnnnnnnnnnnnnnnnnnnnnnnnnnnnnnnnnnnnnnnnnnnnnnnnnnnnnnnnnnnnnnnnnnnnnnnnnnnnnnnnnnnnnnnnnnnnnnnnnnnnnnnnnnnnnnnnnnnnnnnnnnnnnnnnnnnnnnnnnnnnnnnnnnnnnnnnnnnnnnnnnnnnnnnnnnnnnnnnnnnnnnnnnnnnnnnnnnnnnnnnnnnnnnnnnnnnnnnnnnnnnnnnnnnnnnnnnnnnnnnnnnnnnnnnnnnnnnnnnnnnnnnnnnnnnnnnnnnnnnnnnnnnnnnnnnnnnnnnnnnnnnnnnnnnnnnnnnnnnnnnnnnnnnnnnnnnnnnnnnnnnnnnnnnnnnnnnnnnnnnnnnnnnnnnnnnnnnnnnnnnnnnnnnnnnnnnnnnnnnnnnnnnnnnnnnnnnnnnnnnnnnnnnnnnnnnnnnnnnnnnnnnnnnnnnnnnnnnnnnnnnnnnnnnnnnnnnnnnnnnnnnnnnnnnnnnnnnnnnnnnnnnnnnnnnnnnnnnnnnnnnnnnnnnnnnnnnnnnnnnnnnnnnnnnnnnnnnnnnnnnnnnnnnnnnnnnnnnnnnnnnnnnnnnnnnnnnnnnnnnnnnnnnnnnnnnnnnnnnnnnnnnnnnnnnnnnnnnnnnnnnnnnnnnnnnnnnnnnnnnnnnnnnnnnnnnnnnnnnnnnnnnnnnnnnnnnnnnnnnnnnnnnnnnnnnnnnnnnnnnnnnnnnnnnnnnnnnnnnnnnnnnnnnnnnnnnnnnnnnnnnnnnnnnnnnnnnnnnnnnnnnnnnnnnnnnnnnnnnnnnnnnnnnnnnnnnnnnnnnnnnnnnnnnnnnnnnnnnnnnnnnnnnnnnnnnnnnnnnnnnnnnnnnnnnnnnnnnnnnnnnnnnnnnnnnnnnnnnnnnnnnnnnnnnnnnnnnnnnnnnnnnnnnnnnnnnnnnnnnnnnnnnnnnnnnnnnnnnnnnnnnnnnnnnnnnnnnnnnnnnnnnnnnnnnnnnnnnnnnnnnnnnnnnnnnnnnnnnnnnnnnnnnnnnnnnnnnnnnnnnnnnnnnnnnnnnnnnnnnnnnnnnnnnnnnnnnnnnnnnnnnnnnnnnnnnnnnnnnnnnnnnnnnnnnnnnnnnnnnnnnnnnnnnnnnnnnnnnnnnnnnnnnnnnnnnnnnnnnnnnnnnnnnnnnnnnnnnnnnnnnnnnnnnnnnnnnnnnnnnnnnnnnnnnnnnnnnnnnnnnnnnnnnnnnnnnnnnnnnnnnnnnnnnnnnnnnnnnnnnnnnnnnnnnnnnnnnnnnnnnnnnnnnnnnnnnnnnnnnnnnnnnnnnnnnnnnnnnnnnnnnnnnnnnnnnnnnnnnnnnnnnnnnnnnnnnnnnnnnnnnnnnnnnnnnnnnnnnnnnnnnnnnnnnnnnnnnnnnnnnnnnnnnnnnnnnnnnnnnnnnnnnnnnnnnnnnnnnnnnnnnnnnnnnnnnnnnnnnnnnnnnnnnnnnnnnnnnnnnnnnnnnnnnnnnnnnnnnnnnnnnnnnnnnnnnnnnnnnnnnnnnnnnnnnnnnnnnnnnnnnnnnnnnnnnnnnnnnnnnnnnnnnnnnnnnnnnnnnnnnnnnnnnnnnnnnnnnnnnnnnnnnnnnnnnnnnnnnnnnnnnnnnnnnnnnnnnnnnnnnnnnnnnnnnnnnnnnnnnnnnnnnnnnnnnnnnnnnnnnnnnnnnnnnnnnnnnnnnnnnnnnnnnnnnnnnnnnnnnnnnnnnnnnnnnnnnnnnnnnnnnnnnnnnnnnnnnnnnnnnnnnnnnnnnnnnnnnnnnnnnnnnnnnnnnnnnnnnnnnnnnnnnnnnnnnnnnnnnnnnnnnnnnnnnnnnnnnnnnnnnnnnnnnnnnnnnnnnnnnnnnnnnnnnnnnnnnnnnnnnnnnnnnnnnnnnnnnnnnnnnnnnnnnnnnnnnnnnnnnnnnnnnnnnnnnnnnnnnnnnnnnnnnnnnnnnnnnnnnnnnnnnnnnnnnnnnnnnnnnnnnnnnnnnnnnnnnnnnnnnnnnnnnnnnnnnnnnnnnnnnnnnnnnnnnnnnnnnnnnnnnnnnnnnnnnnnnnnnnnnnnnnnnnnnnnnnnnnnnnnnnnnnnnnnnnnnnnnnnnnnnnnnnnnnnnnnnnnnnnnnnnnnnnnnnnnnnnnnnnnnnnnnnnnnnnnnnnnnnnnnnnnnnnnnnnnnnnnnnnnnnnnnnnnnnnnnnnnnnnnnnnnnnnnnnnnnnnnnnnnnnnnnnnnnnnnnnnnnnnnnnnnnnnnnnnnnnnnnnnnnnnnnnnnnnnnnnnnnnnnnnnnnnnnnnnnnnnnnnnnnnnnnnnnnnnnnnnnnnnnnnnnnnnnnnnnnnnnnnnnnnnnnnnnnnnnnnnnnnnnnnnnnnnnnnnnnnnnnnnnnnnnnnnnnnnnnnnnnnnnnnnnnnnnnnnnnnnnnnnnnnnnnnnnnnnnnnnnnnnnnnnnnnnnnnnnnnnnnnnnnnnnnnnnnnnnnnnnnnnnnnnnnnnnnnnnnnnnnnnnnnnnnnnnnnnnnnnnnnnnnnnnnnnnnnnnnnnnnnnnnnnnnnnnnnnnnnnnnnnnnnnnnnnnnnnnnnnnnnnnnnnnnnnnnnnnnnnnnnnnnnnnnnnnnnnnnnnnnnnnnnnnnnnnnnnnnnnnnnnnnnnnnnnnnnnnnnnnnnnnnnnnnnnnnnnnnnnnnnnnnnnnnnnnnnnnnnnnnnnnnnnnnnnnnnnnnnnnnnnnnnnnnnnnnnnnnnnnnnnnnnnnnnnnnnnnnnnnnnnnnnnnnnnnnnnnnnnnnnnnnnnnnnnnnnnnnnnnnnnnnnnnnnnnnnnnnnnnnnnnnnnnnnnnnnnnnnnnnnnnnnnnnnnnnnnnnnnnnnnnnnnnnnnnnnnnnnnnnnnnnnnnnnnnnnnnnnnnnnnnnnnnnnnnnnnnnnnnnnnnnnnnnnnnnnnnnnnnnnnnnnnnnnnnnnnnnnnnnnnnnnnnnnnnnnnnnnnnnnnnnnnnnnnnnnnnnnnnnnnnnnnnnnnnnnnnnnnnnnnnnnnnnnnnnnnnnnnnnnnnnnnnnnnnnnnnnnnnnnnnnnnnnnnnnnnnnnnnnnnnnnnnnnnnnnnnnnnnnnnnnnnnnnnnnnnnnnnnnnnnnnnnnnnnnnnnnnnnnnnnnnnnnnnnnnnnnnnnnnnnnnnnnnnnnnnnnnnnnnnnnnnnnnnnnnnnnnnnnnnnnnnnnnnnnnnnnnnnnnnnnnnnnnnnnnnnnnnnnnnnnnnnnnnnnnnnnnnnnnnnnnnnnnnnnnnnnnnnnnnnnnnnnnnnnnnnnnnnnnnnnnnnnnnnnnnnnnnnnnnnnnnnnnnnnnnnnnnnnnnnnnnnnnnnnnnnnnnnnnnnnnnnnnnnnnnnnnnnnnnnnnnnnnnnnnnnnnnnnnnnnnnnnnnnnnnnnnnnnnnnnnnnnnnnnnnnnnnnnnnnnnnnnnnnnnnnnnnnnnnnnnnnnnnnnnnnnnnnnnnnnnnnnnnnnnnnnnnnnnnnnnnnnnnnnnnnnnnnnnnnnnnnnnnnnnnnnnnnnnnnnnnnnnnnnnnnnnnnnnnnnnnnnnnnnnnnnnnnnnnnnnnnnnnnnnnnnnnnnnnnnnnnnnnnnnnnnnnnnnnnnnnnnnnnnnnnnnnnnnnnnnnnnnnnnnnnnnnnnnnnnnnnnnnnnnnnnnnnnnnnnnnnnnnnnnnnnnnnnnnnnnnnnnnnnnnnnnnnnnnnnnnnnnnnnnnnnnnnnnnnnnnnnnnnnnnnnnnnnnnnnnnnnnnnnnnnnnnnnnnnnnnnnnnnnnnnnnnnnnnnnnnnnnnnnnnnnnnnnnnnnnnnnnnnnnnnnnnnnnnnnnnnnnnnnnnnnnnnnnnnnnnnnnnnnnnnnnnnnnnnnnnnnnnnnnnnnnnnnnnnnnnnnnnnnnnnnnnnnnnnnnnnnnnnnnnnnnnnnnnnnnnnnnnnnnnnnnnnnnnnnnnnnnnnnnnnnnnnnnnnnnnnnnnnnnnnnnnnnnnnnnnnnnnnnnnnnnnnnnnnnnnnnnnnnnnnnnnnnnnnnnnnnnnnnnnnnnnnnnnnnnnnnnnnnnnnnnnnnnnnnnnnnnnnnnnnnnnnnnnnnnnnnnnnnnnnnnnnnnnnnnnnnnnnnnnnnnnnnnnnnnnnnnnnnnnnnnnnnnnnnnnnnnnnnnnnnnnnnnnnnnnnnnnnnnnnnnnnnnnnnnnnnnnnnnnnnnnnnnnnnnnnnnnnnnnnnnnnnnnnnnnnnnnnnnnnnnnnnnnnnnnnnnnnnnnnnnnnnnnnnnnnnnnnnnnnnnnnnnnnnnnnnnnnnnnnnnnnnnnnnnnnnnnnnnnnnnnnnnnnnnnnnnnnnnnnnnnnnnnnnnnnnnnnnnnnnnnnnnnnnnnnnnnnnnnnnnnnnnnnnnnnnnnnnnnnnnnnnnnnnnnnnnnnnnnnnnnnnnnnnnnnnnnnnnnnnnnnnnnnnnnnnnnnnnnnnnnnnnnnnnnnnnnnnnnnnnnnnnnnnnnnnnnnnnnnnnnnnnnnnnnnnnnnnnnnnnnnnnnnnnnnnnnnnnnnnnnnnnnnnnnnnnnnnnnnnnnnnnnnnnnnnnnnnnnnnnnnnnnnnnnnnnnnnnnnnnnnnnnnnnnnnnnnnnnnnnnnnnnnnnnnnnnnnnnnnnnnnnnnnnnnnnnnnnnnnnnnnnnnnnnnnnnnnnnnnnnnnnnnnnnnnnnnnnnnnnnnnnnnnnnnnnnnnnnnnnnnnnnnnnnnnnnnnnnnnnnnnnnnnnnnnnnnnnnnnnnnnnnnnnnnnnnnnnnnnnnnnnnnnnnnnnnnnnnnnnnnnnnnnnnnnnnnnnnnnnnnnnnnnnnnnnnnnnnnnnnnnnnnnnnnnnnnnnnnnnnnnnnnnnnnnnnnnnnnnnnnnnnnnnnnnnnnnnnnnnnnnnnnnnnnnnnnnnnnnnnnnnnnnnnnnnnnnnnnnnnnnnnnnnnnnnnnnnnnnnnnnnnnnnnnnnnnnnnnnnnnnnnnnnnnnnnnnnnnnnnnnnnnnnnnnnnnnnnnnnnnnnnnnnnnnnnnnnnnnnnnnnnnnnnnnnnnnnnnnnnnnnnnnnnnnnnnnnnnnnnnnnnnnnnnnnnnnnnnnnnnnnnnnnnnnnnnnnnnnnnnnnnnnnnnnnnnnnnnnnnnnnnnnnnnnnnnnnnnnnnnnnnnnnnnnnnnnnnnnnnnnnnnnnnnnnnnnnnnnnnnnnnnnnnnnnnnnnnnnnnnnnnnnnnnnnnnnnnnnnnnnnnnnnnnnnnnnnnnnnnnnnnnnnnnnnnnnnnnnnnnnnnnnnnnnnnnnnnnnnnnnnnnnnnnnnnnnnnnnnnnnnnnnnnnnnnnnnnnnnnnnnnnnnnnnnnnnnnnnnnnnnnnnnnnnnnnnnnnnnnnnnnnnnnnnnnnnnnnnnnnnnnnnnnnnnnnnnnnnnnnnnnnnnnnnnnnnnnnnnnnnnnnnnnnnnnnnnnnnnnnnnnnnnnnnnnnnnnnnnnnnnnnnnnnnnnnnnnnnnnnnnnnnnnnnnnnnnnnnnnnnnnnnnnnnnnnnnnnnnnnnnnnnnnnnnnnnnnnnnnnnnnnnnnnnnnnnnnnnnnnnnnnnnnnnnnnnnnnnnnnnnnnnnnnnnnnnnnnnnnnnnnnnnnnnnnnnnnnnnnnnnnnnnnnnnnnnnnnnnnnnnnnnnnnnnnnnnnnnnnnnnnnnnnnnnnnnnnnnnnnnnnnnnnnnnnnnnnnnnnnnnnnnnnnnnnnnnnnnnnnnnnnnnnnnnnnnnnnnnnnnnnnnnnnnnnnnnnnnnnnnnnnnnnnnnnnnnnnnnnnnnnnnnnnnnnnnnnnnnnnnnnnnnnnnnnnnnnnnnnnnnnnnnnnnnnnnnnnnnnnnnnnnnnnnnnnnnnnnnnnnnnnnnnnnnnnnnnnnnnnnnnnnnnnnnnnnnnnnnnnnnnnnnnnnnnnnnnnnnnnnnnnnnnnnnnnnnnnnnnnnnnnnnnnnnnnnnnnnnnnnnnnnnnnnnnnnnnnnnnnnnnnnnnnnnnnnnnnnnnnnnnnnnnnnnnnnnnnnnnnnnnnnnnnnnnnnnnnnnnnnnnnnnnnnnnnnnnnnnnnnnnnnnnnnnnnnnnnnnnnnnnnnnnnnnnnnnnnnnnnnnnnnnnnnnnnnnnnnnnnnnnnnnnnnnnnnnnnnnnnnnnnnnnnnnnnnnnnnnnnnnnnnnnnnnnnnnnnnnnnnnnnnnnnnnnnnnnnnnnnnnnnnnnnnnnnnnnnnnnnnnnnnnnnnnnnnnnnnnnnnnnnnnnnnnnnnnnnnnnnnnnnnnnnnnnnnnnnnnnnnnnnnnnnnnnnnnnnnnnnnnnnnnnnnnnnnnnnnnnnnnnnnnnnnnnnnnnnnnnnnnnnnnnnnnnnnnnnnnnnnnnnnnnnnnnnnnnnnnnnnnnnnnnnnnnnnnnnnnnnnnnnnnnnnnnnnnnnnnnnnnnnnnnnnnnnnnnnnnnnnnnnnnnnnnnnnnnnnnnnnnnnnnnnnnnnnnnnnnnnnnnnnnnnnnnnnnnnnnnnnnnnnnnnnnnnnnnnnnnnnnnnnnnnnnnnnnnnnnnnnnnnnnnnnnnnnnnnnnnnnnnnnnnnnnnnnnnnnnnnnnnnnnnnnnnnnnnnnnnnnnnnnnnnnnnnnnnnnnnnnnnnnnnnnnnnnnnnnnnnnnnnnnnnnnnnnnnnnnnnnnnnnnnnnnnnnnnnnnnnnnnnnnnnnnnnnnnnnnnnnnnnnnnnnnnnnnnnnnnnnnnnnnnnnnnnnnnnnnnnnnnnnnnnnnnnnnnnnnnnnnnnnnnnnnnnnnnnnnnnnnnnnnnnnnnnnnnnnnnnnnnnnnnnnnnnnnnnnnnnnnnnnnnnnnnnnnnnnnnnnnnnnnnnnnnnnnnnnnnnnnnnnnnnnnnnnnnnnnnnnnnnnnnnnnnnnnnnnnnnnnnnnnnnnnnnnnnnnnnnnnnnnnnnnnnnnnnnnnnnnnnnnnnnnnnnnnnnnnnnnnnnnnnnnnnnnnnnnnnnnnnnnnnnnnnnnnnnnnnnnnnnnnnnnnnnnnnnnnnnnnnnnnnnnnnnnnnnnnnnnnnnnnnnnnnnnnnnnnnnnnnnnnnnnnnnnnnnnnnnnnnnnnnnnnnnnnnnnnnnnnnnnnnnnnnnnnnnnnnnnnnnnnnnnnnnnnnnnnnnnnnnnnnnnnnnnnnnnnnnnnnnnnnnnnnnnnnnnnnnnnnnnnnnnnnnnnnnnnnnnnnnnnnnnnnnnnnnnnnnnnnnnnnnnnnnnnnnnnnnnnnnnnnnnnnnnnnnnnnnnnnnnnnnnnnnnnnnnnnnnnnnnnnnnnnnnnnnnnnnnnnnnnnnnnnnnnnnnnnnnnnnnnnnnnnnnnnnnnnnnnnnnnnnnnnnnnnnnnnnnnnnnnnnnnnnnnnnnnnnnnnnnnnnnnnnnnnnnnnnnnnnnnnnnnnnnnnnnnnnnnnnnnnnnnnnnnnnnnnnnnnnnnnnnnnnnnnnnnnnnnnnnnnnnnnnnnnnnnnnnnnnnnnnnnnnnnnnnnnnnnnnnnnnnnnnnnnnnnnnnnnnnnnnnnnnnnnnnnnnnnnnnnnnnnnnnnnnnnnnnnnnnnnnnnnnnnnnnnnnnnnnnnnnnnnnnnnnnnnnnnnnnnnnnnnnnnnnnnnnnnnnnnnnnnnnnnnnnnnnnnnnnnnnnnnnnnnnnnnnnnnnnnnnnnnnnnnnnnnnnnnnnnnnnnnnnnnnnnnnnnnnnnnnnnnnnnnnnnnnnnnnnnnnnnnnnnnnnnnnnnnnnnnnnnnnnnnnnnnnnnnnnnnnnnnnnnnnnnnnnnnnnnnnnnnnnnnnnnnnnnnnnnnnnnnnnnnnnnnnnnnnnnnnnnnnnnnnnnnnnnnnnnnnnnnnnnnnnnnnnnnnnnnnnnnnnnnnnnnnnnnnnnnnnnnnnnnnnnnnnnnnnnnnnnnnnnnnnnnnnnnnnnnnnnnnnnnnnnnnnnnnnnnnnnnnnnnnnnnnnnnnnnnnnnnnnnnnnnnnnnnnnnnnnnnnnnnnnnnnnnnnnnnnnnnnnnnnnnnnnnnnnnnnnnnnnnnnnnnnnnnnnnnnnnnnnnnnnnnnnnnnnnnnnnnnnnnnnnnnnnnnnnnnnnnnnnnnnnnnnnnnnnnnnnnnnnnnnnnnnnnnnnnnnnnnnnnnnnnnnnnnnnnnnnnnnnnnnnnnnnnnnnnnnnnnnnnnnnnnnnnnnnnnnnnnnnnnnnnnnnnnnnnnnnnnnnnnnnnnnnnnnnnnnnnnnnnnnnnnnnnnnnnnnnnnnnnnnnnnnnnnnnnnnnnnnnnnnnnnnnnnnnnnnnnnnnnnnnnnnnnnnnnnnnnnnnnnnnnnnnnnnnnnnnnnnnnnnnnnnnnnnnnnnnnnnnnnnnnnnnnnnnnnnnnnnnnnnnnnnnnnnnnnnnnnnnnnnnnnnnnnnnnnnnnnnnnnnnnnnnnnnnnnnnnnnnnnnnnnnnnnnnnnnnnnnnnnnnnnnnnnnnnnnnnnnnnnnnnnnnnnnnnnnnnnnnnnnnnnnnnnnnnnnnnnnnnnnnnnnnnnnnnnnnnnnnnnnnnnnnnnnnnnnnnnnnnnnnnnnnnnnnnnnnnnnnnnnnnnnnnnnnnnnnnnnnnnnnnnnnnnnnnnnnnnnnnnnnnnnnnnnnnnnnnnnnnnnnnnnnnnnnnnnnnnnnnnnnnnnnnnnnnnnnnnnnnnnnnnnnnnnnnnnnnnnnnnnnnnnnnnnnnnnnnnnnnnnnnnnnnnnnnnnnnnnnnnnnnnnnnnnnnnnnnnnnnnnnnnnnnnnnnnnnnnnnnnnnnnnnnnnnnnnnnnnnnnnnnnnnnnnnnnnnnnnnnnnnnnnnnnnnnnnnnnnnnnnnnnnnnnnnnnnnnnnnnnnnnnnnnnnnnnnnnnnnnnnnnnnnnnnnnnnnnnnnnnnnnnnnnnnnnnnnnnnnnnnnnnnnnnnnnnnnnnnnnnnnnnnnnnnnnnnnnnnnnnnnnnnnnnnnnnnnnnnnnnnnnnnnnnnnnnnnnnnnnnnnnnnnnnnnnnnnnnnnnnnnnnnnnnnnnnnnnnnnnnnnnnnnnnnnnnnnnnnnnnnnnnnnnnnnnnnnnnnnnnnnnnnnnnnnnnnnnnnnnnnnnnnnnnnnnnnnnnnnnnnnnnnnnnnnnnnnnnnnnnnnnnnnnnnnnnnnnnnnnnnnnnnnnnnnnnnnnnnnnnnnnnnnnnnnnnnnnnnnnnnnnnnnnnnnnnnnnnnnnnnnnnnnnnnnnnnnnnnnnnnnnnnnnnnnnnnnnnnnnnnnnnnnnnnnnnnnnnnnnnnnnnnnnnnnnnnnnnnnnnnnnnnnnnnnnnnnnnnnnnnnnnnnnnnnnnnnnnnnnnnnnnnnnnnnnnnnnnnnnnnnnnnnnnnnnnnnnnnnnnnnnnnnnnnnnnnnnnnnnnnnnnnnnnnnnnnnnnnnnnnnnnnnnnnnnnnnnnnnnnnnnnnnnnnnnnnnnnnnnnnnnnnnnnnnnnnnnnnnnnnnnnnnnnnnnnnnnnnnnnnnnnnnnnnnnnnnnnnnnnnnnnnnnnnnnnnnnnnnnnnnnnnnnnnnnnnnnnnnnnnnnnnnnnnnnnnnnnnnnnnnnnnnnnnnnnnnnnnnnnnnnnnnnnnnnnnnnnnnnnnnnnnnnnnnnnnnnnnnnnnnnnnnnnnnnnnnnnnnnnnnnnnnnnnnnnnnnnnnnnnnnnnnnnnnnnnnnnnnnnnnnnnnnnnnnnnnnnnnnnnnnnnnnnnnnnnnnnnnnnnnnnnnnnnnnnnnnnnnnnnnnnnnnnnnnnnnnnnnnnnnnnnnnnnnnnnnnnnnnnnnnnnnnnnnnnnnnnnnnnnnnnnnnnnnnnnnnnnnnnnnnnnnnnnnnnnnnnnnnnnnnnnnnnnnnnnnnnnnnnnnnnnnnnnnnnnnnnnnnnnnnnnnnnnnnnnnnnnnnnnnnnnnnnnnnnnnnnnnnnnnnnnnnnnnnnnnnnnnnnnnnnnnnnnnnnnnnnnnnnnnnnnnnnnnnnnnnnnnnnnnnnnnnnnnnnnnnnnnnnnnnnnnnnnnnnnnnnnnnnnnnnnnnnnnnnnnnnnnnnnnnnnnnnnnnnnnnnnnnnnnnnnnnnnnnnnnnnnnnnnnnnnnnnnnnnnnnnnnnnnnnnnnnnnnnnnnnnnnnnnnnnnnnnnnnnnnnnnnnnnnnnnnnnnnnnnnnnnnnnnnnnnnnnnnnnnnnnnnnnnnnnnnnnnnnnnnnnnnnnnnnnnnnnnnnnnnnnnnnnnnnnnnnnnnnnnnnnnnnnnnnnnnnnnnnnnnnnnnnnnnnnnnnnnnnnnnnnnnnnnnnnnnnnnnnnnnnnnnnnnnnnnnnnnnnnnnnnnnnnnnnnnnnnnnnnnnnnnnnnnnnnnnnnnnnnnnnnnnnnnnnnnnnnnnnnnnnnnnnnnnnnnnnnnnnnnnnnnnnnnnnnnnnnnnnnnnnnnnnnnnnnnnnnnnnnnnnnnnnnnnnnnnnnnnnnnnnnnaggctggagtgcagtggcgtgatctcggctcactgcaagctccgccttccgggttcatgccattctcctgcctcagcctctcaagtagctgggactacaggcacccgccaccacgcccggctaactttttatatttttagtagagacggggtttcaccgtgttagccaggatggtcttgatctcctgacttcgtgatctgcccgtctcggcttcccaaagtgctgggattacaggcgtgagccaccgcgcctgacccaatgtttcttaaaatacatccaaacataaaaagaacaaggatgtttatagctggtatatcaccatagccatcactataacaccgtaacaaacatgcaaatttgttacaaatctaattctcaaatgaataccattcaaattaatagcatgattttaatgtgacaggtgatgctattttattaaaactctatcatctgtgctcaggaagtcatggctrctagggtaagttttcctttcctaaccaattatgtgccagttggtggtaacataacaccgttttcctttgtttcctttattcaaacttctcttgtactatgtactagagcatgaacacgtctttgacctacagttatgttagctggagacacagcagaactactgttgtcatcttgatcctgaatacaagggccgattgaagccccagaaatcatggggaagtactcgtttacataaagtggtcatgtagataatctaaaatatgmccgttagtgtattaagatcataactgcctaaagcttcctgtgccaggagtggtcttagctctcaaagaagtcatagtctggccaggcgtgatgactcatccctctcatctcagcactttgggaggcgaaaggattgcttgaggccaggagtttgagaccagcccgggcaacatagcttgatcccgtttcttaaaaaatggaagtgatatccaggyggggaaaccttcctgctgtagtggagcctcttgagatggcacacgtattttgctcacaggtgctatcaatatatagctctggttcttcagaatataaataactatcacctgaccccaataccttatctatattgagattgttcattagatcyaaaacatcttgtgcatttcttgctttttagtcatgcacagaccttgtctttactttcaaagacagtttggtactgaaaattgctctggtaaattaacacaatttatttaatccctgctctttccaatctttagcaacgtttttttcattgtcaccatcagttgaccttgctgagcttccaagtggcaattgcttttgttgtattgtttaaaggcaaacaaaaatcaattattattggctctagagtgcctggcgaggtggagctcagttctttgtgcattgcgcactatgctgctggtgtctcagctgccatgcttatggttgcattactttcctgtctagctttggtattcttgcctttaaaaatttctttttccatttgcttttcttagccagtgatgacagtaaaataaggaacgacctatttattgttttaagagatacgctggatggtgcccaggcagatgagcattgccattcaaggtggcttcttggtagactgcatttactcttaatcgggtgcctgtgggtcagtgcatttcttggtcatccttactctgtcaaagctgccttgttagccaggttactagccatactagtctcattaccttacgataacacctcattcaaatggccttaacgaagttgaacacttatcttagtcactatggttggctttgaaccttttctagaagttaagtttattccctgggaaaaaacgtgtttgccaccacacagagtgctgggtgtactgggaacccggcttcaaaggcaactactccagtagggaaggttgaggagggtattgaatgatagctcactgcttaaataagtgtttagagtcccaaggtatatgtaatggcatatgaaatgcctagtgtttaaagaatattcagaaataatcagtcatactctttaatattcatatctcatagagttagcatcaggaaggaaacttggtagattaaataaaatagcagaaattactgctggatttttgtacagtagaaatgtatgcacatttttctcccctagtagtcacttaagttgcatatccatttcctgttacatctcatgacatgttttgggtaaaccgtttttggaagcgtccatttgtgtagaagttaggtggttctgagtttaactttgtacacatttctaggcacraggaaattaaataactggctgagtgagagtgatctcgttgaatgctgaggcttgtttgggaattgggtttattttggtgaaatttgtaaatttagatccactctgtattagttttttttttttttttttttttaacggagtctctctctttcacccaggctgaagtgcagtggcatgatctcagcttactgccaccatgccaggctaacttttgtatttttagtagagacggggtttcaaccatgttggccaggctggtcttgaacgcctgacctcgtgttccactcaccttggcctcccaaactgctaggattacaagcatgagccatcgcgcccggccaagtccgtttttacactcctataacgacatacatgagactgcgtaatttataaagaaaagaggtttaattggctcacgattctgcaggttgtacaggcttctgcttctggggaggcctcaggaaacttacagtcataagggaaggtgaagaggaagcaagcatgtcttacatggaagaatcaggaggaagaggggtggggtgccacatatttttaaataaccaagcacagactcactatcacgagagcaacactgaggggcaaaatccactcccatcatctcatctccttgtaccaggcccctcctacaacactggggattgcaattccacatgagatttgagttgggacacaaatctaaaccatataaccctcatacacatgtattgtaattcagaatttgtcattttaaaaaaaaatttttaagattagcttatcaatttaaatgtttccagccctgaactctcaaagtcaactttaatgagttttgatttttgccgagaaagatcaacagcagaagaaagagaagtataacaaaacttagctccacaggagcaaactggagaattggagtactggtttatgattttggtcagttaagcagaatgcagtcctagtttaaacaagactggataaaagtccaaattcaaataccattcttacaagtgtttgaatttaattttgtcagtgtacatacatatatctagtaccatagtgatctcaggctttgaagaatgaaaagcaaaagaaatgatttagagtcctggtccaaccactcagctatctgatatccttttgctattttcgtttaaggggttatcagggaatgagctaatttgacattttctgcttaaagcaatggttggggctgggttggggtggagagagctgctctgaggaggtggtgtggggggcctgcgaggacacacttgggttacctggtacatctgcagttcccatggaattgggtctcaaaactgagaaatggaagtgtgagctaggaagaggagtagcttaatggggactttgccacacttttagtgctcctgtagctgcacacatgttgttctttgtaatgtatgatttgtgtcccagtggaacacttgaggagtgggagctggagaaaggaatgttgtacagtgttgtgcagatgtgggtgagatgaggtgatctgggaagctggcagtcttagttggcccaggaatgccaggacctgagatgacagctgctggtggcagcggggaatgcaggtgtatctgtgtcgaggttgggaattggactttgaagggctgggacttccagaaggtaaaatgggattgcactgtttgggagaaggggtacagatttttttgtttgcttttgagataaggtctccctctgtcacccaggctggagtgcagctgtgtgatcatagctcattgcagcctcaacctcctaggctcaagcaatcctccttcctcagcctcctgagtagctgggactacagacatgtgccactacacccagtgaatttttttttcttaaagatgaggtattgctatgttgcccagactgatcttgaactcctagaattctttttttttttttttttgttttgttttgagacggagtctcgctctgttgcccaggctggagtgcagtggcatgatcttggctcattgcaaactccgcctcccaggttcaccccattctcctgcctcagcctcctgagcagctgagactacaggcgcctgccaccacgcctgactaattttttgtatttttagtagagacggggtttcaccatgttagccaggatggtcttgatctcctgaccttgtgatccacctgcctcggcctcccaaagtgctgggattacaggcatgagccaccgctcacagccgaactcctagaattcttaaacattaaggacagaaacatctctgttcttaatcatgatttgcttttagtctcagcagatggaaaaatgatttacttgcaaagtgagagagctagatgaggaaggaaagaatatgattttgtaccactcagagaaaaatgtgagcatttctctactgtcttgggttggttattttccgttgattcaaaattgctctgcaggagacataggagaggcttgagagatgtcagtgggtggccatggctcagccttgatcctgagtgggtgggaatactctgttaatggggcaaagtggaccctccaggtccttcatgctccttttggaaagaagcgttcctggccagacacagtggcttacgcctgtaatcccagcactttgggaggctgaggcaggcagatcatttgaggtcaggagttcaagatcagcctggccaacatggcaaaaccccgtctctactaaaaatataaaaattagctgggtgtgatgatgtgcacctgtagtcccagctacttcagagctgaggcacaagaatcgcttgaacctgggaggtggaggttgcagtgagccaagatcgtacccctgtgctccagcctgtgtgatagagtgagaatctgtctccaaaaaaaaaaaaaaaaaaaaaaataggaaagaaaatatatgttcccctgtggttccctgttataccctcttctcttgaatagtttatcagaagggacaaccagctcctcatgcccttcctcagcaagtgtcaacagtgtgggagtgcagttgataaagcttgattttcacaactctgcaagtagctgagctccaccagtgttagaactgaaattgaggttatctcaccaggaaccaactttcagatgttgaagccagtagaaatttagtaatgtgggaaactgataactaaaagtattccaggttctaattattttgtcagctcagttttaggaagcagtcctagggattccccwggaagaaagtttggctggatagagggcagtgattgtgaattttctagatcttttgtggactgcttctgttgttaaaaaagcagcagtctctcagcacacgaatgggaagtgttaatgctgtaactgagtaacactgatactgagtttaaaataatggtaaatatcccactgaaatttcacccccagtacagattagggccttggaatgctggatagtggattaaggacatctgaaaatctacttcataaaagcagtgagaacattggcaaaacctattaatttcaagtttttcagaaccatggaaattagttaaagatttctagcaatctgaggaatgattgttcaagaaaacactgggatctcagtaggaacagtgaaccttgtgttttaacctgctgcaatcccattcccggcccctgaccacctccttggtggccttgaaaaccagcagcctcacagccatggcagctgtgaaactcagaagtctgttaaaccactggaagggacagaacagaactggagctcttgaaggaccatcctcaaagaaatgtcacaattcgaccatttggcagcttgcttgaaagggcctttctgagggctttgtctttgtttcacccaacacaggtcagctcacattgtgcaaacagctctacctgctgagcatttgttgaaaacaatcggtggtagttgtttaatcacagctgtctgaggtggtgttgctaattgaggccaagtggctgaccaaaaaattttttatttttattttatttatttatttatttatttttttgagacagggtctctctctgtcacctagcctggagtgcagtggtgtaatcgtgactcactgcagcctcaacctcctgaatttaagtgattggtcctcccacctcagcttcccaagtaggtgggaacacagatatgtgccaccatgcccagctaatcttttaattttttttgtagagatggagtctccctatgttacccaggctcaaacagtttttttaaaatggagaagtaaatgttccttgacgacttcaaaaagctccaacatattcctgggaatctagaaggctctgagcattctgagaaggctctaccttctctgctgtggcgatcttgaggctttatgcaagcctcaaggaagactaaggtagaattataaaccattcagcagagtgttgaaggcatgccccaatacccacacccacacgccctctcacctacccacccacccacccttagtaaaggctggaaaatttattaattcaaggcatgtaaggaaatctctgtgtagttactagcgaaccactaaactaagagtcttcagtggccatacatggcaaacaaaaaacaaaacaaacagactttatagaattagttcctgaaaatcactaatcagatagcaacaaaacaaaccctgggatgggggaagaatttgatttttagaattgacacattgtattagataaaatttctagtctttgacaaaaattagaagctatctcaagaaacaggaagatatgtcccatatacaggttaaaaaaacacacacacacacacacctcggtttctgcctagtttctaggatagaaactgtccttgatgaagcgcagatgttgggcatacttaaaacttaagtcactatgaaagttatgttcaaataactataggaaagcatgtctaaagaatcacatgaaaatatgcttgtgaggttgaagccaggaggattgcttgagcccaggagtttgaggctgcagtgagccatggtcatgatcaggccactgtactccagtctgggtgacagagcaagactctgcctcttaaaaaaaatattgggtgaccaaacagagaatgggaataaagaagtagagattataaaaaaaagaaccaatagaaattctggagtcataaactctagtaactgaaatgaagaattcactggaggggcttagcaggtatgaactggcagaagaatcagtgaactggaagacaggtcatttgagatagttcagtctgaacagcaaaaataaaagaatagaaaaatgaacaaagccttagagacctgtgtaacatcatcaaccatacccataatgggagtcccagaagagggaagatgtaaagggaaaaagaaggtatactgtgaatagttgtgtgtttgttctcatgccgctaataaagacatacctgggactgagtaatttataaaggaaagaggtttaattgacttacagttccacatggctggggaggcctcacaatcatggcagaaggcgaatgaggtgcaaagtcatgtcttacatggcaccaggcaagaataggagttgtgccggggaactcccatttataaaaccatcagatctcatgagacttattcagtaccatgagaacagtatgggagaaacttcccttatgattcagttatctccaccttatcctgcccttgacatgtggggattacaattcaaggtgagatttgggtggggacacagagccaaaccatatcaagttgtatgccaacaaattaggtaacctaaatggaatttatacaaattcatgtagatgcaaatggccataactgactaaagaatttgaaaatctgaataggccaataacaggtaaagagattgaaatagcaatcaggaaaccttccaccaaaaaatactgggtcacatggtttactgggtaaattcactgggtgaattctaccgagtattattataaactctttcaaaattttataattaacctgataccaaactaaagacatcacaagaaaactatggaacaatatcccttataaatacagaggccaaaatcctcagtgcaatgctagctttcctcccattctcactacttgtattctgtcataaaaaaaggattgtacaccgtgacaaagtggaatttatcccaggaacaaaaacttggttcaccataccaaaaccactcaatgtaatctgtcatgttaatagaataaaagacaaaaaccacatgatcatctcagtaaatgcaggaaaatcatttgataatattcagtactttttcttgatgaaaactatcaactagtaatagaaggaaaattctacaatttgataaagactgtctatgaaaaactcacagttaacatcatacttcatggtgagaaattgcatgctttctcctaagattatgagtgagacaaggatagtcattctcaccacttctatgtagcattgtactggagattctatctaggacaattagtaaaaataaaatagtaatataaataaaagcattgagattgtaatggagattggaatagaactataactagaaaagtatctgtagttacagttgacatgatcttgtatatagaaaatcctaaggcgcgcgcgcgcgcgcacacacacacacacacacacacacacacacacacaaatcttgaactaataattgagtttacaagcttgtacatacaagaacattgaagcatccagaaatgaaattaataaaacaattccatgatacagtagtatcaaaaagaataaaatacttgggaataagtttaataagtttatgatttgtacacaaactataaaacattcttgaaggaaagtaaagaagacctaaaaaacaaaagaaaggacattccatgttcacggattagaagacttacattgttaatacggccaatactccccagattgagctgcagatggagtgcaatacctacaaaatcccagctggcttttttttttctcagaaattaacaagtttattttaaaaatcacatggaaatgtaagggacccagaataaccaaaacaaccttgaaaaagaacaaagctggaagactcacacttctcaatttcaaagctttgctacaaatctacagttatcaagacagtgtggtactactgtgtggacagccatagagatccatggaattgaattgagagtccagaaatagacccttaactttacagtcagttgtgtttttgacaggggtgttaggacatgaatggataaagaagatgtggtatatccatacaatgggatattattcagccattaaaccactaagctcagataaatgcatggatgaaccttgaaaacgtatggtaggtgaaagaagtcagacacaaaaggccacacgtttatttgaaaattctggaataagcaaattcagagacaagaaatagatgagtgttaatatgtgctggaggctggtgggaggggagaatagggtgtgatggtagtgggtatagagtttcctttgggatgatgaaattttctgtgattagctaatggtgatagatgcatagttttggagacacattaaaatcaatgaattatacatttgagaggggcagactttatggtatatgaaatctcaataaaacgtatttaaaaacaatatacagttaagagcgcatccagatacacctaaggtattagtaaagcggtgcattaagctgaaatatctggcttgtgcaaacttggggcatttgtaccttatgtagaattccaaaatctgcttaggattttccctgtccactggactgccactggcagggtctgcttccctgttcctgggttgagggagcagcattggagcatccctcaattcctgaatgaggaagttagttaaaagggcaatgtgagctgtagggccacactcatctaacaggtgagcttaagtttccattgatggcagacctatcagatgtttcctcccattctcactacttgtattctgtcattttgctcktatcctcccaaaatcatgctaagattttttttttttttttaagacagagtctcactctgtcccaggttggagtgcagtgatgccatctcggctcactgcaacctctgcctcccgggttcaagcaattctcctgcctcagcttcctgagtagctgggattacagttgcgtgccaccatgcctggctaattttttgtattttttttttttttttttttaatagagttggggtttcaccatgtgagccaggatagtctccatctcctgaccttgtgatccgctcacctcggcctcccaaagtgctgggattacaggcgtgaggcagtgtgtctggccactaagaatttttaaaataagtgacacaatgaagaacaaggccatagagatgatcttgggtaatttgagggtatcaaaaagtatctgcctgatggatggcttgagacactaaaaatgagtaaatgattacaaagtaaggaatgataatttgttttgaagaataaaacagattcttgtctctggtggttgagggatacgactgatgctgtatattaagacaagaagatgaagcccaaatggcagggaaattgaagagaagatacaggggtatctaggcacagggttggctgtgaaagtttcaatatgtaaaagatgataggctgaaaggaagaggatggtggaaaatacaaaagaggcattgataattcaggagtgtggagtgtgagagaagcttctccataggtgaagagttggatggacagtggttgttaggtcaaaataacaataataataacctagcacatatgtcagatatctgtttgggttcatcttacgcaccattctcttgggagggagcatgctttgaacagatccaatttatgatggagttttaggaccagaaagcgtcgtagtagcagagacttctcgtcctagagagcaaaggggaagtcattttttagttagttagtttgtgttttagacagtcttgctctgtcgccttcgcctcctggatgttcaaacagttctcccgcctcagcctcctgagtagctgggattacaggcgcacaccaccatgcccgactactttttctacttttttagtaaagatggggtttctccatgttgtccaggctggtctcgaactcctgaccttgtgatccaccctcctcagccccacaaagtactgggattacaggcgtgagccaccgcatccagccttagtttgtttctgagatagagttttgctcgtttcatcacccaagctggagtgcagtggtgtgatcatagctcactgcatcctcaaacttgtggggtcaagggatcccctcacttcagcatcccaaaatgctgggattacaggtgtgagccactgcatctagctgggaagtacttttaagagtatttttttcaggctgggtgtggcgcctcatgattgtaatccaagaggtttggaaggctgaggcgggagggtcacttgagaaaaggagttcgagaccagcctgggctaacatagcaagacccccatccctacaaaattttttttttaaattagctggtggtggtggtgtgcactggtagtcccagctactcgggagtgaggcaggaagattgcttgaatccaggaaattgaggctgcagtgaaccatgattgcaccacggcactccagcgtgagtgacagggcgagacccctccagatgatagctggagatcatgttattttcttactgattttcccccggtttagcaatacaaagtgatcgttaggttggcacaaagcacgatggaaaataaccattgttggcatcaagagaaatctcacaccacttgataaatatagtgaactagattactaaagagtgatttccctggattgcttgaaccagggctcagtgaaaatgttgctgtttgctttttttgtggtcaggattttttkattaaatgagaagcctacaaatatgcaagctagaaggtgttgtattttgggattaagccagactgtagcaggatgttagtaatttgagttgcataaactaatctggggaggcagagtgagtagctgatgtcacatgaagagcaaacccttgattccattcgtaatacataatagaacaccttcgtttctaaaactgggtgcagtaaagcataaaaaaacctttagtagctgatgaaagattctgccccaggcttgagtctattaaccagaaaaactgaaacaaaattaggcaaggtggtaagttttgctttcttttagtggaatattaggatatacagcaaatggtagcaggaccacgttgggaaaagggccaaaagactttttaaaaatcctgtttgaggtttggatccattttctttcatttttggacatacctttgagtagtgggtaaactgagagctcagtgaggtgagcctgtgtctttcagcgggcgggcgggctggagttggaactcctgtttcagtggttttcagatcctgctgatctccagaatggctccagttcccccacccctaatgctttattatgaaaaatttcaagcctgcagaaaaggtaaagaatgtacagtgagcacccatataccaaccacatggattctgcaatgaacattttaatatacctgcttttttttttttttttttgagatggagtcttgctgtgtcacccaggctggagtgcagtggtatgatctcagctcactgcaaccactgcctcctggattcaagcaattcttctgcctcagccttctgagtagctgggactacaggtgcgcgccactatacccggctaattttttgtatttttagtagagatggggttttgctaacaggccagtctggtcttgaactcctgacctcaggtaatctgcccgcctcagcctcccaaagtgctgggattacaggcgtgagccaccatacccagcctcataacggcttttttttttttttttttttttttttttttgagacagggtcccactttgtcactcagtttggagtgcagtggtgtgatctctgcagccttgacctcctggactcaagtgatcctctggcctcagcttcctgagtagctggagctacaggcatgtactaccatgcccagctaatttttgtattttttatagagataggcttttgccatgttgcccaggctggcctggaattcctgagttcaagcaatctacccacctcggcctcccaaagtactggaatctctttttttggaatacgtttcaaagcatgtgatagacatcggtacagtacagtcctaaacactgagtgtgcacgtcgttaactacagtttaatatttgttttgtttctggatcttttccagggatttttttcaagattaaattccaagcgccatgatagtttctgagttagaaggatggggcaggcccaggaatcagtactttgaaaagctcccaagtgcttcttgtgatgcatcgggtttgggatcttctgccccagggagcgcttcccgattacttcatagctaatcctcacctaaaatgcagaggtgggcagttatctttaacctgaccatagagctccatttttggttttcttggaatcttttgtttaaaacagtggttctcaaccaggggcagttttgtgcctcgagagacattggacaatgtctgggatggtttggttatcacaccagggggcatctagtgatgagagatcagggatgstgccgagcatcctgtaatgcaccggacagccccacaggatggggagttatctggaccaaaatgccaatagtgctgaggctgagaaacgtatttttttttttttttgcctaaaagaaaattgcttgctccagrtgactccagacaaaccaaaataaaaataaaaagtaaaaactaaaatgacaacatgaaatgaatttttaagagccaaatgagacctttagagacaatctcatcactgcctrcctggtttccgtcaaatacagatttatgctccagaaagtacctaatttattaaaataagctgatttctaaaagcttgttagatggtcagtaatctcaaactttgagtgaatttacttgaaaaggtaatgttgctggtggcctttagtttcttttaatatatcttaaatatgatatcaaagaaaaacagaacatgatgctttgggatgaatgtaatgaatgaaaagcaggattctttggcaggtaactgtgtcccaggccctgtcctgcagggtggcagggatgtgctgagctgggtgaggggggaccgctgagggcttctctcagtagttgctctgtgtagaattttctgagtgtcttgggagaatgggggcatttttcctgaaggtctcacttgactccacagtgaatggctttacctgtctcttgagtaagatgcatttctagtaatgctctgactacttagtccacgtttgactagtttttaggaaaacaatatgtacaatggaacagaaagcttacagaaataaagggcagttcttttcttgaggtgaaagtgatgtggggagccagtaggtgacaggatttgctctggcccctccgagggaggaggaagatgaaggtgaaacgtggtattggtcagtccgtttcctgcttggttgatttcagggacctgatgagacaatatggtggtgaaaacagactgctggattgcaatgggcggaactgggcttagtctctggataggtgtcagttcatttcacacctgtcattgagggaaaataatacctgtatggctgttggaagattaaatgagactatgaacgggagctgtgtggataaaatgtaccaggcactcccagtgccagaaggtgttcttgttagttctgggtgtggcgatgtgcgaagacacccgtgtctgcggggtgtgtgtgagctgcagataaccagcaggtcctgctgatgaggcaaccttcttgggagtcttggctcagttccggggtttaattacgatgtatccttgggcaagtggcttaatgtctctgattgtaatttccttcattttttcatatctaaaatgaaagaggtgcttggatattcctaagggttcatctttaggagtctgtacttctggtgtggagctttctggaaaaaggcttctgggaatctgaaatggcagtagtgatgggcgtggtaacagcagtgttcatacgcttcctcagtaattttatgtaacaaacactcacagtgtacttactgcccctgagatcttaaaaactctcactttcaactttcacgacaccctataacttaggtaactgctattatccctggtatacagatggggaaactgagcctcagagaggttggtgatttgccccaagtcatagctgggaagtggcagacctcgatgggatgcaggcaccctgccctctgggctccgatcacttggccacctccccgcatgcaccacatgggctgtggagttggaggcatttgtgggcttcaagaatgagagttggtggggagtatgtgtgaggaaccggaggggtcatttccctgggactgggattgtggaggttttgattttgcttttccctttttaaactgggtgaggtatgagcatgggaactctgtacggaatgtgtcattggagagggacagcagggacaatgaaggtagtccccagagaagtatgagaaactggcattcagtgctcatgcagaattctctttgttttaataataatacaaataataacattaatattatttttagaggcagagcctcactctgttgcccaggctggggggcagtggcacgatcatggctcactgtagccttgaactcctgggctcgagccatcctctcacctccctcagcctcctgagtagttgccatgcgtaacaccgtgccttgctaagttttaaattttttgtagagaccgggtctcactgtcttgcccaggctggtctcgaactcctggcctcaagcagtcctccaccacagcctcccagagtgctgggattaaaggtgtgagccactgcaccctgcctaggattctctgtagatggggagcccacctgggtgagatgccagacacctggctccggcatatgcacagcagtttcacacgagcgtctcttactcaggtttcagagttctggtaaaagatttaggtttgacatccaccctttgaggtttttggttctcacatgtttgataacctgaagcttgtgggtttgatatgggcagtaaagtgggattatttctgttagagatccttattccctagagactttctggtctggaaaggtgagaggctatatattcattagctggaaccaccatgtggatcatttgttggaagaactgttaggaagaagacagatattgctatagagagcagggccagatgagcgagaaggcaaatgtacttcattcctgtacctgcaggcttattagggacagatgccctcaggcggggatgtgtagcttcacttgactgctctaaataaggagcgagagggtggtgtgtgtgttaaccatcaagattaagcaagcaagaaaaagacaaaagaaagccatcatttagtaactggtggagtgagttggagcctgggagctgccccaggacaactgttatttcccttgatcttcctcaaaccctaccaggaagtgagggcaacagttccctaaagcagccccatcaagctcttaagaaagcagtttcactgggagtggggagaggtagaattgggaggtggtagagggctggggggtatgaaatgtgagggccggagtcctcagcatcggaactccagaaataaaaagttgtctgggtctttgaaagcctcctatatgataatgttacagtaacagtgttctctgctactttcaatgaataaaaaacctagggtttctcagctacagtgtgcattaagagacatttgtggtctagttttggcacttcatttctatttgggaacatgcattctgagttttagacaactagcttccaaatgaaattttggaacaccaccctttttttttttttttttttttgagatggagtcacgctctgtcgtctgggctggagtgcagtggcgcgatctcggctcactgcaagctctgcctcctgggttcacgccatgctcctgcctcagcctcccgtgtagctgggactacaggtgcctaccaccgcgcccggctaattttttatatttttagtagagacggggtttcaccgtgttagccaggaaggtctcgatctcctgacctcctgatccacccgccttggcctcccaaagtgctacgattacaggtgtgagccaccgcacccagctggaacaccacccattttttaaagcagagaatttattgttatttgcacaaaaggacgtttgaacactttaggaaatctggatgctggaattaactcggtcaaaacaaagcaaaacacacagaatctcgtatcttttcctgccctgatgctgaactgcagccttgatttatgttttgtttttccacttttgtttctgaacctatgtggtacaggctgaacccttgtccctgcttcggagcacttaccttaattattatagaaaaaaattaagagttggctgactctgtgctgaactttctggtttttttccaggcagtttctccataacaaatgcgttttgcatagaattgaaattgcctatttacctcaatgacaccatcctaatagttggtggtaactacctaatctaataatctctcattgtgtgtgatagggctatttattgtattttagagtgaaataatgcattttgtttgcattttaaaaaggaatggtacaggaaatgattgtaatccaggactaaatatacagtttgcagtctttttattctaattgctttctgatgaatatatatatatatatatatattyttttttttttttttttttcttgagatggagtcttgctcttgtcgcccagactggagtgcaatggcatgatctcagctcacttcaacccctgcctcccgggttcaagcaattctcctgcctcagcctcccaagtagctgggattacaggagcctgccacaacgcccggctaatttttgtatttttagtagagacggggtttcaccatgttggccaggctgggctcgaacttctgacctcgtgatccacccgcctctgcctcccaaagtgctgggattacaggccttctaataaatattattttacacatcgagatagtactgtttatgcattttgtatgctgcctcttaaatctataagcattttcttttcttaaaaaaaagctttgggctgggtgcattggctcatgcctgtaatcccagcactttggggggctgaggcaggtggatcacctgcggtcaggagttcaagaccagcccggccaacatggtgaaaccccgtctctgctaagaacacaaaaattagtcgggcatggtggtgcatacatgtagtcccatctacttgagcgtctgaggcaggagaattgcttgaacctgggaagcggaggttgcagtgagtggaggttgcagtgagctgagatcacaccactgcactctggcctgggtgacaagagcaagactccatctcaaaaaaaaaaaaaaaaagctttgataaatattgtacatgattgcaaagcgtcccatcgtgtggatgttcacttagttatttgatacatatttttgtgttcttgggctgtttctaatatttctgtattacaaataaggtgatgggaagcagtttcattcatcaatcattctttttaaatgtcccttcctatcagtttctgttaatcagtcaaaagcgtatacattcttagcaggaacttaaattcttagtaggaatcttaacaggttaagatttctaagggtagagagggtacctgttttgttaaccggtggcttaataccatttaataccagtaaaggctcaataaatgtttattgactgaatgaacagaaaagatcagtgatcatgaagaatggcccagttagtggtatatatacgagaagtgctgcagtggttcacagtaacatgataataactaattgtgtaatgatttggcacgaggtactgatctaaatgatttatacattgttgcatgggattttggaaggggagggagtatacctctaaattagttcatgctatgggatggaagtaagactttaaatttaggtgggctcaaaaaacagaaacaaaccaggggccgggtgcggtggctcacgcctgtaatcccagcactttgggagtctgaagcgggtggatcacgaggtcaggagatcgagaccatcctggctaacacagtgaaaccctgtctctactaaaaatacaaaaaaattagccgggcgtggtggcgggtgcctgtagttccagctactcaggaggctgaggcaggagaatggcatgaactcgggaggcagagcttgcagtcagcagaggttgcaccactgcactccagcctgggcgacagagcgagactccatctcaaaaaacaaaaaaaacaaaacaacaacaacagaaaaaaatcaaatgttcgtcagctgatgagtggataaacaaaatgtggtatatccatacaatgaatgctatgctatgctgccataaaatggagtgaaacattcatacatgttgcaatatggatgaacctgccactcaagtagctggtactacaggcatgttccaccatgcctggctaatttttgtattcttagtagagacagggtttcaccatgttggccggcctggtcttgaactcctgacctcaggtgatccacctgcctcagcccctcaaagtgctgggattacaggcgtgagccagtgcgcccggcccaaagcttttttttaagaaaagaaaatgcttatagatttaagaggcagcatacaaaatgcataaacctggaaaacattatgggaactgaacgaatccaggcacaaaagaccacatattgtgtgattccacatattccacatattgtgtgattatatggaatgtttggaacaggcaaatccacagagacggaaagtagattagtggtggcatagggctggaagaggaaggaaacaaggactaactgctaatgggtacaggattttttttcctcaagtgatgaaatattcttagattatgaggatgcttgtacgactctgtggatatactcaaaacgatttaattgtatactctaaatgggtaaattgtgtataaattatgtctaaataaaaccatgaaaaattggatgaggtttagcattgtagaaggaaagatgggggtggtggtgtgttagtttttgagggctgccatagcaaaacaccacacactgggtggcttaaacagtaaccatttattttctcacagttctggaggctagaagtccaaaatcaagatgtcagcaggtttggttttccctgaagcctctctccttggcttgcagatggccacctggccaccttctcactatatcttgtggggtttttgtgtgtgtgtgtgtgtgtgtgtgtgtgtgtgtgtgtgtgtgtgtttgagacagggtcttcctctgtcacctaggctggaatgcagtggtatgatcatggctcattgcagcctcaacttcctgggctcaagagatcctcccaccccagcctccagagtagctgggactacaggtgtgtgccgcaatgcccagctaagtttcgtaattttggtagagactgggtcttcctatgttgcccagcctggtcttgaattcctgggctcaagtgatcctcccacctcagccccccaacatgctaggattgcaggtgtgagccactgcgcccagcctggtcttgtctttgggcacaaatatccgctagtgtctcattgcgtgtccacatttcctcatcagctctattggattagagcccagcgtaatggcctcattttaacttaatcacttctttaaagtcccagtctccaaatacagtcccattctgaggtagtgaaggttaaggctccaatgtgaattctgggggaacatggttcaacccaatgagaacaatggttatctgttgggagtgaggactgatatgagtggagatgcatcggtaaagatgcgcggaccacagatgtgacgcagcaggtgtgcacagaggtatgggatggggtcagtgtggagggccgtgtgccaggcagcagtgtggacttggtcctctacccagcgtaggggggtcattctgggggctgaaccgagggtgacactgtaaaaccatgcttcaggaaaattcatctctgcgccctggaggatggactgaggagggaagaggctgagggaaatgagtgtgcaagataatgaggcgatcccaagggaagtaaaaggattggaggccttgcaaaagcaaagcgaacccaagcttcagaacggaggcatctgagatgatgtcacagttttgaaccttatttatagaagaaagagggtgaaatggggaattaggtaaatgaaaatataggtcccattgttggtaagatacatggagtgtcattgattcagtatttagtgtgcttttccttattttaaacagctttcatagctcacttccaaactgtatttttgcaaccaactctttttctctctctattaaaaggagaatcttttattttacactaattaacagctgattctcctaagagagttttcaggaacctaaacctcagagttagatggagacaagtgtctttgttaatcatttatgtgaggtcagattgtacaatttgtaacagattttacagctggttcctttattaagggatgggtaggattcctactaattattattttgagttttactttgtttttaaccattgaaacttgggggatgtactctttggtttgggtagattttgcttatagatattgaagtttgagttgttgaatttcatacatattttattttgacttttaatcctttaaaacatttgactctgactccattgagctctgtagaacatctgtcatccagatcttttgccagaatatagagccttgattggacaccttgccagctaatttaaagcttcccaagatgcagaatactgtgtaaaatgtcctacctgttgtgtcagaagggagaaaataagacgagattttcatatttgcttgtagatccataagaaacttgggaagaattcctaagaaactagcagtagtggttccctgcagggtgggggctctggatgtgggtgtggcaggggatgggagagactggcaggttgaggagcagggtgagagggatgtttttatgatgtacattctcatatatttattttgaactatttgaatgtattactcatgtaggaagacaaacctttactttccaaaaatattagggaaaaactttcaagtctctcatttttagcctttttgttgttctgatatttccacacaggacagacggtaacatgcccgatacattttaagtacaaacaaggctgtaagttgccttacttgactttcttcactattttctattcaaaaaagtatttttgaatccaagggaattagaggaataatcttgaaatgattatgttttgggggaaaagtatattattaatatgatagttatctaatgttgtgtaacaaattgcctccaaatttagcatatgaaaacaataagcattcattgtgtcacacattcattctttcttttcagtgaaagttaacctgtttccatctgaatagatttctcactctgtatcctgccagtaatcattttgtactgtttctgtgcctttcaatccaagagtccaacctgatgaggttctgctggtgtaattcttttaaaagcattgtggatgtcctgtgaatctcactggagttcactttttaaacattagacttctgtggagactgctgaaggacaacacccttacttcttagggcctttggtttgccagaattgttctctgagccattgccttggattttttcctgacttcttaacaaaggattttataggtgggaccttcaacactctggaaattgccttagctacattcagccatctccttaggtacattttccatctcccacattgtagcaggcaatggcgttgctaaactttccatcaggaaataacaaagatctccttttccagtttccagtaacattttcctctctacaccatcatccacagtctcctgaaaggccctccaggttctagcttttccagggctcttcaggggttttcgaactctctttttacagtctttccagttcctgcccattgccacgttccaaagtcactcacacattttaggaatttttctttttttctttttagcaagcataccaattccagttaccagaatctgttagtttttgttatgtgttgccgcagtacagattgcctcaaagcttagtggctgaaaacaaggaacattactggccaggcacagtggctcatgcctgtaatcccagcactttgagaggccgaggcgggcggatcacctgaggttgggagtttgagaccatcctgaccaacatggagaaaccccatctctactaaaaatacaaaattagctgggtgtggtggtgcatgcctgtaatcccagctactcgggaggctgaggcaggagaatctcttgaacctgggaggcggaggttacggtgagctgagatcgcaccattgcactccagcctggacagcaagagtgaaactccatctcaaaacaaacaaaccaaacaaaaatgaacatttactgccatacacacttcctgggggtcagggatcccagagtgtctccgctgtgtcagtatgtctcagggtttcctgaggctgcagtcattatgcccgctagggcttgggtgggactgaagcacctgcttccaagttgcctcactcacatacctggcaagttggtgccgttgctggcaggaagcctgcttttcttgccaggtggacttctctgaggggtgcgtgaatgccttcactacagggcagctgacttccctcaggacacatgattcaggagaccaggggaaagctgcagtgtcattttatcacataatcccagaagtaacactctgtcatttctgcaatatcctgtgggttacacgtcagcattattcattgtgagaggtgactacatgagggtgagtccaggaggcaagaattattgggggctatcatggaggtttgataacataattggtaagaaattcagatacacctcagacttgattgtggcataccagtgtgttgtaaaacttgtgagaatggcttgccttagaaagacaagtagtccatccagtgtcttattcttatgttaagttgggattgctattttgttacccttgggcctctatatacaaagcctctcatagtaatagatctaattgggttgaagtttagtattatgtatatgccctctgcttttattagtagattttactttcgtgaaaggaacatataaacttcattattgcatttttgtataaatgcagctggggacatggttttattacccaatgtccattttgtaaatatttagagaactttttttttgcatcataaatcagtataaatagaagcttggtttccattgttgccctggctatgaggaagctgagagtgaaatttgtcgttcaagtgtggcagttatgttactgactggcgtatttatattctcctttatttgatattttgctatgagatgttccagtttacttgtgggaaaaaaagccaggtgttcttgaactcaacaaatatttattgaattccacttgctggccagacagcattccatgtgccccagatatggcactggacagatagataaggtccccactcgcctacagcttccaacctggtcgtaagaaaataccttagcttttgctccataatgtggaagaattggcctcagagaaaacctaattcatatgtaccacgtttctacccattcaagttttatttcataatttttttttttttttttttttttttgagatggagtcttgctctgtcacccaggctggagtacagtggcacaatctcagttcagtgcaacctttgcctcctgggttcaagcgattctcctgcctcagcctcccgagtaggtgggattacaggtgcatgccaccatgcctgactaatcttttgtatttttagtagagatgggctttcaccatattggccagcctggtcttgaactcctgacctcaggtgatccacctgcctcaracttccaaagagctgggattacaggcgtgaaccacgatgcctggccgtatttcataattctatctttccatagaaagaattggctggggcacgtataactaatgtgagttactgatttcagaggaagcttttggaagtggttgataggcactgaatgggatggggtggtgagtggtttaaaataacacttgaacctttggattcaaatggttttaaatgcatctcagaaaagtgaaaggtgaatgggagagctacatccattgagagcaagggttcatcagctagggctgtggcttaaactaagcagatattctttcctggcagttctacaggccagaagcctaagatcaaggcgtcatgagggttggtttctctgaggctcccagacagtcatcttctccctgtgtcttcacggggtctttattctgtgtctgtgtccaaacttccttttccttttttttttttttttgagacagagtcttactctgtttcccaggctggagtgcagtggcactatctcagctcactgcaacctccatctcccaagctcaagtgactctcctgcctcagcctcctgagtagctgggattacaggtatgtgccaccacgcccggctaatttttgtaattttagtagagacggggtttcaccatgttggtcaggctggtctcgaactcctgacctcgtgatctgctcacctcgtcctcccaaagtgctgggattaccggcataagccaccatgcccagcccaaacttccttttcttagagggtgggctttatctgtggttcttagttagcctcaccttcattcttccttttggtgttacggtcttgcttactgctttgggaatggatttgttgaaactacatgtgactagtttagggacccagtaggaggttttactataagtgtaaattaacaygtgcctttgggggaccttaaaagtttttgtcattgggccatgagatctgagtgcagctggtagaacctccttgttttctttggtatgagaactcctgggcttttgttggttccttccgttttctccggtgtattaccatttcacatcacagtgatattatccagataacacccatgatttgtttttaacggagtttcactctgttgcccaggctggaatgcagcggtgcgatcttggctcactgcaaccttcacctcctggttcaagcgattctcctgcctcagcctcccaaatagctgggactgcaggtgtgcaccaccacgcctggctaatttttgtatttttagtagaggcggggattcgccatgttggccagactggacttgaattcctgacctcaattgatccacccaccttggcctcccaaagtgctgggattacaggcacgagccaatgcacctggccacacctgtgatttattttatttcatttgagatttcagactttgtcgcttgttctttctgtaraagttttttcatagaagtatgttgtttcaaaagcaaccttcaaatagtagacttagcttggatgagaatctaaaagtctttgagtccaacaaccaagcaggtcccctgtccaggaagtaccttatagctgatgtttgagtatccctgcagatgggaactcactacctcctgaagcaccttacttctacccttggaatagtaacagagattaaaatgtccttccttaatttgaggtgaaatctgccttcttgtccattttacacacactaaccttccttccaccatgcaagctgagagagagccaggttgagcctgtgtttccacaacaactcttctcagacctcctgctgccacctaccatgcacttgctcttcactggctaggttccagttgctctgtacctttcctaaagtgtggtgaccagaatttggcacagtgagggaaggttccagagccctttagtgttatcgggggcacagagcttgggctttggagtcgctcagatcttgagttgatatgcacttctttgtccttgagcaaatgattgaaccttcttggactctcagttcctcattaataaaatgaagatgaaacaagatgagatggactgtgcacatttcctgatgggggctggtatgtgctggtgcccagtgcaaagtggctgctggcagaatggtgagtcaccagtacctgctcccttcactgagtgcttcctgtgtgcctggcaccattgctcagggctttacatggacttactcatttcattttcactgcagcctagagcgtaagtaagtatttgctttatccccatcttatagatgaggcatttgattctcaaaaaggtttcatagcttgcccatgttctagcagctagtaaaaggagaagccagagttttcatttaggtgggagtcctcaacctgctttcttaactgctgtgatctgcactgtggcatgagagtttgtcttaatgtaaatgcacatgtaatagcattattcacattgcctgagactgtggaagctcctttggcaaccagatgccacaggggactcatttcatgcttttagaagacttgagccactacatgccctgggaactgtgttgcttccccactggccatcactcttgcttttgtaagggwtgtcacattgagccattaagtgtcatctctggaactcatgactctgttattccacatattaggttttctttgtagctttgtgtcaactccaagccaggtaaataaatcttggaagaaccaagttacagatgtgagtaaaagaggggatggcagggggcagaagtcagggcaggccctgtgacttgccaccagcatcctcccttcgggggaggtcctttcatctgggtgctagctggaggaattggcaacgtcggagataaaggtgtagatgcaccagctgaacgtcttgctctgtttcccattttacgtataagatgggtgatggcatgctgcattcagatccccatgggtgtatttgggatttggggtgggggattgtgtgtagaaggcaggaaagattgcccagcaactctcatttgaattgagggtggaagcggttctcgggcacagtatgccaaggcccagggcgtccaagggacagagcagagatcacagatgctgaacgggtggggaaggagcactaggcagggcatttctgatgagactttgatttgggaggtacgaaagttgtatgaggaatcttgataaactgcttagagtgaatggagatgagtaggaatcaccaccattcacatactggctctgcaagccactcagcacagctctgcacctgctcttatggaggagaagacaagcagaagagaatgttctgatctagaagagttcgtgtaagagcatgaaggcaacagcacttgagatgtggtgcacatgagcaaaatttcagtttatgtggaatttaagattaacagattaaaaggtaaaattctctccctggtaccaaaaaaaaaaaaaaaatccatgtactccctctctctcttttttttttgtttttttttttggagatggagtctcgctctgtcccccaggctggagtgcagtggcatgatctcggctcactgcaagctccgcctcccaagttcacgccattctcctgcctcagccttccgagtagctgggactacaggtgcccgccaccacacctggctaatttttttttgtatttttagtagggacggrgtattccctctcttgactgatgtttcagcagtatgtggacagattcttttttaaggtaaatgaccaggggcttgtaatatgagtgtcacttaggcaacaggacatttcaatgaaatggtgatggaaataggttctttttgtagattgtgagctcttgggagcatggattttgctaaatatactgatttttaaatttttttgacatctagcatggtgcatttcacataggagtttttcaagaagtactcatttcacaggcatcttgaatgatagatgtttggtaagaactgcgcaagacagtgtactaatcactcattctcattcagcctctcaagctatcatggttggttagtaataacatttcaaaattatatttgtcccttaggctagcagagaatactgtttaacaggtttttcttgaaaagtaggagtagcgagctagagttgtctctaggtggggtaaataaaacatctcccaccccacccaaattgaagctgaataccttcaattcactactgtgcgcatattcatgtttcatgctgagcagttcacttgagactttctcacggaaagaagtgcgatacagttggtggtagtcttatatttgctacgtgctcatgtgttgtctgatgatagaatgcagtggtcaaatattgcacaatttacgccagaggaggagaattcccatcaactctccaaccatcataaatactttattccacacaataaggaaattgaacttttcagaagaatgatatagaacatctaaaataggttaaacttggaggaattatactgtccattgtaaaattggagccactcttgaaaaattgctgcatgccccactgaatgctagagcaagacatgcagtcccagctccaggggcttccagagtgattgaggcagggctgtgggctgctttcctgaagcctgactcctttctttcctcattacactgccacagatggtggcagatacagcatggattggcataagtcactctctactacctgcagaataaaggcccaatttcctagtgcagcttgcaaagtccttctcatctgccaccttcctgcctttgtgatttctcctcctgggactcctgcacccccttttttttttttaatttttcttttcttttttttgagatagggtctccatctgttgcccaggctggagtgtggtggcgcgatcatagcttattgcaggcttgacctcctgggctcatatgatcctcttgccacagcctcccagatagctgggaccacaggcacatgccaccccgcctggctaattttttgtatttttttatagagacgggatttctccatgttgcccaggctggtctcgagctcccgggctcaagcgatctgcccgcctcagcctcctacagtgttgggattacagacgtgagccactgcacccagccactcctgcacccttaccttttcgccgccctggccggctggacgactgcacccatttcacccggcattcttgtgcctgactgtgctctggccatttcctgtgtctggaatacccccattctcccatgctcagccccgtggactgtgtttattcgtaatcacacctcagagcccttccccttctccatggactccacccctgctgtgtagatggccccaacatcattttgctgagtggagtgccactgcaaggcatggcatggaggagcctgactgcrtaggtggcggyaccttgagggccttacagacctggcagttgaaggtatgggctagaagacagatgattccaaattacggctaagaaataggtaggctgtaaggcttgattgccgtgaatgcctctagaaagagcacttaaaaaaaaaaaaaaaaaagaagggatttccctgttcatggcctatgagtttaaaaacaagcaccccatgtcattagccctttgctcaccacagagttgctgacacattagacgatctagatatgtgtctgagattttggatgcctattgattgtgtattcacttagactttggtgcttttctagatgtttcacaagttaagatgttgttaagaggttctcattgttttattcctatgttctttccttccactcccaactcactccgatgtcactcatctgggttcttctgctcctgcctgggctgcttagtatttattgagctacacactgtgcttggcacccagggccatggaggcaggcaaagaggggggacatttattcagcagcttcttactgagggtatgggtgccaggtgctcgctctgggaaggtgcaaatgaaatggatgatggctgagcctgaagaattcccagggtgaacagatggggggaagccagttcgggcagagggagtggcaaaagctgctgcttaaagtcgttgctcccaccgcgtggggagtaattggatctgtctgcagcactgaggcctggacaggaagatgggactggaatgcagaggggccttgcagggctcagtcggggccaaagggcagagaggcagggcacagagagaagctgtggccgccttggttggtcccatggaatcctcgcccattggggccatgggcattgatcgacactgtggagcttgaaatctcaccaggtggaaacatctctgccagccctgtaatcatttccatagtttcttctggttcttttcatgaacattttccaatatttttatttgagcattaataaaaggtttgcctatatacttaaatttctgccagaaagctttgacttccgtgatctagagcaagcttgtgcaaccacaagcaggtcacatgcagcccaagatggccttgaatgtgacccaacacaaattygtaagcattcttaaaacattatgagccttttgtgtgatttttttttttttaaactcatcagctgtcattggtgttagtgtattttatgtgtggcccaagacaattcttcttcttccagtgtggcccagggaagccaaaagattggacacccctgatttagagttttaggacttaggttttgggaatgccaaatgtttacatggaaaggctcatccattaggatgagcatggttttcctcatgaactccttggtagaacctaatgttagtgtgtggctcttttcctttattattttcttctgtacagggtactttataaccaatagctgtttctgaaaatatgggaaaactatttttgaatattgaatcaattacattttcagggtagtttgataaaaggcattctgtggtcatctttatctaaaacgaatcctcctggccttagtgtgattattttattttatttattttattttattttattttattttattttattttattttattttattttattttattttattttatttatttgacagagtcttgctctgtcacccaggctggagcgcagtggcgcagtcttggctcgctgcaacctgcacctcccagattcaagcaattctcctgcctcagcctcccgagtagctgggattacaggcatgcaccacaatgcctggctaatttttgtatttttagtagagatggggttttgccatgttggccaggctgatcttgaccttagatgatccacccaccttagcctcccaaagtgctgggattacaggcatgagccaccccacctggccttagtgtgattttgtattttatgttgtgagttttgttttaaaaaaagaacatcagtaagttcagaaaccaactccatgcttatttgctgtaatgaatttttcccttacattggaaaaacacagttccatctgtcctgaaggcccataagtcacagaatgcggtgtgttggaatgtgaaatcctttcagccttgcagaatctttatcattgtgctaaattgccatgtggaagaatggcaggtggcagttagaacttagggctttctatttattctctttctattttgcattagtcagttaaggttctgatcttcagaactttgtatgaaagtcagtgcttcatacaatttcacatcaaactgtggcattgcaagaggcaaaccatttggaattcttccttaaattacaaaaagaaaaaaaaaagtgaatgcacgaagattgttttgttcgcaagacttatgacacagccctccagctctgtggcttttcattctgatgggaaggaaatgagaccattgtaaatgactgttcagaatattagtgccagctccatgccaagtgctgttaagaacatggagagagcattcgagtgtttgcctctgaatttttgcccaggccatagttcgcagttggccggcaggctgcaagggccattccaagtgggagaagcattccatccctgggacaagtaaacagaacctaaaacaaacacatgtttagttgaagtgatacagcaccaggcaaagtgttctacttttaatgagtgaaggacatcagaaacaaaggatcagagccccccacgttgcattctcaactaattatagcactaaggcaggaatccttggccctttatctggagtgagtcagagagtatatcatgccttatctaaagtctaaagttaattgagcccaaggcccttctgaatagacacacactgtaatcagatatacagatggagtgggaagaggtaaatggtttcagatgccagcctggtgtagttgcatgccggaggggacttaaaggaaacagtgagaagtattagaaaactgtagttgaccaggtatggtggcttatgcttataatcccagcactttgggagactsaggctggaggatcgcttgaacccaggagttcaagaccagcctggacaacatagctagaccccatctctacaaaaaataaaaaattagctggatgtggtagtgaacctatagtcccagcaacttgggaggcggatgtgggaggatcgcttgagcctgggaggtcaaggctacagtgagccatgatcacgccattgcactgcagcctgcgcgacagagtgagattctgtctcaaaatagcaacaaaaacaaaaaccaaaagtatagttgcagagaatggctttccctgcttagttttatccagatgactgttagaatagtggtgaagaatctgacaagtggcagaatgcagggccatgggaagggggagagttcatgcctaaggtcagctgagcagaggagacttggagaactgagaggggatccctctcctgtgtttgttgggagggacagagcctgttgcccagcctgcaggtgtgggagggaccctgcaagaagtccctttggtcaccctcttcaggccccacattgcctgatgaggttcagactcctaggcctatgaagggtaataaggcccgtctgttcctgcctttacttttcttctatcagtttctaagcactctcagcctccgggcctttgatcgtggagcgccatgatacagtggcgttgtcctgagtggttagaggtgtgaattctcgaggccgactgcctgggtttgaatccttgcttggccatcttccagctgtgtgaccactctatgcctcagtttcctcatccgtatgataggaatagtggcagtacctatttcatggtgttattgagctgtacagttgctagctgctgccatcatcattgtcatttcctcatttcttttagacccaaactctcacactttccggaattatttctggagccccccagaaggaattggtctcttttattctagattccctaagaggcacagagggatactagggtgagaagatagtggtggctcacagtcatcactctgtacttactagttttgaaaatgtatcaaattgctgacgtctctgagcaccagtttcccaatgtgttaaagaaggatggtgatacccaacccatgtcacagggtttcgtcagtaaatgctaaaccatgtggtaagcagatgttctcagtgagcaccaggtcactattattatgttacttgtcatgacgagttttacttgccaccttgtattatagttgtgatgactatcttttttctagctccacattgggacacatgaaattatagagttaaatgaactcatttgtagatacttgaaaattgtaataatctttgaatatctgtacctgtttgtgtccagattcttctggttattttgacttccttataccccagtgtccttttttttttggagacaagtttttttctcttgcacaggctgaagtgcagtggtgccgtcgtagctcactgcaaccctgaagtcctgggctcaagcaaatcccagtgccttataagcaggcttcctcaaggcctgttgtcttactcatctgtattttccttatagcatctaggtcagtgccttgcttataatgggcatttggcaaatgtttgttgaatgcatttatcattacttagtaataaatactaaactattttttaatgggaaaataggcaggtttgggttctcatgcacatgacccacatttgtcgaatgtctgctgtgtaccagccagcagctttcttcctttagtgctatttcctgttagagtgggatagtggtatttcagtccacctgatgaccatttaggccaatcacatgttaatgggaattgaatgcatgcattaaacacaacaccagcgggtgctgtccacattaaaaccaggaggtctgcttcattggttcttgactatattgaaagagttggaaatctgacctgggcatttgaggtagactctaaggggtgtaagacggccctttgttttagagacttaggattggtgtgagtgactggcagggactgctttagtgcccagacctttagtagcacasacacaatataggaaaactcttcaaggaaaaccagccccaaataagagagtaggtaatgttctgcttctcttgctttatattctgcttgctttacagaataatctgagatagctaataatcaaagtgcaggtcccccaaaatgaaagtgatcatcatagaaccagaaaagaagggataaaatactgatttcaaggactcctgaagccaatggcagctctgagtttcctggcagccaagacaaagacagaagcatgctgggatgatgcatcctcgggctcggtaaaggaagyacaggacctgcctgctgctgtgggctcagggaartgagtactattttccctgtctggagtggggaggagcacttgtctgtggtagggtgaggaggaccacttccttgggctatcagtcattaaggccccttaacatcatggccgattctgaaattacctctgaaagttgagatttatgttagactgtagctctcaagccagttcccttagaggccagagtaatgacagtgtaatttacttgccacctgcttgagagagacaattggtggttaagggactttcccaaggtgataaattgttttagcaaacagatccagaggacagctcctttcccctggtctatgtatgccttttgaacgccaagaccttatcctaaactcaagtttcacgaataggattaaaatacyctttggggacctttcttacattgagaacagaggctgggccacagcttggctaaagcattccagatctctcttctgagcaagagattttgacttgttcataaaccaggctctctctcatagtgggcaaggccttaaaaacaaacaaacctgcaaaacctgaggaaacatcttcctcctacgtacttagctgatgtaggcattaatggaaatggatattggagtgggaggctccttttagggggcagaaaagaaagaaygtttttatttttaattaaaaaaatattttcttttgagacagggtcttgctctgccatccaggctggagtgcagtggtgcgaatatggctcactgcagccttgacctccttgctcaagtgaccctctagccttggcctcccgagtagctgggatgacaggcgcacaccaccatgtctggctaatttttgtattttttgtagagatgaggtctcactggcttgcccaggctggtttcaaggtcctgggctcaagggatcctccctcctttgccttccaaagtgctgggattataggtgtgagccaccgtgcctggatgaaaaagaaataacttgattatgggttatggaagtttagcaatggcttcaaaaaatgtcagcagggaatggatgtctttttctwtcrgatgaaatttcagtaktcatctgatacagccaaccaggagaaggaaaactactaagtagaaagacttagataagtggagtcgaacatctctgggcttaaaaggagcatcactcctggcatattcagcgtggcccagctgtgtttctctgagggcgatgtcctcctcagggtctgtgaatggctgaactcagaacaaggcttttgcaatctgcgccttctgaatacagtttttgttctgttggtttaatttgcatttggtgtctggagtgcctggtcatggaaagagcccgttctttgttttgggtaatgagggctgaggtttccaataagtatttctcggttccgtccgtgtcgagtgtcatttgagtagcaagtgactgttgctcattgcactgggcctgcgagcctccatttgcacattagatttttgcataccctgcaattagtaaattacagaatgacatcatgaaatagaaaactgtattcccagatggaaatgctttccgtattctatgcatttttattcaaaggcagatgcatttgtaaacctctttggatggttgttctgccyttgtcagttacttcatagcaaatgtcaactgtaaaccaagagagagaatgagccaggatggagaacttttttttgtttaattgtgtcatgttgggtgctttttggaaagtgggtgaattattcatgatgacatgaatgggggtattattttaaattagtatagaagcaaatggttcacaacccatttattaagaccctaatgttgatgtggctaccaagaagctttaccagcaagggccagtgtgttgccttccttggttggttagtttttctacatccacttaactcctagcctaattttatcttttttttcctctgtttttctttccctgaatgtttwtttaagctctgataaatcattttgaattaaggtcgggtatgtatttcctttcttctcatcttcttccccctccatgactgcctgcatttgaatacatttccattgtgtgagaggcagtaatggtacagaggggtggggggtggtgactgcttggtgagctgtggctcacatgtctccagagacacagggcctaggaagactgattaaaaatcaacttttaactactataacggctcactttcctgaaacttgttatgctgtaaccccacctattgaagacataatcagaaccagaaagtgaacaaaattgaccctggaaatatgtggcaaaaattctgtgcaataagtatgataacacttttctttcagtgaattctctctcagggcccactcacagaaccaattttgacatcaaattttcttccttttaaaaatacagttaacccccacccccatctgcaggttctccctctgcagattcaaccaactgcagattgaagatattcagaaatttagaaaaatgaaaaataacaatataacaaaaagtaatgcaaataacgcagtatcacatctatttatgtagcacttgtgttgtattaggtattatatgtaatctagagatgatttaaagtatatgagagggtgtgtgtaggttatatgcaaatcctataccattttatgtcagagacttgaggatctgtgaattttagtatcctcaggtgtcctggaactactccaccatcaatgctgagggacaactgtatataatataaaataaataaaatatgtactgtaaaattgtaatcttgaaagtttgatcctgtggcagctgctattttcaggcagctcagcctttgtttgcatgctcaaaaccagcttgtgatttggtttctaagatcacggctggcttattatctgtgctggcttatcatgacagtggctcggtgttatggacacagtgagcatttggtgtcgatactcccagaatgaactgagtagaatggacaggagactgacctttgtctatttgtctatgtagcagtaatgccactaacttgttgcagtgctctttatcctcaaactatttgctatatatagtaatgcttaaattacatatattatatatattacatatacatattatatatgtggatatattatatattataattatatataatatatataattatatattatatagatggttctgactttgcacagttctgatatgcatgagttgcaattaccatgatttaaataataccagttccccaacaactctagtcaaatctcagttacccccgtgtgttaattgagtaattgcatgaagtacacaagcttgctgctagtgcttcagtatacaactcaccatgtaaataacagatgcatgtcagaatccgtggccaatcacagcacttctttcaaagcccatgggtgattggtcagtgcacatgttccttagttcatgcacagacagcagagtgtgtagttctgtggccttcttggctattggggataaaccagtgtgacattttacaaaaataccaaaaatcgagagggaattggtgaacgaagataaaagtgcagcaaagaagctgaaagtgataatgctagaagtgaaaccaaaacctacatggaattatagaagaaatagctgactgtgggaatattggcagtacagctgttggagagactgcctgcgcagcccgaggaggagaatgcaggtttaccacataaacaaggaaagtggttgtgaagaaaagaataaagctgtcctagaggacatgaccttggcaaaacaaacaaatttcacattaaaggatctctcagaaccatttcccagcatagaaaatgcaaaggatgaaatgtatgcttattcaaacttacggctcctagcagcactgttcacaatagtggaaaggtagaaacagcccagttatccatcagtgggtgaatagattaacaaatggatgaatagattaaaaaacagattgtgrtatatccacgcactggaatattgatttaaaaagggacgaagtactgatacctgctacaatgcggatgaacctgaaagataccatgctaagyraaagaagccagatacaaaggtcacatatgataaggttctatttatatgaacgatcttggtaaatctgtagagaaagaacacagatttgtggtttggtttctaagatcacagcaagcttatctctaagatcggggctggggcgcggtagggaaatgaggaacaactgcttaatggatgtggagattccttctggggcgacagaaaatgttttgcaaccacgcggacrtggtggttgtatgacattgtgaatgtactaaatgcgcttaattgtttactttaaaatggtgatgttatatgaatttcacctcgattttaaaaaygtgacatttcaccaagtcatagaaaagatgcttcgcttgtataagttatgcracaaaaagataagcacttttaaayatttcttgataagttttttgtttccagggttttaaatggcaaygtgctgaatatttcactatttttcacttccttgtacatttataactgacagtaatagagtttttaatgctttgacaaaatttttaagaagtcacagaacaattgcattttttccttttcatcactaacattgttttgcaccgtttcagcttctatggacattcttatggtttcatactgagtactgcctgtgcacatgtatttcactacacccccgccccccaaccaacccctccaccccccaaacacatcccatacccattacagcacgttgttgcagggaggattctgagatgcgtcttctacaatagaaaaagatgtgctgggcttgctgtgaaaaagcagaggaagttagaggtgggatattagyggtgaagttggtagaacctcagctgcttctagggaagagggaaggtaaagtcagcaggtattagggaccaggggaagcctgtaacttataaggtatggtaactatcagagcagtttgtgggattggctagcagctgtgtggccagtagctggaagaaccagtggtctggacatgtcctagttttgrgaaatctgtcggcaaggagagcgctaggactgaaggtaygatgcctgaagcccagaaacgcataatgggctgtgacaatgctgtttcacttgagctcatcggatgctttcgaggattcaatycatatctccctgttctccctgcattttgacacaggccgtgcttgcatgrcagttgggttagtgtattcccctctccaccagagacttgggagggtaggggagtgtgccttagtcattctygagactcctgtgcctggcagtgcctagcaacggcttaataaatacttgctaatgaacctaattattatgacattaagattttaatctaaatcttctaaatgactatgggaatctgtttatttttgcttaggatcattggtaatgttttctggccaaagctgcttttttgtctgagctgtgtgtttatttttcattccygtctcttatttatattgtgaaaatgattaagaaaaataggtggtatggctcatggtctgatatcacgagtcaatgtgttgttttgaagccaactccacacataatggttcaagccctctgactacatcttagttttactccagattttctccatcaatgttgcttgcatttttcagtggtactttttggaaggaaagaatacgaaagccagcccgcaaaagatcactgggtgggggtcatagtctgtgatggtgactgaattatctggtaaagcatatttttgccgttttcagggtcaggcttcagcataatgagattccagaaattgttatgaaaaaagaaaccttaggttacccagcagctaaatgattactgcatcagctagcagctccggaatggccatttggccctgtagaaagatcattcttgggcaggctgttgatgtggagagtgagaggagcagctgttctttcacctgaggccccatctgggtagcagatggtccccagctaggcacaagccctgtgtagggacatccgtgctgcccaggatcctgggacactgcccaaatcaactgtyaggctgggagcctgtgtccagaactgtggatggcattcactttgggttgtggaagttggtttgtacctactcttaagtcttgccccttcaactccagctcaggctttttaaccctagtagaagctttcttatctgtaggtatttaagataagtttgaacctactggtctgtgggaaggtaccgaaaaagccaaaagctgcagctcctggggagcttacaggctcccccttgttgagagtctcccgagtgctaggtactgtgggtttaagggagaccctgcagtggtcaaaaggctgcctggtgaaggggggccggttcccatacttctcagatgtgcctttgggcaagccacttgcctcctggtgcttctcttttgtcatctgttaaaggggttagtgaaggacccttctcatagggttgttatgaagattaaatgatttaaagtatgcagagtgctaagaacagtgcctggcagatgattaaaaaaattgttacagaaatacagtacaataacatttttggtcacatttaatcctcaaagcaatcatgcagaaagggcaattgtcatacctattttgcatgagagactcaaccactcgcccaaagtcacagtgctagaaaggacttgagccaggatctgaacctgtcccctgaaatcttcacctgctttgcttcttgacacggcaggagaatgatgaggaagtgggttagtctgctagggctgctgtaacaactgcagatggggtggccaaaacctcagacatttatttatttttttaatataatcttggatgttggaagtcgaagatcaaagtgttgacaggcrtgggttcttctgagacatccctccttggcttgcaattggtcaccttcttgcttcttcacatggtcctccttctgtgtgtgactgtgtccaaatttcctttctgtaaggacacagccatattggattaggcccaccctattgacctcatcttaacttatttactcctttaaaaaccctgactccttatacagtcacactccgaggtactggggattaggatttcaatgtatgaattttggaggtgagaggacacaattcagccaataccagtaaatgattagtaatcaaacacagggattgaatacgcagatattaaggattggaatgaagccagaatttggaaggattagaactgatggaggcaggtgcttggtctgggtgatttttgaaaatgattttcaggccaggtgaggtggctgattcctgtaatcccagcacttttggaggccgaggctggcagatcacttgaggccaggagtttgagaccagtctgggtaacatggcaaaaccctgtctctacaaaaattacaaaatatcagccagaagtggtggcttgtgcctgtaggcccagctcctctggaggctgaggtgggaggatcactggagcctgggaagtcaagtctgcagtgagcaaagatctgtgcctctgcaccccaagctggacaacagagcaagaccctgtctccagaaaaaaaaaaaaaggctttcaacagagtcagtcgtggacaaagaggaarggacttttttcctcccctgcagctttaacctcccaggctcatatgatcctcccattccggcctcccaagtawttgggactacaggtacgcatgccactatgcccagctrattttttttttgtatttttagtaaagatggggttttgccatcttgcttctgctggtcgtgaactcctgggctcaagcaatcctcctgccttagcctcccaaagtactgggattacaggcatgagccactgcacccagctggaaaggactttttgtgcggtgagaggaggatcctcagaatacggagatctggggtccgcagacccattgtgggatgcacattgatttagtyagatcttgagtgaagagatactgtgttagctgactgcgtgataaacgttagcctgagaaattagtttgttattttgataggcatttgagtcatttattgaactaaaagctttggggtgcctcatgtactaggcacgaaatcacagtacagttcttatcaggggagagatcatttgggtctcagtttcctaaaagtagcttttaactccaaaattgttttaatctatgtttgtagaggaacatcatgaaaatattttgaaattaaacttcttaagtataccttaattttatactgttattattttatttcatttttatgtttattttttgagacaagtttcactgtgtcgcccaggctggagtgcagtggtgcgatctcagctcactgcaacctccgcctcctgggttcaagtgattctcgtgtctcagcctcccgagtagctgggattttaggcatccgccaccacgcccagctaatttttgtatttttagtagagacagggtttcatcatgttggccaggctggtctcaaactcctgagctcaggtgatccacccacctcggccccccaaagtgttgcgattacaggcatgagccaccgtgcccagcctactgttattattttaattagtaaattttggtataatagagactggattttgacttaaggctatctgggtttaaatcctggctctgtcacttaatagctttgtcagatataccatatgacataaataggcagagtttccatcttatcacctgtgaaaagtggataactgtacacatcacattggattgccacatgcagtaatggatgtggaggttctgtccagcattgtgtctttcccatgataggcacttgtgctaatgctatgcaagaaggtagaaagttgaaagtggatagctaaaagtggaggcaaattaagggacttcttaaaatatttttatttaatagaaaacaatatatagcaagaaaatttggatcaattctttcatgcattcaacaattgaagtctgagaaccagccgtgattaggtgctccaaattagaataaggcaaggctcctgccctcattgagcttccaggcaggcgggaagcccaggagggcgtgataagtgctacaattcaggtgtgttcaggttgtcatgcaggtattgaagagggctacttttggatttatgcccrcagaagagtttcacagtttctgaatttttgccccaggatgggagcaggcacttgcattaacatttgaattaatcacccagagaagagtggaaaagttatttcaggcaatggtaacagcatgtgcagaagtctagagggatgggagaggccacatggcatggttggaaaatagcagctcaggaatccatttgctgtgggggtggtaagtggaggactagatttgtgaaaggggacagatcacacaggctttgggaacaactaggaggttttttttttgtttttttttttttttttgagacggagtctcactccatcacccaggctggagtgcagtggcatgatctcggctcactcaacctctgcctcctgggtacaagcaaccctcctgcctcagcctcccaagtagctgggattacaggtgccccccaccacacctggctaattttgtatttttagtagagacggggtttcgccatgttggccaggctggtctctaactcctgacctcgtgacccacctgccttggcctcccaaagtgctaggattacaggcatgagccaccaaacccggctgactaggagatttttaagcagggaagcaatttgatgatatttacagttttaggaagaccaaactgacagcagcttggaggctgatttggaaaggaggcagagtggaaggcagggttgttgaggggggatgttttagaaagattttgtgatgattctgctgagactgaggttctgaacttgggctgccctagggctgccctacagcagcccaggaggacagattgcagagctttgagatagttggcatcaagatgggtgtgtctggggtgggcatgactgggtttctagcttgggtgtccaagtggataaatagcctttcatgtggaggctgagggcatgggcaggttgagtactgtccttcttccccaaaggtagctggccagccatgggagtcaatccacatgggatggaaggatggagaatgccagctcctctttaaagacttggccctgaagaatagagcttgcaattttgtatctagggtagtcattaagatccgttcacacaggtttggatctttaatctccagaatagagggtgggatgctccctgctccattgagcccaggtcatcatgtgacaacctgtgactaattaggcagtgagctgatgagattcgtgtggctcttgagctaagcttttgaagccagggtgagactctctggccctcattatctcagctgtggtgcttggcatgtcccagaaggtagccgtgctgtggacctcagtccccgagggagcgctgtgccacckccacccacgatggacctgccctgagagagaagcctttgttttaggctctttaagatgacatggggattttggtggtgtttttctagcctaatctagcccttcctgactcaagtttttgtgtaagagaccaaaccttgctcattttcttttccttagctacaaatcagttttgaacttaccctttttcagtatatgcctgtgcatgtgtatgcctttgtgcgcaggcagacaaatatagctaggaccaaaagcatttctgctgttaccattatccttttgtccaaggtatttttcaatgaactaaatgtcagaaacacacacgctttcttaaaaaagcagctttattgagatatgattcacataccttacaattcacccatttacagtgtataattcaattacttttattatattcaacgttgtgcaaccatcattatgatgttaatttttttgtttgttcctcttgttgagacagagtctcactgtcgcccaggctggagtggagtggcacaatctcggcttactgcaacctctgcctcctgcgttcaagcaattctcctggctcagcctcccaggtagctaggactacaagctcatgccactacacccagctagtttttgtatttttagtagagacagggtttcatcatattggtcaggctggtcttgaactcctgacctcaggtgatccacctgccttggcctcccaaagtgctgggattacaggtgtgagccactgtgcctggctgatgttaatatttttattacccataaaaggaagcctgtacgatataaccatcaccccccagttctcccacacatccctctccccatccctaggcagcctctaaactactttgtatctctacattttgcctattctggacatttcatataaactgagtcatgccatgtatggttgtttgtgactggcttctttcaattagtggagtgttttccagggtcatcaatgttatagcaggtatcagcacttcattcctttttattggtcaaatactagtctgttgtatgggatacattgtgttataaaaccatatggtttctagagatggaagccatgctgacccctgtagagttttgtttatccatttatcagttgatgaacatttggattgtttctgctttttgcttctatgaacctctatgtagtacattcttgtacaggttttggatgaatatgttttcatttctcttgggtttatacctaggaatggaactkccagactgttttccaaagcagctcaccatttgacattcccccccagcagtgtctgagggttccagtgtatctgcatcctcaacaacacgtgttgtctgtccagtgatagccatcctactgggtgtccctgttgttttatgtcatttaacaccaaacttagatcacatttctgcattactgactttgcacataccgtccccaacttgcaacttatgctgtcattaacttgtgtagatttatccatgtttggctgtttatgaggatttgtccgtgtcaacatgtatgtttcataaggacattcttaccttccattaccagacctacattctcaatttaagatttgatattttttcagtgtttaggttttcaattgaatcaactgacaagtttagtggcttaaactttcaagcttaaactgaaatgccaatcttgttttagaccaaaaattacatcctatctcttctcttaattgaggaacttaggtggtggttcctatttgtctttatttatttatttatttatttatttatttatttatttatttatttttgcctacttcagtttggtcggtaaactatcaattgtattttcagtatgtatatatatakagagagagatttttaaaattttattattattttttgagacagagtctcactctgatgcctaggctggagtgcagtggtgtgatcttggttcactgcaacctccacctcctgggttcaagtgattctcttgcctctgcctcccaagtagctgggattacaggcatgtgccaccatgcccagctgattttttgtatttttagtagagatggggtttctccatgttggccaggctcatctcgagctcctgagcttaggtgatctgcctgccttggcctcccaaagtgctgggattacaggcatgagccaccatgcctggcccattatatatacatttttaatataatgtgaaatcatgtggtctctactatagactgaatatttgcatcctaaaccccaatgggatggtattaggaggtggggcctttgggacgtgattaggtcctgagggtagagccctcatgaatgggattagtgcccttataagaagaggccaagtgagcttgtttgctccttctaccatgtgaggatacagcaaagaacgtgctttctgtgaaccaggaagtggccctagtcagacactgaatttgccagcaccttgatcttggacttcccagcctccaaacctgtgagaaataagtttcggttatttataaaccacgcagtctgtgatagtttgttagaggaacccaaacttaaaggcagcttctaaaggggagcaatgctgaccactctgtagtttgtatatttggtcaacacactttattgagtgatgagtctgaatttcatgcttgattgatgatgattggtgacagagtagacaaggtccctgcttcatggagtctatggtctagttggggaaatatacctttattgaatcaaggcagatgtgattacagattgaacaatggctgtagaaggaaagggatttccaagagagaattagaggggcttctcaaattgagtttgactttctctttggtgggggttgagtcaggaagaacctttttgaagcaggaaaaatctttagctgagacctaaaggaaggggaggagcttgcctgggaaggacactgtggtggctggagggggtttcccaggcagggacactctggcaggttagagtaactgaaataaagtctgtattggagtgcagagactgccagaagaggggctcatagaggccaaagtgggacggccttacggacgagctgataatttgggcattattcaaggtggggtgctatgtcattgaagggttttagcagaggggaggcattatccaagttaaagaacaaaacaaaacaaaacaaaacccactctagttgctgtgtggcagatggattgggattgggggtgtggggttggtggcaagaatagatgcagggggacaagttatgaactgagactgggacctcatgggtcttcctgcccaagaccgagatggctgggggtgggggctgcrgctagggacatggggcctcagtgcccacgttttctgtcctctgtcccctgtgagggtatgtgcgctctcataccagccgcmgggcactttggctcgcttgtgttgctgggagagatctcctttaatgtttttttgtgtttttaaaatatgaacgtaggccctggcagagacaaggcagaaaccacttttgagtttttagggcygtgcattcttaaacaactctgagtgacccttccatcattacaatttatcaactaaattagaaaacgtgctttcacagatttctagtacttgggcaaatttgttatttacgctcaagatgaagtgttgcttctagtgacagttttgctgttgggcagcatttgtagggtaaaggtgtttttgcttttggaatccattgggagatttaaaaaaaawatatatatatatacacacacacacacacatacacacatataaagtaaaaagcaggaagtctatgtgtgtgccaggggatcccaaactcttggcctccagcagtcaagagattttttaaaacctttatcttttaccgtcttgctttttaaaatccattatgtctttgtatagtacttgacatacatgggcagaagtcatgctggaacgtgaagatgggagcatggactttctggagcatcccaggtggggttcctgtggctgctgtaaggcaggaccgcagagcggtggctgcagacagcacggatttgctattatatctcatagtcatagtcctgtagggtagagtctaacatgggctaaactcaaggtgtcgccagggctgtgttcctcccggaggctctaggagaggatccccttgcctttcccagtttctgcaggacatctagcagcctcagctcattgtcccctccctgcgtttgcaaagccagcagagtagcatctctgtggccattcccacatggtcacatctcctcctgggatgctctccttctgcctccctttgcactttcaggagcccttgtgattccattgtgtccatctggataatccaggataatctccctattttaaggtctgctgattagcaactttaattccatctgcagccttaatcccccttttctgtgtaagctgacctagtcacaggttctggggattaggactcgcgcatcttgggggaccgtcattccacctgcggcagtggtaggctaaaccttaggcgtctgatattgtgaacctggctcactggcctttgtcttcttgccgactcctattggtatttgcctgagatgtttttcttttctttttcattcttttttcttttctttctttctttcttttttttttttttttctggttctgggcccacagtaggtgccttagaatcatgcagtccagttgccttctgggaatccattgtagtaagtggtagaggtttttaaagcagtcctaggggagatgcaattccctgcttacattcaagtttttcgggaagacaagtctgtttaggaaacataggaggttagttgcattttcctcattaatgcaggatattaaaatattcagagggaacccaggagtcctctcaagatgagtttaaatttctcatacttgtagaagttgttgagaaayactggattctaatttccagaactctggtggggaaggagactgtgaacctggtctgaattgagaatggggattgaggatttttggacttttgaaagattgacttactctctcccgttagttctgttgaactgctgcctaaatggagggaatgtgcatcctstcttgtgttgygtggcaatgcmgtggggacacttgggacatgagcaaaacgttgacagaggggagcacttccyggaatattattaatacagagttagttttaacttcaccttttgggcaaacttgacattatagatcttgaaataggattatttttcccttgctaagaggttagcaaaatcagtacagtgtgtctctttgacaggccctagaaagcactctacgtttgttaactttaaatttgggtyggaaattgatgttattggaggagcaaggcgtgtttaggcctgatgatttttggatagcttgaccaaacccggtacagccaactttcccccaaaactactgtgtccttctcagtggttcctgtgcctgcacagggacccagcgcacaccccagtgtgcctctttgggctctggctaacttaggctgacatcctgatagaacgcagtgaccacctggtcatttgattacagcgcttcttccagacagcacgctcagaattgcgtttcttacttccagtcttcttgccctgtaagcattttctgtgagtcaccaaatcaamcacaaaatcatwtaattttatggaagtggaaaatcagacttattaaaatactgtgtttttgttttaaagctcagaggtatagagatccatgaatttttttccatgccttctcataatgtggttttggtttagctgcggttcttccaggcgcagatgtcagccctctgcagatctgctgcatcagartttatggcctgggtcttaggaatttgcaatttaaaataaccccttcaggtgcrtctaatgcagcctaaatttggggccagctcatgggttgtaaactgtactgccctatacaatagtagcacagttctargctcaagggactcaagggggtccagtaagtacagttcaccagagaaataacaaaagcattwgcagagggagaccagagcatcayctttgttagggcaaaggcttaacatagaggaatgtggcttctatgtccaggccagtgggcttcctaacacagaacatggaattaggcagacttaacatcccccatgcccacccyggtgagtgccagcatgggcttgagctgctcttcacactgatggtccatcctttggactgatctccttgtgaaggatacaatacagcaaggagcgggggcttggcttggcacagccagttctttacccaaactcctgccaacgctggcccttctttcttaccctggttggagtgtgtgagggtgggagaggcaggaggaatatgctggacagagcttcttccatctagaagggaatttcaggagtaagaaagcrgcagctcttaacatacctgggagaaagcaagtgcttagtaaacagttgaggaatgaactaagaattttcagacagattttcctcttctggagcatttgcagaaccgcctctttgctcaagtgctttgttttttacagattcatttaaggtcatggttccagacactaatgtaaatcagcacatatattattgaagaagtagaatacctccaggcccagttgccttggagcaggaaaaacagttcatcctcattaccatccagaataatttatgttcaagataatacacaatcaatttactttttatcatattcraatttgatttgtgtacacttttgagtttggatgtcagccacattgcttctgtgtgttaatctttatttacgggaataaatgggaagcagtcagccattttttattctttattggggaactgcattatagtggaaaaggtaaaattataagctaatgagaccagaggtctgtatgtatgaaaaccrtcctcatcgcttcacagttgtctttgaaccagtttccctgggattgttcgaaatgtagcaaacgtggctcacggttaccctgacggggccagagcaatagggggaggtgtgggcacctgtatacatttgcgttgaaaaacgtacccgggctattctgaggtcctttcctgcccccagcctggtttctgggcctctctggagtctctctttctggcacttgtgttctggaatcgcttatcagcctggactccttcagcagcagctgccacagtgtctttgtagtcacactacacacctatatactccatgacatggagygtatagaatgtttcccgtcttcctcgtcagtgctgccaggagaagcttcccctctcctaacctctggatagtggctggctctgctttattcaggcattgctttcattttttagaacagctgctccagtatgcttagtgtgaatgacagcccagcagaaagaatggacttgacactggasactgcaccactccacatttctttgtcccctcaagatgacttaactagctcccttcccttttccttcatgcaatagcctcagaagttcggctggcattgccaagttgttagagtgaaccttaacctgtgtatgactcagaattcacatctgctgtgtcagtgaacacacagatctctttgtgaacacatggttatcaagaggcacatgctcttacgtatcctgccggattctggtaaggcgctgcttgcgcagtaagcacttgtcaggtgcttatgatgcctgtgacgtgaggctgtggatgcagaatttgtggtctgaacatttttgagtagataaaaatggaaactgaaattggwgaagcagacttgtggcttttcctaytttctcatctcttttatggatataactagaagctctgcttcatcaatgagtgtgttaaaacaatttgtttacaaaatcctatttattaaaataaaaatctgaaagaactgcgctgctgcttttcagtgctcgccactctaggaacctgtattcctcctcttgttcatcctcccttttcttcttttttgttttgttgttgtttgtgtgtatgtatgtgtctgtgtgtgtgtggcggggtggtgggggcggtgttgccaaatcttttgcactgaatctttgaagatgtcctgaaatacttaccaaatcactagagcgaagagaagcccatctgatttcttcatctcccagctgaggaaggacacactttctcccactctccagtgaaggcccctgtgtcctgtgggtgggggagctgacatcacactcagtgctgacatttcttgttccctgggtgggcgctgattccagatcctcttcagccccccaagckgaactgggtttctcttgaaggtcctaacctcagctcacaccacctgctactacctttctgggtcttggattttgttsttacccaggcccggggtcatcccaaaggctcttgatagccctgtggctgtgcttgctaatacactgtcctcatcttttgtcagcgaagtaaatccaataatgtttccttctctttaatccaagccagtcttcattgaaaacacttcacctytaagctctcaggctctgcagtctgccctctccaaccttacccctcatgccccaccttccctttgtccccatctttcccttctgttccagtcattctcatgggccatggagagtggaagcctgggagggctttgccaaagtccagttgcctgctcactttcctaagggccagagcaatgggggaggtgggggaggtgtgggcayctgtatacatttgtgttgaaaaaggtacccaggctattctgaggtccttttctgcccccagcctggtttctgggcctcyctggagtctctctttctggcatttgtgttctggaatcgcttatcagcctggactccttcatcagcagctgccacagtgtctttgcagtcacactacacacctttaccccgatccactgacctgctgtcccggatggccctggtgtgttctctctgttcctagccgcagaaattgctggtgaatgtcaccaagctaagcggtgtagctttataacaagtggattcagccagctgggrctggacgactgagagtttgcagcccctgctggaccctgtgtaactgtccagttygcctagctattggtttggcccagtggttttcaatkttggctgcacatcagaatcacctgggggaggtttaaaaccctacctctgcccccatgccctggggttcacacccagaaatgctracttcattggtcgggggctggcaggcctggacattggcggtttgcttagaagctgccygggtggttctcatagcagccagggtcaagcaccacggcctgttcttacctggctccccaggccccctttaatctccctctgcagcagattggcacacatcgcattgtggagcaagccatctgataattttccttaatcgtctttgaagatcttccctctgcctgttgatcctttaaggaagaagtctccttgccaggatcggcctctccagtctctggatcccttcttgcttgctctcttcagaacccatgaaacctctctggctgccttgacgtcagccagattggactgcccaaatagaaaggcagaaatccctgtcgaggccagacagcaaggatggagagrggcagggggtgaaatgaaacrcaccaggaggagtaaagacaaggccttcygatgtcagccaagagcaggtgtggattaggcagtcctaagtttgagtcctggttctgctattcattggccaattgtattctccctccctctacgatgaggttaattacagttacctcactgggatttgtgaggatggaatgaggtaacaaaacataaaatactatcagtacaatgcccagctcataatgagtatgcagcaaatgttcaccctttaaaaaatgccacggccgggcgtggtggctcgcgcctgtaatcccagcacgttgggaggctgaggcgggcggatcacgaggtcaggagatcgagaccatcctggctaacacagtgaaaccccgtctctactaaaaatacaaaaaaattagccaggcgtggtggcgggagcctgtagtcccagctactcgggaggttgaggcaggagaatggcatgaacctgggaggcggagcttgcggtgagccgagatcacgccactgcactccaacctgggtgacagagcaagactccatctcaaaaaaaagaaaaaaagtccctttctaccttcaaattcaggaaaattttctttagtccaacagatgtaatccccccctcactcccccatccccactggtatctttatgtactcaggtgactattaccatattctgcttggactgtttttatacattgcagataatttgaagatatggayttaggtaggtttttagatttataataattaagtgatgtttttctatcaagtgatgaaagtttcaacagatatttgttaaaatttaatttagccaaaggaagacatgccatttcagcaatgtgatctaagtaaaagtgtcttctcttttttttggtggggagaacagagtgtagaatgatattagtaagatagagaattgatgaccaaaccataactgctagcattttagtagaggacacaacagagaaaggattctcacgtgtgttattaggatcttggatgagagtgggctgttattttaactttggcccctgttggagcaaattactctttgggggcccggttttcctcaggaactacctacagaattcagtgagatagattttagaacccttctgaatgctgctggtttggagattctgtctgtagcaagttttgttcagttgttaatctttctttcttttctttcattctttttttttttgacagggtctctctatcacccaggctggagcagtggtgtggccctggctcactgcaggctcaagcgctccttccacttcaactgcccaagtagttagaaccacaggcgagttccactacagctggctaattaacaaaaattttttttgtagagatgaggtctcactgtgttgcccaggctggtctcaaactcctgggctcaagtcatcatcctgtgttggctttcgaaagtgctgggattgcaggcatgagccaccacacctggccaactatatgttttctatgtttattatattttctgatttgtaatgtattttaaaattatcccaataatatatgaatgcaatcttgaaaaatactcagcatagcctttaggctaaaaagtggaggtctgccatttctctgccttgccccattcccttcccatgtcttattttccctgttaccaggttggtgtgaagcctttgagacctttttctctgcacacccatatatgtgttttttctatgtttttatagtattgtttcatttaaaaaataaactaggtttttgaacttgagaaatttcaactcgttctgctcagagctttgttttattaaaatcagtgcctgggagttgctcaagtctttgggctgtgtcgccctctagtggtagccctttggcttacagctgccattcagccctagggctggggtggaagtgatggttttgtgcccacaacctgatggcagggttggcagtgtttagttgctgacaagtgtctaaaactcaatctaggccgggtgctgtggctcacgcctgtaatcccagcactttgggaggccaaggcgggtggatcacctgaggtcaggagttcgagaccagtctggccaacacggtgaaaccccgtctctactaaaaatacaaaaattagccgggtgtggtggcgggcgcctgtaattccagctactcaggaggctgaggcaggagaatagcttgaacccaggaggaggttccagtgagccgaaattgcgccattgcactccagcctgggcaacaagagcaaaattctgtctaaaataaaataaaataaaataaaatataaaagtctrgtgagccctggagtggtgtttgccttgctacctccaacttgccctttttaagagacttaaaatttgtggtaacttttcacatgatgtgtatttagatactgctgagttaatgaggctgctatacctggctgatttattgtttgctttcaaagcagttgtcaagtggtgtccacccatcccactgatggattttttttcttttttctttttcttttttttttgagacagagtcttgctctgttgcccagactggagtgcaatggcatgatctcggctcactgcagtgtctgcctcccaagttcaagcaattctcctgcctcagccccctgagtagggattacaggtgtgtgccaccacgcctggctcatttttgtatttttagcagagatggagtttcaccatgatggccaggctagtctcgaactcctgacctcaagtgatccacccacttcagccccccagagtgctgggattacaggtgtgagccactgcacctggccccactgactgtttatatctgttatactgttcttgcctctgtgccttttgggttccctgtcatggcagcatccttacatcctccaccacctctgaatgttcccgcaccttctctttctaatggaagcctggctggcccttgaagacaccgccaaccctgctggtctcttcacagagtatccacccagcaacctggcctgtccattcttgacttcttctggtccagctgcctttctgtacctcattttagtgaccctttttagatctcgtccaggttagcctctagaaccctgatctcaggcaccccactctgcgatcttccgttcccagccttcccacttgaaatcgtcttggaaatcccgggctttgccaatctgtggacccaccaccttttcaccccctttcyggtgccctcaggggactttgctgtagcctgaacctcatggtcccttcctgtaaacagccaaactgctttgtactccctgaggagacccccgccccggttggacaccccaccctggttaaacccactttcacaattattccaaaactgccagctggacttgcatctcttcagatcggctgtcatcactcattgtatcaggaatcttattacacttttgcagcagtttcatcggttcagagaaaactctttcataccttctgctcatcagttctccacacctcccatcattctcctagctgatgactttgctgcttgtctcattgaggaaagaagccgttcagtcagtgagaccccctgtctcgcctccacctttccacctgctgccrcggaggcttccccagctcctgtctcactcaggccccttgccactctcaaggcatcttcttcctgcttcccaaggatgtcactcctgcagttaaccctttttcctcctgcattattcgtttcttcctttcttccgcatccttccaaatagcgtaaaaacaggccttatgatgtttctctttaaaaatgtccttaccagtgccacgtccctcttggccactgcccctgttgtgcctcactccgtagaaagaagtgacctgtagagactatatcctgccctctccagcgcctgccttccgattgccccttccagtctagtaactgtgtccattccttctccaatgaccgggtgacaagctgtctcttctgagagtgccagagggtgttccctgggtgggaggccggatgtcagtgccagctgtgctgtcctgggtgagcctgtgagggaccacatctggtcagactcgtgcatggcctgccctcatcttcctccgcctgcggtgcctttgagagcattgactccactaagcccgatttctgtgtggcatgttgtctgttcctccccggcctcctcgatggctcctycttggtctccctctggctactcctctgcttctccgcctccaagtgctgctccaagtgccttctgtgctctgtctccatccakcccaaaccttccaacactctctgtaagtggaatctcaccttgaggctgccagcccagcctcctcacctctgtgctccatctttagagagtcacctctctgtctggcattcccacttgaggaccaagatgattctcaaccttaacgtggcccacatggagccactgctcttcctgcccagatctgccttcaccaccacatcctgcccactgtcactaaacggcaccagctcttacctggtttctcagtaaaaaaacaagtttatcatcttccctcacatactttattcaataataatcactaacatttattgagtgcttcctatgtgcctgacaccattctaagcatttgaagaagagtgtattaacctgcatgagraaggctattaaaacctatgtaattaattaattaatggatggatgtgtggatgaatgaatggcagggtcttacactgtcacccaagctggagtgcagtggtccaatcatagctcactgcagcgtcagactcctgggttcaggcagtcctcccacctcacccttttgagtagctgggactacaggtgcttgccaccagctaatttattaaaaaacattttgagagatggggtttcatgatgttgccaaagctggtctcgaactcatggcctcaagcgatcctcccactttgacttatagattgtggggattagaggtgtgaggcatcgcgcctggcctgtaataacctatttgtgaatgagaaaggtcaggcacagagaagttaaataatttgctcacagaaatttcctgtgttgcagctgagatttaaatccaagcaatgtgtttctaagcctgggctcttamctgtaacactgtcctcttccccccaccaggagggtgtgtgtgtgtgtgtgtgtgtgtgtgtgtttctgaatctgaccagttgaggcaggctttcatgtcattctctctggccacccccttctttgttcacctccagtctttggaatagtcagagcgatgtgttcatggtagaaatgaaatcacatcaggtcctcagtggcccatcacatttagaactaaagcttacycttgcctcatgcctctgagcccttatatgatctcgagtcaccaccccactgccagcctctccactctcttctctgtgcctcatgcagcccaggaaatataatttggaccgcaaatgccagccacctatgtacggtaacttttctagtagtcacattaaaaagaaaacaggtgaaatgaattttaatgcattttagttaactcatgatatcaaaaatatttcaacatgtaatcagtattcacacaaagattaatcaagtatttaacagtcttttcttttgatccggggtcttggaagtttgacytaccacctctcaatttagccagccacatctccagtacttggcagctgtttgtggctacctcatggacagggcaggtcccgccacccgggcatccgtctgcctggcgcacgcaccaaacgggttccagtctggggaagttggcatctgctgttgttacttttggtcagaacgcccttcgcctgcrtcctcacggggctgactccctttagccttgaaggggaccgttgctccgagaggcctgaacactccagctgcagctttctccccagtcattattgagatcaaattcacatctcttacaattcacscatttaatgggtgatgcaatgcggtggcttttagtatattcacacacatgtgcagacatcaccatagccaattttagaaaattttcatcagctgaaagagaaaccttgtatcctttagctatgactttgtgattccctgttcccctgagcccctggagaaccctatctttctgtctctgtaggtgtgctgattctgaatattttgcataaacggaatcatactagggggtcttttgcttgggacccctttcacgtggcgtgtttccacggcccatcccgtgtgatagcatgcatcagtacttcattcctttttatggcagataatagcccattgtatggatataccacctgtttttttaaaaagtccattcatcaattcatgagcatttggtttgtttctactttttggtagaatgatgctgccatgaacacttgtgtgcaggtttttgtgtggacatagacttaggaatggaataaccatggagttacggtaactctacatttaagcatttgagaagctgctggcctgtttttcatctgcaccatttgcattcccaccagcatcragtgggagctccagtctctccatatcctccccagcagtcggttacccttttctgttgcctctgtagcactttctaaacataaaattagcttatttctttgcaggtgtctattgcaccccccaggaatgtcagttccctgcagactctcactctgccttggcacccgcaccccagcacccaggggtgaggtgcctgcctgggcagccctgtcctcacctggggttgactgaccagagaacccttgcgattctctctctgggtttctgtctgcattcctktcgggataggtgagactggggtgacggctgctcgcggcttggtcaccttcttctctgcttacctgttcatgctctcttgcttttctckgatagcaaaccccgtctcctgtcatcctccctcctggcggaccagagctatactggcccataaaggagtgctggccacaccaggctagattccagttgagcttaaataaaacaaatagaaaggtcctccgtggtattagccatattgtaggtgctccgtagacacatgcrgctagtggctgcccacaggacgctgcagatgtggacgtccccgtcatcacaggacgacattctgtgggcagcgctgtatttgtttacaaacacaattctttggctgtgtgaaggttcaggatgatacctttgccattatgattcatttattcatttcaggctggacacggtggcccacacctgtaatctccacactgggaggccgaggcgggaagatcgcttgaggccaggagtttgggaccagcctgggcaacatggcgaaacctcacctttatttaaaaaaaaaaaaatcggccgggtgcggtggctcacacctgtgatcccagcactttgggaggccgaggcaggcggatcacgaggtcaggagattgagaccatcctggcctaacacagtgaaaccccatctctactaaaaaataccaaaaattagctgggcgtggtggcaggtgcttgtagtcccagctactcaggaggctgaggcaggagaatggtgtgaacacgggaggcggagtttgcagtgagcggacatagtgccactgcactccagcctgggccacagagtgagactccgtctcaaaaaaaaaaaaaaaaaaagaatcaacatttatttatttattatttatttttttgagacagagtcctgctttgtcaccgaggctggcacgatcttggctcactgcaaaccccacctcccagttcaagtgattcttgtgcctcagcccagtgccaccatgcccggctaatttttttgttttgttttgttttgttttgctttgctttcctttgttttgttttgtttgagacagggtctcactctgtcgcccaggctggagtgcgatggcacgatctcggctcactgcaacctccacctcctgggttctagtgattctcctgcctcagcctcccaagtggctgggactacaggctcccgccactgcacccggctcatttttgtatttttagtagagatggggtttcaccacattggccaggctggtctctaactcctggcctcaggtgatccacccgcctcggcctcccagcgtgctcatttatttattttagcatcccttcttgtgcctggttgtaaagttcttcttatcccaggaaacttaataggtcaaagaaccctccccttgaggcagtttggatggggctggctgggaattggtatgtccagctgcccatatcgtggcctctgagtcaattatacaggcatctcggcaacttgaagttttgagtcccaaaacaacagattccatagcataaacagtgcaacgtaaatcctgtcccttgtccctcttccattggatacccttgtttatgttctctctggcaactgcctgtagcagggacggatgctggaaatcctggcggggccacgtcttctgtgctttgtaggcagctatggctggatggtgcttgctgtttctgtgtgtaaatgttgggatttttaaaagcccttcccygcttaatgcgttgtggttgagcagcacatttaaatgcctgaagtgtaagatgaagtctcttggatgtagagggcagtggtggtttttatttttcctggttgaacttggcctttggattgctgactgcgagctcacggtactgttaatgattttctacctacagtcacctgctgtgctgagcacatcaaatacagtgcggttagttccaagctatgaagcgcctgtcacgcatgtataacaggcagacctcattaggagggggccttgcataggggtcacattttccagcatttgttttcaaaatggaaatccagatcacgcatttgagattaaaataaaaaaagcggcctgtgctttatcattttctttaacttacatgcctgctggtccagcccagattgctgatagaggaagccctgagaaagttgcccagccagttgcccgtgcttcaagacacaaagggctgactgaggcatccgtgcctacccttggctgctgctgctcagcctgcttgcatctcgtctgttttcagttatcagtggtgtgagaaaaacacaacggtggattcagaaggagaaaccaagtcatctgcatttggcctcagtgtgtggactgtcctgaaatttgagtacagatgtgttcatgtcctgggattagataaaaagagaggaaacacacagtgaattcttatggtctgtcatttcagttggccatcttctgcccctctgttctggaagcttctccactaaaatagagcacccaacttggttttctacttgctttctggcccatcttgagttggaggaatcatgtgtttcagaactcttgctggtggtgggtgggagatcaacaaatgatttcattaagctgtgtgttcttaataaactttgggaagatttgtcgcagagaaactcagatagggaccttgtgatctcagcagtcatgggtttatcttgtccacacgcgtggcttcattgggatttggttggttgcgatccagcagaactgtggcggtgttgggctctgttggggtttggttgtgagcggaactgtggtgttgggctctgttggggtttggttgactgtgatctagtggaactgtggtggtgttgggctctgttggggtttggttgactgtgatctagtggaactgtggctgtgttgggctctggagtttggttgtgatctagtggaactgtggcggtgttgggctctgttggggtttggttgactgtgatctagtggaactgtggcggtgttgggctctgttggggtttggttgactgtgatctagttgaactgtggctatgttgggctctgttggaatatggctgtgatctagtggaactgtggcggtgttgggctctgttggggtttggttgactgtgatctagcggaactgtggctgtgttgggctctgttggaatttggctgtgatctagcggaactgtggcggtgttgggctctgttggggtttggttgactgtgatctagtggaactgtggctgtgttgggctctggagtttggttgtgatctagtggaactgtggcagtgttgggctctgttggggtttggttgtgagtggaactgtggtgtcgggctctgttggggtttggttgactgtgatctagcggaactgtggctgtgttgggctctgttggggtttggttgactgtgatctagcggaactgtggctgtgttgggctctgttggggtttggttgtgatctagcggaactgtggcggtgttgggctctgttggggtttggttgtgatctagyggaactgtggcggtgttgggctctgttggggtttggttgtgatctagcggaactgtggcggtgttgggctctgttggggtttggttgactgtgatctagcagaactgtggcggtgttgggctctgttggggtttggttgactgtgatctagcagaacagtggcggtgttgggctctgttggggtttggctgtgatctagtggaactgtggcagtgttgggctctggatttggttggttgtgatctagcggaactgtggcagtgttgggctctggatttggttggttgtgatctagcrgaactgtggtagtgttggcctttgttgggatttggttggttgtgatctagyggaactgtggtggtgttgggctctgttggggtttggttgtgatctagyggaactgtggyggtgttgggctctgttggggtttggttgtgatctagcagaactgtggtggtgttgggctctgttggggtttggttgactgtgatctagcagaacagtggcggtgttgggctctgttggggtttggctgtgatctagtggaactgtggcagtgttgggctctggatttggttggttgtgatctagcggaactgtggcagtgttgggctctggatttggttggttgtgatctagcggaactgtggtagtgttggcctttgttgggatttggttggttgtgatctagcggaactgtggtggtgttgggctctgttggggtttggttgtgatctagtggaactgtggcggtgttgggctctgtgggtttggttgtgatctagcagaacagtggcggttttgggctctgttgggatttgcctctgatctagcagaactgtggtggtgttgggctctgttggggtttggttgtgatctagcggaactgtggtggtgttgggctctcttggggtttggttgtgatctagcagaactgtggtggtgttgggctctgttggggtttggctgtgatctagtggaactgtggtggtgttgggctctgttggggtttggttgtgatctagcagaactgtggcagttttgggctctgttggatttggttggttgtgatctagyggaactgtggcagtgttggcctttgttggaatttggttggttgtgatctagctgaactgtgatggtgttgagctctgttggggtttggttgtgatctagtggaactgtggcagtgttgggctctgttggggtttggttgtgatctagttgaactgtggtggtggatcccaggagctgctgctgcttgtgcgcttcaaagttggattttgtgtttttttgtgtgcagatgcttcttggaatcttgcgttgctgtatgcctgtatacctggaaagttgtgggaagaacagtttaggattttgaaccaattttctcaacaagtttgattatttcatttgagacatgttctgatgtaaatatattctgaaaaggtgagatcaaacatccactttttactctaaagcaggtccccttgctcctctctgctagtgcattctctttcctttacagctccttctcctttctgaagcaggaattaagctgaagtaactcagaaagtgccagcgttaaccccaggggacagaaaccacagacccagggctgagggattgagtttttaatttccattattctccatcagtgcgttcagtcttttgaacttaccctgactggtattatcacttgaaagttgttgttattgttgttttgatggtagtggtggtggttttttgccacccacaggagagaggggattagaagaaaaagaccaatggagtttccttgggattaattaaatgtggggctgccacacaggaatgggtccaagggctgctgtatttaaataacttacttattttgcagaggtgaatttaacctaacatgtactacagtgatggagtaaaccttttcctgtttggaatatcacaaaaggtacttcaataattgcggatcttcctttgaaccctcctattgtcagatggggtagtggtacagttccttgttccagaatgctcttagcaagttgattaatctgtcacataccccagtttcctcattcacaaggtggcataataataggacatagagttgccgtgaagtttaatgagttaatgaatgtatgatgcttggcaaatggtaggggctcaagccaaccctcgttgtcttactgagcttagtgggccttggacctgctgaggactttgaactgagcattccgtgttattctcttttttgtttttttaaggggatgagagtgtgtgtgatagagttcatgacaatattttgtttaagaaaattgtcaaaacaaagttcaaatgcaatggatggaaagtgatttttaacatgtagggtaactagagatttgagrtcagacaaatcgattaggagatcaccaaacccaaacagagaatgtgagttaactcatacttaggagatgaatgctggctttgaagaccatagcgtgcattytcaaaccagatggagaggccacttttctctgcagatttcagttattcrtgatgttaaatgactcgtcttctcttacttgcctggcatgtggaactgagtaaattctgtcaaaagaactcactgaaggaatgtgtarcagctgggaattggatgtcttttcagatttgggagagcctgtgttttgactgtgatggaattcttatggtttaatatgcttaaatattactgtttaacattttgacgtttttgaggacagggataattaggagaatgcacttataagtttctatgccaactgtttccactgctcccctgtttacatggtcccagggtttatacagggctctctgtagccccacartgaatcttgccccagtgagcgggctctcacctcccttctatagatgaggttggagctcagaagaacgtagagaaacttgtgcatagttattatgccagatttagcagctggaacaggactggaacctaaatcttttttctttagataatatgttctttgcattaatgagtttgtgggttttttgggaggygagaaatatgtgtaaataagaagtaaaaatcctaaattgcaagttgattttttttcttaatatagtaatacgtataatgcagcaaacatatcatttcccctccatgcttgctagactggcttatgcacacatcatgatgataatgaaggagctaacatagcaagcactcactctgtgctcattcataaggtggcataataataggacacagagttgccatgaagtttagtgagttaatgaatgtatggggcttggcaaatggtagatgctcaagccagtcctagttgcctttctgagcttaggaatcatggaatcatgctctaaaaacttcatgagtatgagctcgcttcatcctcataacaactctaggagatagacgttactttatgtccattgtagggatgagagtgtgaggtatgaaaggaagtgagcttaatattctttatttttattttttatttttattttttgagatggagtcttgttcactggcccaggctggagtgcagaggcatgatcctggctcaccgcaacctccatctcctgggtttragtgattctcctgcctcagcctcttgagtagctgggactacaggcgcgtgccacaatgcccagctattttttgtatttttagtagagacggggtttyaccatgttggccaggctggtctcaaactcctggcctcaggtgatccatccgcctcgggctcccaaagtgctggcattacaggcatgagctaccgcacctggcctaatattcttaatttggctgtcggttgtcacccaaatcagttaaagcaattccatttcttaagtgaaaatcagaatttcttttcttttttccccttctattttttcttttaatcttttttcttttgtcttcaagcaattttcattttttttttttttttgatattcagggaacctgaggcgaatgaaggggaggaacctgggagctactgactgtgattacagtggatattcacaaaggaagacctttagtacagtgtgaagtagtgagggaaagggtgatggagtaggagggatttaagtaaaacctttcaggtttaaggtcaatggaaagcgaaggaacattctagaaggacattagattttccttagagtgacattagagtttctrtaattggactataccctttagtgcctcaaatcaagggtttcacattttctttttttttttggaattgcctgctcatgtatttccatctccttaaaggcaagggctggccgccttatttggctgatactagcctccatggcatcagsctgtccagtggaagtcctgaaacagtacacgatgaatggataaatraatgaatgaatgaatgaaatgaatgagggaagaaatgaatattgtgcttccagaacgaggagagaagggacgatgatgtggcaaattggcccagcatcttaagatctgtattgactttagcctcatgtggtagtttaatgatactctctcttactcagggaatgtgccttttaagctgtggtctgtggtcaatgtgtgtgcacatctctgagagtccyggctgtgttgtgtttgtgatggctcccatatgtggtttgcctttgtatctgattgtaaattaaccttgacatgtaggtcacctgaccgtgtatggagagagaaaaatcactttcttcttctctacaagctatgtgagtgcagactgaagttccgagttgtgatctcaagcagtctgcagaaactaacctttggcatacttggccacagccgacttctttctagtaaattcccactggttcttggcttttcttgtagaattaacacatttgcaaagttttcttcattggtattcctggtacgtggactggaatattcttcatcccttgatttgtgggatcgttttgtctttgggccacacttgtcatgggaggaaagtcacagctagactgggtatggaaagaatggaagtgtgtctcctgcagggagagcccaggttattgagacagtcttggcccgtgtttcttgaagaagacgttgggttttgttttgctcattgatggccataccccttgtgtggttggccaggaagctgaacgcttgctcccccttgtggctaaatacaggtggttctgctggcaaacccagtggtcaattactgcatctactaaggattaagaagattataaatgtaaactcagcttgaaactttttgtggcttagaggtaaagcaagaaaataattaagataacaactcacatgctgagggtgtttcatgtgttattattgtggatgttaataacaattttggctctctgtgggaagccatttccttcacttaatcagttggcaaagaaagtacatcagggaagattgttcaccctgagccgagaaagtggagtttcaagtaagaaccctgctccgcatcctgccactgagttgagatcatctatttgatttagctactgataaagtgtttttaattacaaattgtctgcttgcttggggactgacacaaacacttgttttgttttcaaagtgccttctctccccagtgttgggtttggagtagagcaagagtaacacagaggttgcagtcagtgtcttccagcgattttcattttgtttgatatgcggggaacctgaygctgatgaaagggaggaacccaggagctactgactgtgactacagtggatattcacaaaagaaggacctcagtacagttccaagtagtgagaggttgatggattaggacagatttaagtaaaacttaacaggtttaaggtcaaagaaaagtgaagcaacattccagaaggacccagaaaagccgagcaagtcaggcactgagatcttgggattgagaggagttgctggttcagacccagcactgttctggaactttcttttgggtactctttttttgtttcatcgattcctttaaaaggtacaatccagaactgaacatgtcattccacaagtggcccaaccagtgttgtatacactgactggacaggttttgccactaaaatggaataatagtctggttttcctaattccaggaaaggaaaatcaaggaatagatacattttttaaaaaagcatttaaagaatttctcctgtagacattatcttaaacttttggtccctgccattgtatgtgtatcttgaatccaagggtaataygatacgcagtctggcaaaagcagtcattttaaatgattgagcaatatttagtgactttcaaagagcagagagcacaacttggctaccatagaagctccaccatgatgggcgcagggtttcctctaggctggaagttgtgttctggttatcttgtgagagaaatgcatcctgtgtgatttatgtggattcatttattcttagaggaaatcagacaaaaaccatattgtaaggcccaacccatctaaaaagacaatagaaatgagttctgtgtgtttttcagcagggcctcatgggcaccactcgtaagtccagaatctcttccaagaacaggaagtttctggagggcagtggagaaggggagtgagggctcagctctgtgaggtcgaggtgggtgtgaggaccagcaccagtggggagtgggtttattagctgggaaaggccataaggatgaggaagagaagcttgtgtttgagaggataacagggaggaaaagtcgccgagcccagagtgtgtattcactgcctgtcctttggaggcagccgcttccacctcttttgactgattcttccaactygtatcctccagtctccaaaacatgattgtggtgcagctgcttgaattttcaaacttgatttccattttagaagttaaggatttgkttttttttccaaccacataccctgtcgctaccacatcaaatacaggtctctcatactgttggtcagctccgttttccgtgttgacctctgatactctgtaaacactcttgacacgtaagctgggtggtttatataccaccattacttttcctgcccagctttgtctttttcttccttgtattttatttgtaaagattccccagctcgtccccagttgtgtcagcctcttttcagtgtgctcagacccattaggtataaggcctatccatgttcctgaggaagtctggcccagagccgtccaggtggtctgacctgggcagggccccgggtctgccatcacccagcccatgctctcctgccgccccactgaagacttccttcacctctcttggacgttagggtttctctttgatggctcctctctttttctgggtttctgatattttctggttgagtggtgctactttcttctaacctatttttatttcattaaataaataggattcactaaatggatttcatacccatgggttgtatgatttgcactttgaaaggcactgggctagatgaccactttgagtgatgctgaggcattgctgggtgacttccttctttccttcttccctcccctcctcctcttccctcccctcctcctcttccctcccctcctcctctttcctcccctcctcctctttcctcatgaagcatgtgcacaggtgcatccctgatgctttgatcaggtatggcctgaaagacaagccattttagttagtttttggatacattacgaagtaatgtgggaagtaagcatcttcacctgtccctcttccctccttggctgagggacagtgtcctagtcagttccatgtgctgtgacagagtaccataggctgggtggcttaaacaaaaaacacttaatgctcacagttttggaggctgggaagtccatgatcaaagtactggcatatctggtctggtggggacctgcttcctggtctgcagatggccgtcaccttgttatatccttacatgatgagagagagagaaagcaagctctgttgtgccttttataagagyactaatttcattcacaagggcgccatcctcatgacctgatcacctcgtaaaggctccaccttccaataccgccatcttggggattaggatttcaacacatgaattttagggggacgcaaacattcagtccctgacagggttaggcactgtgtggctggcaatcaccaggatgcctggagccctgccgggaccacgctggctcatttcagccaccctggatgaatcatccagcctaaggcccatgcctggacattctgggtcctcagtgccttgcctttattttacctgatataatccttcaaacgaaaatgctygtacttatttttgatcacttaatatacttggccatttaacaatacagattaaacttgtgttattctgttagaaaactgagagattgttttctgtagtctttgactgcatgcatagtctagggctggactkgggaggagaggataatttggccacaataggattccttattatctgtctcttccctcccaacccctcccccgacccccgccccatacaggagaccctyagatacatttctgtcagtaccctcagttacatattttgggagacgtaatacttaatgaaccaaaactctgttttgctggcagggaaaaaaattgggctgatacaatcaagataatcctatcaactttaggattattaggaatgttgataatcctatcaacattctatcaactctgtaatcagaaaaatatatttaaaataatgcgtgtttgttaaaaataaccaaacaaaatacagaaaaaagcaaagtaaaaattgacaatcccctaactccagtgttggtagttagggacagaagaagggtggaggatgtcttttgtctgtgttacatgattacagcaaaagtcactcttcattctggtagagccatagaaatctggccgagcagaggcagctgtgcctgaggagcctgacttcgaatcagctgtgttcatctttgctaacctcccaaagggaggaagctcaggaaaccaccgtagaaccccctaaaaggggagggtggctacagctgagcaggtgggggcaggcaggagtggagagaggcgaggatgatgagtcaggcaggtgagatggaggctttgtaggttatgttaaggctcctagacttagcatttcaagcagggatgtgacctgatcagatttatattttgcttgcattgctgatggacattggttcagtgctcattgtactggaagggtcaagaatagaggcagggacccaaatttagggggcttcccagggaatccaggggagaggtgttgtggcctggactagatttggaacatccagaaggggactggagcaatgacatacctatacctagtcccagagggccccgatctagctaaggacagagcgtgcagtcttgcagctgctgggctgatgacatgctggggagtgtatacctgggaaattctggtacagagataaaggaaatgctcaagcctccacctatgaatttgcccggtgattaaaatcatacttcctaagctttatagaagccctctgtttgtcccacaaagggccactagcacaaggaaatacataatgtgttcccttgtcattttataaaaatgtagactggtgctgcctgctgtgaaaatgccagtcaggttgcttccttcatagtaatcrgtggattcttttgtccatttctgagtggaggattagccctctgtttgccccacaaagggccaccagcacgaggaaatacatagtgtgtccccttgtcattttataaaaatgtagactggtgctgcctgctgtgaaaatgccaatcaggttgcttccttyatagtaatgagtggattcttttgtccatttctgagtggaggattcctttccataacgtggtgtatttgcagtgtttctctcagaggaggagtgcctttctggtgtcatctgtcctgttggtggcagagttctgctgctgaattaaacctttgtgtcggccttggccactcttatggctctgctggaggtaaagccagtggagtggccttgtggcatttgctccragttgttgctcatttttctgagattatcagaggccttagagggaagcattgaggatttcattatgctccgataactatcacgttgtcaataatatggttctgataagagtgatgggggatggtggggttttgtgagttgacagacgtgggtttgagacccagctctccagtcagaagccagcgccaggcctgtttctcttctctgagttttagtgtcctcaggtggaggggaggataatattaataacaccttcctgatgtggctccactgggctggccacgccatgggcacccagcacggggtggctgccctggttcgtgttaaccatcagcagggttggagagctccctccttactggtgttggaggtcattacctggcgggggatgtggtagataaagcaccttttattgtccctacacaaggcaactatggggtaacacaatataagttattcagattagagaaaatatgaactcttgctacagtgttactgcagacaggcacatatggtttgttaggatgacatttaaaaaaagtcattttgagttacagaataaaatcaaacaaaattcctttaatcaccagggctgggatggaaataaggcaaaatgttgaytcctttgaaagacaatttttgggttttttttgttttttttaaaaaaactttatgtgttgatggtttactctggtctagtcgttcctactcctattctgaaagcargccttgaattcctgattgtgtacaggattgtgtacaaacaatcaggaattcatcattcatatgaagaagttctgtttttccctctagtgtcatgaatattttcatgtacgtatatgttatgtgactagtgttaagaatgcatgtattatatatgtgcatgcgtctcatttacattgaatgtagctaaaaggaatatttgaaaagtataccttgcctgtctccaatttctacatttcaagttaaaaatgggaaataatcttagaatccatgcctgtggttcataagcctggctcagctcttgcattcccagctactgtctgacgaaactcacaggagctgtgaaaacaacgctgttttgtgaaagccaagtaggagcttagggtcatggcaaacttcagagaaatgtaaaggagcaggcactgtgggttttgtctaccccacccccccgaccccactgccttccaaaatttctttcttttttttttttttttttttttttgagacagagtctcgctctgtcacccaggctggagtgcagtggcgtgatctggggtcactgcaagctccacctcctgggttcacgccattctcctgcctcagcctcccgagtagctgggactacaggcacccgccaccacgcccggctaattttttttttattttttgtagagacgggatttcactgtgttagcccgtacggtctcgatcttttgacatcgtgatccacctgcctcgacctcccaaagtgctgggattacaggcgtgaaccacaccgcgcccagccccaaaatttctaattgaattttaaccttccacttttaagttctgatcctgatttataaaaacctatgtaattttcttcagctttcagaaggaatgtcttgtatcttcctatgggggtgttgggggaactgatattgacagaggtcctctgacatttsatagcctggcaaatagggtcaaacatgttccagacctcagaggattgctgaggatagctttctacttaagctagataaaagaagttttgggaatcttaccttgcactctgttttgtagaaacaactgtgtttaatatatttctcattactggctgaatgacctgtatgtgttcaggagatctctctatttaccattttaatgccacatatttaatgagcattcaggcccagactgtgaagactctggaaatgagaattttgtttcctatctcctgtgctgtaacaaaagcagcttaaaaattgcagtgtatagacctcaccttttatcatttttttttcagatttttaaatattaatattaagggtctttatctcagatgtttgttgtttaccaggtcatcagtatctggacgctggcagggtccttagcaatggagggagggagagggggtccagcctgcatgattggatcagtgttgaacctgtcccacctgtggggaagaggcagcatgcggagcagacaggtgcctgctgcaggtcaggagagctggccccaagtcctgacttggagggaaatggtacatattaatatcctttagtgccaggtactggcgtagctagtttatatgcatcacttgagcccccttgcatcactggcatcacttcaagatagacaacaaggggaatgcacatcatatccctgttcactggcgttcactggtagggaaactgaggcttaataatgtgcccaggtacacacagctgataagtaaccctgcaccctcgatctcacagcatgacattggaatccacctcattagacagagctcagctgcctattctgtcaaaaatgttgagttgtatcagctgcagtgtctgtagtattcctagacatttctgtgattctcataagtatctttgaaagggggccatttagtttatttctgcatttctcccttatctgccgaaatgcccgcaggctctgggacaagctrtaaagctctccgtgttatgctgtgttgcaaacccagtgccagtaatgatgcagtgctatttaaagataagaaagcaagctcacagagggagagcgcagcaggatgtttatgttccagaagcataaacacatgacctgtgcccgtcccgtgttcttcgtccatgtccccagagaggccgtggatgggatggtgcaagaaacccatcaggaagcagaattaatcyttcctgcgggtggtccctgtgaagaagacacagcggccggtggtgtgacagcccacagctgtcgaaggaagggagaagagagggaccgagggccagcaatarggttttacagctacgtgctaggttgtctcacatctaggaaagagaatgttcatattatatagaaatgggcattttccctgtggcctgatatgaggtatccagaatattcctttaggtattattaagtcataggtttctgttttgatagaaacagcaggtggttcagttagtatttttgttgttgtaatagtagcttagatctcttgtttttgttttctttggccaagacagaaaacattctgccacacacattacttcatgactctggttatatattgagagcagcattaaaaaaaaaaaaaagtccaatttagtccattaggccattcttgcattggtataaagaaacacctgagactaggtaatttataaagaaaagaagtttaattggttcttggctctgcacgctgtactggatgatacaggatgcatgatgctgacatctgctcggctactggggaggcctcaggaagmttctaatcatggtggaagatgaagggggagcaggcatctcacgtggccagagcaggagcaaggggttgggtcacacacttttaaacaaccagatctcatgagaactcaccattgccagaacagcaccaagccatgagggatccacccccatgacccaaacacttcccaccaagccccacctccaacaccggggattattgtcaacatgagatttcggggacaaacatccacactatgtcgtagccttaaggggatcttacctctttgaagcattgtagagttcagagagtaggacattttgtctactgtattttaaaatactaaatgttctgattatgaaagtcagtcctggaaaaaaaaaacaaacaaacctgaaaccatagatgaagataaggaacaaaataaaaattacccacagtctccctcgcgtgtaccgcacagttcatgttttagtgtgtctacacaccatttaatgcaggtggacagactcaggggcaggtgtgccttgctactgctatgtccacagcacctggcagagtccctggtacagcataactgctcagcagttgggtgctgagtaaatattaatacatgtgcatgtggtaccagtcagggcccaacagagggacctcatgcgaggagttgctccacaggtgtggaggatgaaagaacaagttggggcgaccctgagagagcccagagacaagctctgcaggaagcaggcaccaccactgggccaggtgacctgagcccaggagccaagaggatgccctccactgctgatactacctctgcagtgggacgacatcggaccccactgccgatgctgggacggtgcttcccctccccctgaggctctcctaccagggccccctctcatcaggccccagctggaagccaactggaaagggagtcggggaagtttcatttgtgggggtccaagtgccaagggacagacaagggaagggtggatttgcagctaagaagatagtaaataaccagactacgtgacagtctgaagaatcaaatctggaatcaaattctactctgctctaatgtaaccctgtattttactgtgaataatataccgtgggtatcttccttgcttgatagatacagctccacataatttttctcaatgaaacagattctggagtaggcaacgttttcctcttttgtaaaatacaccaaattgtgaggattgaatgagataatgtcaaagtattagtactttaccctagctgattgacagtatccagtgatagtgataataagggtaattactactctagccaattttatcaaacctatggatgtttaaggaattgggktttttttttttctcctttgatgaatactcctgtaaatacatcgttgcctgcttgtctgagtctttctgtgggtttttagaagtggattacttgcagcaaagtctccwctacttaaggctctttgtatattttgcctaattgtgctctagaaatacatcaatttccagtcctccttctctcagaccacctgtccctcacattttcaccagttctgggtcttgttattctttttactctttgtcagtcaggtgattgaaaaatatacatttttttttaaattggcatttattagtgagcttgaggatgtttttcacagtcatatggaaacagttctgcttcatgaacaagaccttggggccacatactggcttgttcacctggatgcattttctcagtctccctcagaatcatttttctccctgaaaaatgggattaaaagtattaatagtagtgcccatctcacagagtcattgcgaggattaaagagaggatgcatagaygtattgaatcagtgctgggttctggtagatgttcagctagccctagagattattagccatttgatgtgctgatcctcaggaaggtgggcgggagagacctagacgcagaaaaggagctctggagttgaggtttctagagatgaggtggtgcgtggtggcccagtccagcatggctctgggtgtgagcacaacataggcagatgtgtctggggctcagggagtcatttgtggattgagggtgctatgtgggtgtggaccacggtgatccaggatgatgcaggatttgggccggggaggaagatggcaacccaggttccatgccatctttaaagaggggatggttactagggtgtccagcgaccagccaagtggcctatagataataaggaggactcttcatgacatggaggctgaggtggaaagtcccagagtagggttcagccctggccctaaaaagtgccggagaacctgtagcctcctggaagctgtgctgtgtgcagagccaagcttcagtgtgacaaggaatggtgggagcaatttggagaagaatgaagacttggtgcagtggctagggaggcaggcagggtgaggatgtggaagggtgcagagctgctcaaggtcagcttcctgagcctgcggygtggtcccttgctccacactcagaagggccctgtgtttgatttaatgctcttttcttgccatcttgaaattcttgatagtttttgaacaagggatccatgttttcattttgcgctgggcctggaaattacgttgctggtgctgaggggatgtgcagagcagaggtgggcagagaactgacgagaaggacacgtgggtaagggtgggatgagctggcctcaggactccgagcagagctcatgtaaaggtgtcgggcccaggatgcgttctcaggctggggtgggaggcctgatgatggcagatttctctggattacaaatagaatatgtagcagggtggttcatagctttgtgtgtctgtgtgtgcattggtaaatttttattttgaaactaaaattatttcaaaattagagaaaggctgtgagagtgcggttgagctggtgttggctctggaacagggtttcccaatgcaggcggcactggtaactatgtgccttgggtcattctttgttgtgggggctgtcctgtgccccatgsgatgttccctgcacccctggcctctgccttctagatgctggggggcactttccctggtgtaatattaaaaaaaactctccacgttgccacatttggggggcagaatcaccccctccccraattgagaagctatgttattggaacacagtgtcctgtattttgtctagcctctgctgcttagagctgcctgagcttggagaagatacttgttctctttccaaagcttcactgtccctttctgtacattgtcaggacggctgttaataccactgctctaaatgtgctcagttttgcataaacatcagctaatgttaaaattttaatctctgctaatataagaggcatcgaagtacacgcgagttcagtttgcatatggtgaggagggagacggcctyatatcgtatgtgtgtatttgccgattctatattttgaggttgattcctgttgtcttttgttcagttgtctcattctgttttcttttggggctttgaatgcccttttcatgcctgtgacctctctttactatgccttttcttctctgccagcaaatctcatccattcttccagggcaccttactgtcccccaaagccccagtgactgctctgtccacagggcttggtttctgtgctctggctctgcaatgcamtgcagaaggggctgggctcggaatggrgttgctggtcaggccatgtgcccaggggaaggacacaggactcaaggagtccacccctctctcccccccttttttttttggtcactgaaatattttctttccaattctactagtcctgctagagctgccataacaaaatacccaatkggtgacttcaacaacagaaattgatyccacactgttcttttttttttttttctttttgagatggagtcttgctctgtctcccaggcaggaatgcagtggtgtgatcttggctcactgcaacctctgtttcccaggtttgagcagttctcctgcctcagcctcccgagtagctgggactacaggcacatgcactgtgtctggctactttttatattttttagtagagatggggtttcaccatgttggtcaggcyggtctcgaactcctgacctcaagttatctgcctgcctcagcctcccaaagtgctgggattacagacgtgagccacttcgcctggccatgatcccgcacagttctgaaggccagaagccaagatcaggagaccagtggattgtttctcccgaggcctctgttcttggcttgcaggtggccccttgctgtgccctcacatggcctttgccctgcrtacatccgaagccccagtgtctctctgtgtgtccaaatttcctcttcttagaaggatgccggtcatattggattagggcccacccgtgtgacctcattttaccttaataacctctttcaagtttctgtctccaaatacagtcacattccaggggctagagcctcaacatggaagttttggagggagacacacttctacccataacaccaatgtcatattaagctttatggaagaatagaccaatatgtggtgggttcaagaatcttttcttagaagaaaagtgaatctgtatatttgatactttatgatttccttatttgctctaagcagttggtaagaatctcagtgtcacttggctgaatgatacactactggtgcctccagacctatgaggagcctaatatttttgtcttggttgaaacaatgcaaatcctgggttttggagatgctcacagccagctgtctgattacgtaaactgaaagtggcagagaggaagcttttgcrtggggaaaacatgaaatatacaagggttcctttaaaacagagtgtacttctgaacatttactgaaggtggagggccctggacacctgatgttatcttatgtggcgttrtctgggtcagatttcattgcatttcctgaagaggtaacttggcagtcctgggagaggctggaccttggtgtccaggtggcaggttcataagacacctgtgatttgatgtgagccagtcacagaggaagccatttccagagaggaacaaccgtgtagactgctttcctgggagtcaagttaaaacttctctcctgtgaccttgtcacccggcagtggaaagttacccttggctgcagccacgacttccgcatactcttcagaacttgctctgcccttgagttttccagctttcctttaatgcactaaacctttaatattgtattctcctaaatgagacgtctcgcatttgagcargtaacactcggtaagactttgcttggtgggggaggaggttttaccttcctgtggcattctgaagctctccacatccacccatagtcatgattgtgttatatgacctcaagatgctggagctgttaattcatctttaacataattgacctgattacttctttcttgaaggattttgttcaaacctcagggtttatttaggaacaagtctaaccaggcctgattggttttcctaagtggagatacagctttgggaaacaaattaagaaaatgaatggattgaaaatgtaggaacaccgtgacagttgtgaatttttcttattgagggaaaaaatgggtatctgtgaatatttctcttacactatatagtgagaaatgacactctgctgtggatggtaatttatttctgtgtaattgcctgagtaaggctttctctgatattgaatactgagtagaactcttaggttatttttggaagaattatggattttctcttaggttttagaatattttttgtttgcctgttaagagaatttgatgaagatttcaatgtaattaaccaaataaaatggcattctgtatcctgggaagggacgatgtctttcagttctaaatcaatgcatcatttacctcctatctctcttgctggccgagccatcaatcctgtttttattaaatgttgttgttattgttttgagacggagtttcactcttgttgcctaggctggagtgcaatggcataatctcggcccactgcaacctccgcctcctgggttcaagcaattctcctgcctcagcctcctgagtagctgggactacaggcatgcgccaccacacctgrctaattttagtagttacagggtttctccatgttggtcaggctggtctcgagctcccgacctcaggtgatccgcctgccttggcctcccaaagtgctgggattacaggcgtgagccactgcacccggccgttttttgataaattttaaacttctggtttgaaacttttgtttcctgtgcttaaaaggagacagttaaaagcactctgatttggactgacagaatgttttttagatgttagatagatctagctttgaatatttatttgcagagaagtagcagggaggactaggaatgactttttcttaggaggtgctatgcattccatcaggtgactgacccctttgtgagctgtagtggtcagtcccagcatggcccacacttgttggctgtcttagccatggtggctgtggttggcgggtacccagccaagggttttccatactgggggccttggtccagtgggggcgggtcgtaccatgacccccttctcctgygatcttgcctcactggcccaggtaaattggtggacrtccttgactcctccacctccaaaaggactttgaactttggcactgttgggagtttaggctacacctcaaccaggcagagattgggatctaacctacttttaaaagccctctacagggaatttcataactttcctgagtgttaggttttggtgattaacagccttgactttttggagcccttcctttgccaaacatgcattcctcaggtgctcacttaaaatgattcttcacaatatgcctatagacgggtctgtctggtacagcatcctggagtggtgtcaagggaaagaaacatgctgcttctgccacagacggaccatgcatgggaagaaactatttgagaatggctctccaaggggctggtcggccttgtctgcccactccctctacctttctttgttctgtttctttctcttcagtgttggtccattttccttttttcactgttgcgtgttagcacatcattactcttatctccatatatttggatgtttcctgcattatggtgagcttcagtaggtcttggatgagttagttgttctcattccaaaatgtaaatttctggtgtttagtaggtgctcagtaaagcttgagaaagatgaaagtgagagcccagaactagtataaaaatacggataccaccatagcatggtaattaaaggggtgattgtgaagatgaggtagctgtgcctggatrtgtgtgtgtgtgtgtgtgtgtgtgtgtgtgtgttggctggagaaggcttaccagtggtgctggacatgtcgggtagagtgttaatagtaacttaattgactgaatttggaaataatctatggggttagagagcaaggaggtagctgtgtaagaggatggggtcggtgaggtggggtggtgtgagcaatggagctcaagggctcaaggtgcaggcctggactgatggccactaggaccaccccaatggcttcagggtcaggacaggaagggaatgtgattattgcagcaggtagtagggcagtatgagtgtattattcatatatgtgtgatgaaatggagcatcaaataatatatcccataggatagaaaggcacagtgagtgagtttgggttaaaaattcgatgagataaagtggttgtacctcctatgaaaacaatttaatttcttattatgaaggcattactcatgttcttcagaaaaattaaaaaaaaaaactcagtcattatagacaattgtactcaagatgaaaacaccctgtactgtcgcaaccctgaagcacctctgttaatatgtgtgtgtcttctcacggggtgattcttgatcagagttactgaaacagcaaggcttgggaacaagaggcatgagagcaacactcaggrcctgttcagttttctgcacagttccaggtgctcttccagcattgctggctccgagagagtcaaatattcagagcttgcaagctggggaggaaaggggttagggtggagataaagatctgggagatctacagatacggatcatctgcatttggaaattttgtttgcccttctcacacatttccatccaagttttctttggggaagaggggatccctgcagaggagtccagttgcaaatgtgaaatcttaaaaatgtatgtaaatagcatctttcattccgtgatacttgtttgtttgaatagaacattgttaaattttattgtgcttcagaatcatctgggtgcttacaaacatagattgctggactctggttctggagattcggattctggaagtctgaagtggggcttgggaatctccatttcttccaagttgccaggtgatgctgatgctggtagtcgggagtccgtactttgagaaccactcttctacctaccaagacttccaaaaaattggtactctgggaagatgccctgtgccagtcctgtggcttcttaggcacstcttccagcatagactcctgcagagaacctggtacctgcaagtacctagtacctgcaagtacctgcaagtccagtgtgggaaatctcatgacaggcatcaacattccgtgacggttgacagccacctatggggtggctgatgccttttctgtgtcttcagggytttaggggaaggagagtctaaatgagtggttctaggttgtgggaagagcctggctttgatgttcagacacctggcctcaggctgcatcgcccatacttcctgtggaatggttatcatgagtcctgttgtcctgtaggtgaatcattgattcctgtctttgcataacctctcacttgatgataatttttttttaaaaaaatgactcttggaaacagaacacacagttgtagagggacctacagtacagcagaagctttgtggaaggatacaaaatgtgagggactgtagtcgaagagatttaaattggaagtgggaagagattgacttttttttttttttttttttttaaagacagagtcttgccctgtggtccaggctagagtgcagtggcacartcttggctcactgcaacctccgcctcccaggttccagcggttctcctgcctcagcctcccgagtagctgggattacatgcatgagccaccaggcccagctaatttttctatttttagtagatatggggtttcaccatgttggccaggctggtctcgcaaactcctgacttcaggtgatctgctttgtgtctcttagggagcatgtttgaagagtcaaaggaaaaccaagtctgttagctttgcgaaacgtttttttttttgagatggagtctcgctctgtcccccaggctggagtgccgtggcgcaatctcggctcactgcaagctctgcctcatgggttcacgctgttctcctgactcagcctcctgagtagctgggagtacaggcgcccgccaccacgcctggcaagtttttctggaatttttagtagagacggggtttcaccatgttagccaggatggtctctatctcctgaccttgtgatctgccctacttggcctccaaaatgctgggattacaggcgtgagtcaccgcacccggcccgaaatattgttaaaaccaagtacctttgtgaaacattgttacaaaaaccaagtaccaagtgtgtggcattaaagtcaaacattaatttcaagttacagaaagaaatagcactgagtagaggttgatcgataaaaaatgaataaaatattcaacagaaactccttaaaaataatgtgagaaatggacatgtgacatgggcgtttaaaaagtctgtaaggccaagaaaagtttcctgaaaggaacactgtgcccaggcagtcctggctttgcaggattccctgataaccgagctcaggcatcctgcagagtgagtactgcccagatagaaccttctgcctctttggggtaaaattcgatttcaaagagagagaactgtggggtgagaaaggaagactgggacccaaggggccaaactagtgacaatgactgctgtcatgaagggtgacaaggacaatacctgctgagctcaaaccaccctttggacccagtgaagctcagatgttgcttccagtgcaggagtagttaagctcaactgttttacaatatccagttatttggctgggtgtgatggctcacacccacactcctagcactttgggaggccaaggtgggtggattgcctgagctcaggagttcgagaccagcctgggcaacatggcaaaaccccatctctactaaaaatacaaaaaattagccagacgtgatggcaggcgcctgtaatcccagctacttgggaggctgaggcacgagaatcgcttgaacccagggaggcggaggttgtagtgatccaagatcatgccgttgcactccagcctgagtgacaagagtgagacttcgtctctaaataaataaataagtagcaaaaacaatccagttattcctcaaatatttatgagcacctcttaatgtttcagatactattgtgacaagagaaaaatgtgtttgtatatgtaaatagaaaaacaaaagtgatgtggaagcgattacttctgtcattttggaactaccttcctcccatattaagtccatattatgacaattcaaaaataatcaaacttcgtaagatattacctgtgaaaggaataagtatttaaaaatgtattttagatggccttttagaaatctagtccrtggacacaatctagcatcatgcagttgccttcaaaaagaatatcctaaagttcttgtttgttttctttttcctttcaaagtgttctgttgaaaataacccatttgtcattttagttttgatatgacttagttatacatgccttttgaagcagtacccacccacatagtaattgcgactatcttgtgttttgaaaaaaaaaaaagcgagacaatttgactttgatagttttaagtttaaaaaaaaaaaaaaacgctccaagttagactcagatgaaatcctttgatcttaggtattttatgaggaaactggaaaaaataatttcacaaatttctattttgctttataaaaattttatgattcataacacagggaaaatccagtaagctaaggcgttttttagtygtttatcttgctagtgagtctttgatgtgagttatttctttgcagtaaggtggcatggatgggtgatgaggctaagctgaaaagttaaatctcataatggacatttgcrccctttaaggaagtaaagctctcaaagcatgattatggccaagatgaggccggtggcatgtttgtctcctaaatgtgcagccaggaatctcgacggtttgtctgaggtatgcaggtgcctggtagataaattagggtgagcatcattcatggcgtgtggtcagttgcaggccttcagccacagggatgacagaagggaagtgaggaatcagggatgggtttgaactgcggcgttgctttgggagtctctagacatgatcagttgcacrtgkactgttctccttgtcaccctcaggatctactgtcctgtggttgaagcctgcagctctcccaagttggtggcactgggcttcctgacttctcgatgtctaatgagacagtggaattctacttgcagccccactgcaggccaggtttatctctcctctgtcttcccagctggtgatttggtttctcagtgctgttttgggtgcacttttgtggaggattcaagctggtccttagccactccttgaaccagaacctcttttactttcttatgtagttcttctcttcctgtttttatatcctaaaactagtcyagcgaccagcccatcgtagtagaagcgttggtgttcttcctaaaaggaattgtaaacatctcttggagagtgggttagccaccataaattgttttgggacttcggatacccccttccgcaaatgctatctagagatgctttaatttcatttcaattggttattgcatccctgatattttgaaactgttatgagtagaaaacattctggtttatgaacaatctgcttttcactatgaaatagatgggaattktaattattcctgcgctttgtcttagagaagttacatgcatgcatcaagtgttgtgtgatcttgtgcagttcttcttagattgagtttttggctcctcgtgtgcaggccttctaaaatcacaatgtccctgagttgggaaggaacatcaggggctatctggttcattatcctaccccccaccgcctcccacgccccacatttctggcagcctacgagtctttggtccctccccagtgctacctggccagctctcagccttgggaggccacctgcccgtgtttgacctgggttaatgaccgccagttcctttcccttaatacractcatctgctctcctgcatgctcgctccttgggtgagagctgccctctgcaacctcataacggaaaatggcttgacttctgccacctcctcctccttcccatgaaagaatctggtcttttctatctctctattatttttaaaaccagattaggttggttgtggtggctcacacctgtaaaaatcccagcaccttgggaggcagaggtgggcagatctcttgagccccaggagtttgagaccaacttgggcaacatggggaaatctctaccaaaaaaatacaggaaaaaaaaaaaaatagctgggtatggtagcacacacctgtagtcccagctacttgggaggctaaggtgggaggattgcttgagcctgggaggtcaaagctgcagtgagccttaatcactccagtgcactccagccggggcaacagctagaccttgtctcaaaaaaaaaaaaaaaaagaaaaataagaaaaagaaaccagattaaacattcctaagtaattctttttgtgacttttgcctgtttattaactatcctggctacttaaaatgaatttttgagttatgaatacatttagatggttttaaattcaaagaagtctcttttttctcagtcacttccatccccagccaaacagttcttatccccagagtcagccagtgttaccagtttcttgtgtccatgcagtttgctttatgcatttacgtaagcaaatattcgtacacacacacacascctttctatcttatggaaagttatttcagtggcacatgtaagtatctcagcatctcttgattgtcattctttttggattttttttttaaatttcatacttacaaatgatcatgtatcttaagttttctgaagtagccttggtttcgcattttgactgtatttattatggtatcaggttccatatttcttaaaagtaatactgctgctgcacttacattgaacaagtcaccaagctctgttaattttgcctgaaaaatgccactgctttgacatgatagaaaacacaggcaatagtctttatttctcactgctgtttttttcttattttgaagaatcaccctaatacataggaaaatctcgacttagcaaagagataaatgagactgtaattattgcattgggtttttcacaatgtatgttagttatctattgctacataacaaattagttttagagttagcagcttataaagcaacaratatttattatctcacagtttctgtgggtcagtaaatcaaaagtggcttaactgggtggttctgacatgtgcctttccacagtgactggtatgtagcaggcaagggtctcttatgatcctgagtgaggatgtcagccaaggctgctgtcatctgaaggcttgactggaacagaaggacccatttctaaaatgagtcactcacatggctggaggcaagaggcctcagttccttatcgcagagattgctccttggggctgactgagtgtctgcacatcatagcaacagctggctttccccagagggaatgatccaaaagagaggtggaagcctaatgtctttgtgacctaatctccaaagtcacacactgtcacctcttccatattctattagaaaggagtcactaaatcagatacccatgggaaattacccacctcatgaagaaagaaatatcgagaatttgtggacctgtttcacaaccacacagcatcattttttgaaggtagagtcaccttgagcatttaaaktagggttctgctctagaagtctatccctttattttttcccatttgttaaccctttttctacttggcataatagcagccattacccagtagaagttgagagatttaggttgcacagaatcccacagtcttttcagaaactcatayccttagggtgtctgcttgttgacagcattgtagaattgaaacttgaccacgtgttatgtgttgggctgccagtggtgatcagagatgacggtgagtagtccgttgagttagggctgtttgcctctgtcggtgtcatctgggtttgaactggacktgcagtcctggtgggctgctttcatttccaccctgggtctttgttctcaccactcacatcttacgcctctgttccaccgctgtgtaagaggcaactgtgcrcacaccttgcctctgccattgactgtaagctcctgagagagagagagaatgtgtctggttcagttttgtggccctcctttttgctagcataatgcattgaacatagtatcattctgcatttttgttgagtgtataattagatggtcaatgtggagaactcagagggattttaggagggggtggcagcaatataaggttgtgggacccaacattaagagagggaaaggtgtagcgggaaggcgttggtgtggggagggagaaagtcaagaggattcaacctggcaagagttggaagtgacaggaaggtgtgtggggtggggacgcaataggacagtgtgtgagattttttaaaaaatgcaggcaggggagggatgagtaggcagagcaccgaggatttttaggacagtggaaatgctctgtatgatactataatgggggatacatgtcattatacatttgtccaaactcawggagtgtacaacaccaagagtgagccctaaggtaaacgatgggcttcgggtgatttcgatgtgtgaattgtaacagggatactactctggagcaggatgttgatcatgggggaggctgtgagtgtgtcgcggtagggggtacgtaggaaatctccgtgccttctgctcaattttgctgtgaccctaaaactgctctaaaaagagtagtcttaaaaatgcatgaaataggatcctgtctcaggactggggcaagagcaggtagaaatggaaagagtgactgtggctgctgtgtagcaggcacacaatggtcatggtccatatgctggcttagttattttttaaagcaactaaagttaagtaatgtatacktaacttacatatttatgtggtccaaaaaacgttggtcatctgttttaatscagagagtgtttaccctaagcctgcaaatgtgatgggtaatagctagaactagaaaagtactttagaatatggaaggtaaatacatgaattaatttaggtaagagtgacaaaacagkggaagtccctgacttagaacttattgtccgcttggacagctggtgtacgtgatcctggggtcacagtggctccctgtgcaggaagaacactatttcccagctcagataccatctttttaggagagtacctgccattgtggaaaatmaggataaaggataacaagttacctccttaagacaaagtcataggagaaatggtaaattccagtatcttgagttttgagttggaacttgaaatttattttactacaagaacactgttgatggattatgtattttatagactttgtgggtggctatgggactctagtaactgcttatgcacagtttatatgagtagggctgctggatttccagatgacgctctcgcaactgaaccttcagattaccacctgtttctcagtttggacactattagtgtgctgctgtcacttatggctcgggcaccttatcttgttttatgtcttgatgaagaaktacaaaattcagtgtaaaagaaaaacatatgtaaagcttataraatcaccccgttacacaataacaatgcagaacaatagattaataacaggaagagatgctgaaacttctcttcagcctagtttctactctgatgtttcttctctgcattgtacagccaatctatgaataatattttcattgtctaagcaaagccaccttagctaaatatttaattctactggagtcataaacagggttcaaaatatcacacatagattttatgaaagtaataaaatgcttcagaaagtacagtggctcagcctggggccactgcatctgataatttggttacacaccttgtcatgtgcttcctaaaagaatgacgatggttgcttatctgtgtttaagcttgtcattttgagraaacaaagataagacatttttgctgtgtctctaaaatgcatgtgtaaactatttttatagagtaatgcttcagagaggagtaaaatttcctgcaacaggtgcttgtaaacagtaattgctcagtaaaggtcacctcccagctgttgcctacatgttacataagagaaccccttcacgtcttccgtatttgcagctctgtacctttgtgagtcacctaaaaaataactcatagggttgtttttctttctttcttttttttttctttgagacagggtctcactctgtcgcccaggctggagtgcartggtgcratcccggctcactgcaacctccgcctcctgggttcaagcgattctcctgcctccattctcctgcctcagcctcctgagtagctgggactactggcatgcatcagcacgtccagctagttttatatttttagtagagacagggttttcaccatgttggtcaggctggtcttgaactcctgacctcaagtgatccacccatcttggcctcccaaagtgctgggattacaggcatgagccaccgtacccggcaggtttgtttttcttatgacaaaatcaagcctggatggtgtcgttaacggygaagttaaaatttttcttttgctttccttaatatttccrtgtttttttytttttytttttttttttttttttaacaaaagtctggtttctaaaccaaaatatttaatgcttcaaaaggaaaaaaatgtaagtcagtccaaagaaatgattcattttgcagaggtaattactactaacatcaacctttccaggtctttttctatgcagctatatcattgacatttttttaaaaatgagattacattgtactggagggtagactgctataacaacttttggttttggatgggaataaacagaaaaagtctcatctccagttcatttctggggagggtcaggaggtggggggtgcttggctctactcccttcrtatgattttcccttctttatctccaggatcttccccatttcacggagagacatggatgagaatgaaggctgctgagtgggaggggcttatggggccagttttgaagaggcctcataccttttggccacattccattggccagaactttgtcatatgactgcacctaactacaaggaagactgggaaatgtagtcaagttgcatgtccgggtagaaaagggacacttttctgtggaatagctagcatgtttgtaactcaattttataaaccattttgaaacttttcttaaaaaaagcttatttcagacacatttttatatgctggatctgctcacctctccatctctatcttattaaaagttcttgccagaatctctctccaattgttctccctccttctgccctgttccctcacagcagccacagtggttctttcaaagactgaagctacattttatcactcgcctgcttaaaactttacagtgcttctcccccagtggtcgggataatgttcaccctctcctgaagctggcctctgtggtccttgaccccatcaggtcccacggtgccctgcatggactctgccatccttcaccagcttccccccatcaaacggggcttgctgtcagctcttcctgcaactcccagccctgccgcaccactcagccttcttccttcaggcttcagctccagtgtcttttcgccaaagaagcctttcctgatctctcagccataaatgttcctctccccrgttgctttttccctctccctctactcagttgctttrtttaactgtcatattgtctttggagcacttgccaccatcagaaattatcttgcatyatgtatttatagtctgtcttccgcctactagatggtgggttgcttgaggcaggaactctgtcttgtttacatctctatctccrgataacgtgtctggcacgtgatgggtactcagtaaatacttgtggaataaagaaatgtcattacaggttctctatgcattaaaattttttagaaatggggtgttgcagccgggcgcagtggctcacgcctgtaatcccagcactttgggagactraggctggtgtatcacctgaggtcaggagttcaagaccagcctgggcaacatggtgaaaccccatctctactaaaaattcaaaaattagctgggcatggtggcacacacctgtaatctcagctacttgggaggctgacgcagaagaatcacttgaacctgggaggcagaggttgcagtgagctgagatcccgccactgcactccaccttgggtgatagagtaagactctgtctcaaaaaaaagaaaaaaaraaaagaaatggggtgttgctatgttgcccaggctagagtgcagtagctttycacaggcttgatcgtagcgcactgcagccttgagctcctggactcaagtgatcctcctgcttcagcacctccccgagtaagtggtactataggtacttcaggttttgaagcatgtgtaaaaaatactctagcagggacatcatttgagctgagcaggccatggaggcatcaaatgattagcagtagggtacaacttgttgtgagaaccagaaaagagccttggcctacataacatcctgtgctaaagaaagaaccctgactcccagcctgtgagtgttccagagatgggcagagcagtccctgcagcgcttcagggaacagggaagagcagctaacccctgatgcttctgtaagcactttgggacgccctttgctatagtagggtattgtcttagttatccctgacttgcctggtgttactttacrtcccttaatcctttcatgaagactggcaaacacattcagtcctgccaaccttgaaagtaggccatgtttgaaagaacattggcacaaacgagttgcgaacatcttctttaccatattcatgttctttaccgtattatgaggacactgtgcttgccacatgggcagtcttgttttggggatacgtggttggatggacggttgggtggatggaagactcctggartgtgaagtatctcaaggatgtgtgtccattgcatgaatgtatgtttgatctatgcagctaattgacaaagatccaccatcctgyaccctccatgttttatttttgccctgccattgttctcttcgacattctataatcatcaaggttttcttgccctcacctaggtcttgactaaacatgttgggtaaatgaatttcatattactactttcttgcgccgtcagccattgtgttcttggggactccatcctgagccttttttttttttttgagaccgagtctcaaaaacartgaaggcaggtgactggtgaggagagttccagccactggattctccctcagtcccctgtgctgtggcccttggtgacccctagatttcagtgcccctgcctgacactggagtccctctgtaaagaagcccctttctagctagctagctgttccatcccgcacacccccacagaagccttttgctgccattagtaagcacgcctctattttctcacctgtgattgatcatgcatgattgagttttgtctattaaagcaattgataagttactaaaatggcaccaaaagaaattagaaaaaaattgttgcaaatgtcagtgaaatcttttaaaaaactgttgtactttagaagtgcctcaagtgactaatggaggcttaggactctgagtggtgtcrcaaggaaccttatgcacagggacactgacattagcctgtactgtcacccaggctggagtgcagtggtgtgatcttggctcactgaaagccccacctcccaggttcagcaattctcctgcctcagcctcctgagtagctgggattayaggcacatgccaccatgtctggctaaattttgtatttttagtagagacagggtttcaccatgttggccaggctggtctcgaactcctgtcctcgtgatccgcctgcctcggcctcccaaagtgctgggattacaggcataagccaccatgcctggcccctgggccattttttattcttactcttaggctaggtttctgcagaccttggttataactgcaggctctacattgataactgctgagtctctaagtcagaccagacgtttctccccatttagtgatacatgttttccatccaattgcttcatagacaccttggacacagtgctctatttcaatttatgttgacagttcatgacccaaactggaaacctgagttatcctggacttctgcctaccaccttctcctaagccatctcacctgtcctaaatgtcgtagcccttatctagttctctaagctgtcatagggtcctgtactgctgggctgcttgttgccttcaatagagcctggagcatattcatgtcggtatttcaaggccccgggcataagagcttcttaggaaatattggaatgaatgaagaaatgatgaataaatgaacaaatgaacagttgattgatttccaagacactttggggtggtttccatttagaatggtttttatttctttttactggaactaaggaattatttttgcttgttgatgccaacattttaaaagcactataattttgaaatgttttaccacattaaattcttttctattgcaggtcacatacaaatatgtcaacttcaaaggaggaattatttgttatatttatgcaaacttgtggcacttggacatttatctagatggttttttgtgtatgattgtgttcttggtacagctggaaaagctaactttaartggcaggagtaattgatcttaatgacttactttgaattaaacttgtgcttaattaacttggatgttctaagtttctagagtcacagacttttagagctggaatattgctttttgaacttcagtgtaaggaagaattgcttatgctygaattgatttgttctgtatcccaatactggactgagtagaaatcaattactttaatattggatgagagartgattgattgaagatcaggtttttaacctctttttttgttctccttctcacagggagagtcccgtattctcagagtaaaagttgtttctggaattgatctcgccaaaaaggacatctttggagccaggtatgttggctttgtttttatttctgtggacttctgaaaaattgacaagcagttttcaaattcaggcacgcatcagaatcacctggaggacttcttaagacaaagctggctgggccccacctgcagggattctgatttaggaagtgatgctggcccagctggttccaggagcacattttgcacagggcttctggacttaccatcacaacagtagttaacagcctgttcttcacatgggctaatttcatgagattagcttctggtgttgtattctcagtagaaaaatacagtgtgggactatggctctgcttattttaatacttcaaaaatatttcaaacttagggaaacataaaagtgtcattttgtttctaggagaactggatattctggacatgtataatctgaattaagagatttggtgatttggggcgaatgtggtgatttctgtggcatttctagaagtaccagcagggaagcagccagatctttctgtgtgtttcagcttttttattttcagtattgcacttggatattcctgtatctttaaatcagcccttttgttcctattggctgtcagcaatgtgttgcatgaagttattggactgggagcagggtgagggtagccgtagagccacctggcactagaatttagccagattttggagaccaaagatcttttgaactttaaacctggaatggacatgagtgatgttctagtccaacttttccattttatggttgacaaagcttgaatccagaaaggttaaactacccgtgcaggtcacgtgggccagtgatgtttgaggagtgacaggaacactcctcctgcctctacccagtacattttcctttgtggcatggtggcctgaaaatactgtgaggtttaacaatgaaggcaggtgactggtgaggagagttccagccactggattctccctcagtcccctgtgctgtggcccttggtgacccctagatttcagtgcccctgcctgacactggagtccctctataaagaagcccctttctagctagctagctgttccatcccgcacacccccacagaagccttttgctgccattagtaagcacgcctctattttctcacctgtgattgatcatgcatgattgagttttgtctattaaagcaattgttaagttactaaaatggcaccaaaagaaattagaaaaaaattgttgcaaatgtcagtgaaatcttttaaaaaactgttgtacttagaagtgcctcaagtgactaatggaggcttaggactctgaatggtgtcacaaggaaccttatgcacagggacactgacatcagcctgtactgctggtaatgtcagagtgaagcaaatcccacctgaaggcactctcttgcttgaccgtgaagtcacactgagtggttcaccatgtgcctgcactcatgcaaggataagccaggtctctaggcatgggcagaaggatccctgcttcccttctcttccctttcagagcaacactttcagccatttccatgagtctgggctcttgttacccagctgaaatactgtttcctgaaactcacaaatttgctctctaccaaagcccaccttatgccctgcctttccatgaagcctgtcaagaaaattccaagaaagaaaatttgatattcctatatcaaagcgtgtgtctttcctctcctaatmcctcttagctgccacagtaggtgcaatgtcattttagcttttgcagatgcattacctggtggtttcctagtatttctttcacttgcctcgattgctagattagaaatttactggggacagacatctttttaatatctttctcctactacttaacatatagagcatcaagggaaaaaaaaacaaaaattatcttttaaaaatgtaaacatttgcatgccaaccggtagtggattgtgcccttaggttaaaaatatgtattctcactctttccaatgaaatctgtagtgctgaaggagcaagttggatttagaaaattttggtgatttctttttaagcttgattgggtttttattttgttttatccaaaccctcccattaaaaaaaaaaattgattcacattgtatttctaagccagttaagtagatttaaggttgaatttgtagtggaattaggctccaaatcttagaagagcaaattcgtaccttgaatttttactgtttagataataacaggcagggtcatttctaagggacatggtggaaaggaatattcgtgatattaattagaaagataaatcgtattgtggccaagtggaccaagtgccagaaaatgcatcagaaactctgaatcctgcttctggtcttcattttcctagattgataagtaggcgcacacattcctgctttcctccctcctctgaagtgctgtagttcttcagggacacatttgccagtgggtctgagatgcaagtgtgaggtggcagtgtgggttaatgccatcttggtgtctcactctggagtggcactgcttattgccttaaaattttgccagatgacctgcattctccctccatgctatcttgggcaaatcccttaaaaccactcatgccactgtgtattagtgtacaacaaggataacagtttctttgtaactggcatgtggggaagaaccgcaaagtgacttctgtcggcagcagctctgtcgtgttttaaggtagtagtcaccgggcagaggtttggtagtgtcctctctggcagccaccgtctccttcagagccctgggccactgacatgccttttctccaagtctcttccctgagtattccccgcacctctgtgcctgatcagacacctcattctcccttggcagcaagaaggccgggtaggcattggagcccttgctgtagacaggataatgggtgaaagaggaagaacattttcatgagaggcatttcagagcctttaaagtggtagaaatcctgtagacaatgatgtttttaaaatcagggatttgcatctctgggactccaactcctttgtttccaagggaggttccctgggccacttggcctgaggttgggaaggggtcggtggttgcggggcagaatgtgatgcttggggatgcaggatggtcaggggcgggtgacggtgggaggagtggagcacgtcatctctccttgcccttccgaggtggtgatggaagctgcctacagctccagctcagaggccgggggtttctggggcccttggtgtggggcctctctcctagctggaggtggccccttcccccttgagaggcctgtgcctgaaatgcccttgtccttttcggccgtctcggccccagtccagtacttaggatccaagatcattttcagctccttccagccaagtctcactttattaaaggagctttgttyggagcagattggataaccgagccgygactccacttgaacatctgagcagttggcccgcgtgggaaacagcaatggcagagaaagatgcttccctttggatcataccttgaggacaaaaaagggcagtcatataatctgtcatctaaactgggacgcttttgtctggaatgaatgcgacattgaatgggacgtccggacataagatgtaaattgagactgcagtcaccctaggtcagagacatccagcctttattatccatatcatggggaaaaaaaaatggaatgtgattttttttccccaaaacagcttaaaaaaaaatgctaagtaaaagaaaaaaataaaaagcaccttttaaaaaagcaggcctcacataaaatgccactaagacatcaaaagagaagtaaaaccctgctcaaaacgcccacgtggggcggccacagctcacccttgtgtgcctgtgtcccgtttctgctgtcccctttcccaaggacgtactctgccctaacctcaccctgatctggtgactcctccagtggcccatcctatgttcaccagctgggtcctcatctcctccgccacacaggctgctgctctgtcccccagcagacctctccctgtctctggggtgcccatgacccctgggaagtgctgtgcatagttctgtgagtgaggttgacttgttgttttatgcttagaattgtttctttctcctgaaattagatttttctcctctgatgactaggattctattttatttatttatttttattttccacgacctattatagcacatagcacctaacaggtcctcaggaagtatttaccaacagattgcatgaagtgagcccgttcttcctccctctctccttccctccctttcccaccccttcactggaaactcacagtcactaaatatgccatgaagttgctgccttttgcctttgcctgtgttttcccctctgcctggcatctgctcacatcctttctggcagctgccctctcatctgtcagggcccagtttgggtggcaacactcctgctgaggcccctgcccgcctcatcaccccagcccaagaggacagaacactgctgcccgcctcatcaccccagcccaagaggacagaacactgctgcccgcctcatcaccccagcccaagaggacagaacactgctgcccgcctcatcaccccagcccaagaggacagaacactgctgcccgcctcatcaccccagcccaaggggacagaacactgctgcccgcctcatcaccccagcccaagaggacagaacactgctgcccgcctcatcaccccagcccaaggggacagaacactgctgcccgcctcatcaccccagcccaagrggacagracactgctgcccgcctcatcaccccagcccaagrggacagracactgctgcccgcctcatcaccccagcccaagrggacagracactgctgcccgcctcatcaccccagcccaagaggacagaacactgctgcccacctcatcaccccagcccaaggggacagaacactgctgctcctggggctgtagtgggtgtacaagttccctcctcctacggccccttgtcttagcggacttgggaggctcagaggctccagccctgtcttattggtgtttgcaggtccagaaatcttggcacatgacagttgcctggtaaactgccttgaattcattgagtggaacacaatatggtgtgctgtggcacctgatggccagcctggaggaaggggtacttttttctcattgtcatggaggtcccattggctcttcaagcatctctcccaagcatctaggagaggtgcttatktctcattctcacaaaggctctttgtggaccagcacaggaggcctgcctagggcttggatgaaaaatgagcatagagagaagaggttaagggaagcaagctcaagagtgggctcagagaaaagaatctgggggagtcaatgagatggcaggcaaggaacrgtctccatttgatgctgatgtttgtgcagaatgactactttataccgtacagaaggagcacackctcttcttgtggtaggtcccagaaacttctacttgggggtacatgaggcccagctgggattgggcacagaaggtcatggctctgcacctgaccctcaccttaggggtcaggagagagccaaggacacgagtgatgggttagggaggactcaggcaccatggartactgtggccatccttccatagaggagaggtacaggtggcaaggcaggcaccaggcagccgccgacagggtcaggaaccaaggcaggtccaggaaacagaggccaaaacagcagcaggaacctcaggcttagcagaccactgactcttctggaagtcttttagacgctctgtggtggggcagggacaagtccttggtgtttggccatggtgaagtgtgcagttagggtaggtgagtcgtgctttcttaacacgggggtaaggaaggagggtagagtttcagcagctcctgtttcttgagcacttgctatgtgccagatgtggtttgaactgtttacatgggagctcgttgggtcctcccagcaaagtcctatgtagcaggcactgttgttctttttgcagataaagaaactgaggcaagaaaggtttagtaagttgtagagctaggtattgaaccagggcctaacctcttaayagaagttagttagaggctgttacttgagtgctcacaggttggctggcaatgtgtttggaacccaatgtaatgtcattagattctgcctaaatcttgtgaagaggggatttccatttgataggtaagaaaattgagaagttatcatyagcccgagatcaaacaagggtatagggagtggtgggacctattaagttcagatttatgtgacttctgatgctatgctcagtgatagatctcttcttgaggataaaagtttgagaattagggttcctcgaaaaccctgagatttctttttttgaggggtacctttttgtgttagcagatttaaagagctggccattgtatttgatggtagctgagtaagccttttgaattggagtatcatcaactattactagatttagaataggtatattttgctaagtaagatcttaaagtttttcctttaaacttaggatagctgttcaaatttcaaactcttcttttttcagtaagctgragacatttaaccttttgtcataggcttaaagcagtcattaaacagggtcatttcaatgcaactttttaaacctaactcccctccctttttctctttaattatgatcagtggcttcatttgagcttacctaggatgcatttgagactataaagctgctttcttaaaacttagcaatgttggctgagacaaaccaactgtagaatctcatgctttcataaagaaggttgcaagacattcattcacagttgctcctttattgtgtgtgatgagccattggcatcaaacctgcttgggttgctatcagtttttcttttgagagctggtgacttgcaatttaaaacacacatgggctcaagggtattggagggacatggcagaaagtccttctgctgcctagtgattgagagtgatggggtcctaactctgtgtgaggatagctctttgacacagctcacctcagtcccctttacctaggtttaagttgttagcattttgctgtatttgctccatctctttttttccctgaagtattcagaagtgaattacagacatcatgacgtttagttcctaaatacttcagcccaaacctctaaaaaacaagaacatatttctatataactgtagtactgttctcacaaaattaagactaattgcctaatggactctattacctgatccattatctgaacttccccagctgaccttaaaatgccttttacagctggactgtttaaaccaggattcaattgagaattctgtattgcatttaatcggtgggtctattaagactctcttaacctagaatagtgataaaagctttttactcttggtctctttgcaaactggggacccccagccagcaacaccccacctgggtctcactctaccatgctggggtgccctagctcacctgtgttatagcttgtacctgtgttcagtggttyccgagttcttgcatggcacccaagaagaatgaggatatgctggacattgagggtgaggagggcagagtagaattttactgagcaatggaatagctctcggtggagaggggctgcagtcaggtgcttctctccttcccgtgtggctgggcccagggctttttatgggctcagaataggggaggggcaggctgcaggtagtattggaaaaggcaacatttgattcattaaaaggcattgttcagaaagaatcaatcaggaaagggtgggcagacaggaayagaagttctcgctctggttcgtgggtttcatccgggaccagcagtccagtctttcagccttcaggctgtttttggctcgaaggtggggtttcaccggggacccgcccctatctgcccaggcgtttggctgcttcctatcactatcaatagtccctccccttcaatgacttgtaggaaggttgtttcgcttaccacattccatcgtgtcctggtggcatcatcaatgaatgaacatgttcttttccccatgtttcttgtacgtactgtgtattagaagttggactaaaggcttgatcaaatttgaggcaggaatgggtgaggctacgtgcgrctggagggacacaatgactggttctgtcataatcagtgattgaaattgatccctgggtaaatgtgggggcagtctcatccctccactatcaaaaattaacattttttttccccaggtgaccagcaagtaacgaggggaggggctgttttggtactgtatacctgcaaattttaaatattgatttactttacttccaaaggattggaaattttgtttttttctttctttgcccttctttgaaaacattgtacaaagtaaatctccttattttactaatggagaagcttctgaaagaggctgaacatacattgaagtacctttgctcagctgtaagcccttctggatcagaggtcagaccaaagtttgcagacagttggtccctgtggaccagactgaatccacacatgagtttatttggcctgtggagcactgaaacaaaaaaatgcaaatcctgagccaacgtttgggagatcccatattataatacaaatcgagatttccaggtttctggaaggtcttggcaatctagccacactgggcctgcatctgtgcaaggctgcatggctagaggtgtgtgctgggcacacccattaggtgggactgcgcctttctggccactagggaccrtacacctcctgttgttttcatgggggctggtttcccttgctgacacgtggccatgaggtccctcgaggtacaggccggcatttggacttgtcctctgcactgtttctttgttagcatttagaactgacttctcctcttcctcccccattgaggagcagcaccttactctgtgcagagtctgtctgtgatctgcaggctctttgcagagctacatttctctytggaggccttgctgagcagcctccgctgtctagggcattgctgagaatcacaacatcaacactaatggcccttgggccaaaaagtgtttgtcttaaaatccctgcaccaaatagcttgtgcaattactcctgtgagagccccagaggatctaactcttaggctgtttgttctagctgtattccttcccaccccccaaaccgaaatgacattaaaggatagtaactccctcccgcaaatatagataaaaacctctttactccctaacaaccacacaactatttacatttttgtgtttacctcctagtctttaagtatatgaatgcatgcaacgtcctttaaaaatatgtcaatcctagcctccacaccacccagccgaccaggtttcccagagggaagcattggaaatggcagatgggtaaatgcacagagctggcaaatctccatcctgcgggaggcttgctgtgcaatatagccatcgccacaataatggatcttcctaatgatccggaatcactgagcaaagactgtgccatgttcagtatacactaagtgagcatgcagggaatatatgatcagtttacaaacatttccacataagcttttttctctctcccactccagttttggtaaataaaagagcaaactagactgctttctttctctctctcactctccccctgtctccctccctcttcctctctgtccctgtccctctctcctgcctccctcattcactctgtcgtcctstctctctcctcctcctccttccttccttgcttcatttcccccctcatctctttcttcctcaccctttttaaaaagagacaggagtcttgctctgttgcacaggttagagtgcaggggtgcaatcatagctcactgtaacctcaaactcctgagctcaagcagtcctcctgcctcagcctccccagtagctgggagtacaggcacactaccatgcccagctaatttttaaaaatytttatagaggtgttgtcttgctgtgttgcccaggtgggtctcaaactcctgacctcaagtgaccctcccgccttggcctctcaaagtgctggaattacaggtgcaaaccactgtgtccagccagacaggtcacttytctgtaccattccctgatgttgtgagattagtgagagtccctactgtggaaccttgttcacgttgccctgactcctgatgcatggatatttgctgttaccaaagacacctctgctttaccaaatgttttgacagagtggaaggaaaactacaagacttcttgccctcgttttcttcagtctagaatgatgctggggtcactgagtctgtagggcagagaatctgatgtgttttttaggaagcggaaggtgtctgacacatagatgtttgacaaattttgttaatctggtcagagtgcagcctagaaaattaaattaaaaagctgctgaggagtgctggggtcgcattttgacatagatacaaaggcaccaatagggccaaaagtatgaggccagtcctagggctggtgaagtttggatcccctgcctgacattgtgtcctgagcccctggccccttcctgcacctctccctgagccgccggcccctcctcattccttcctctcctttatcttccgctgtctttgcctgtgcccccacgcccgtgccctgaatctggagtctttgtcttagtgcattctgtttgtctcactgtcttcctctgttttccttttcttgcggggaggaagggtagaaagagtgtaagaagctcaagtatgaggaagggaaggttgccaacttgagatgagtcagaaatgaaagcagttctgaatgtgtaagacaatgaggaaaatatttatttaacaaaaattgaactaccaaccaagccttcaggaacacagccagaaggtgctgtgtagggagaggtgtgcattaggatgctggagcgtggctgccggcrtccccaccccaggaggaagggactcgtttctctgaaccttkttaatggttctccccattgtagacaggactggctctccaccccatcctcagtgggtgcagctttggggaggccgtgaggctggtgatcttggggcctcctatgcatctgtgttattgaaggtaacaatgtcccttctacccaaaagtcatgcttttaaaaacgcacaatcttgaatccatttgggaaacatctttggaactccagaatgttgtctttctcagatatgtattgccaatgttgtattacttcatttgctaagaaacattgtcatcgactttataaaattattgaataattctatttgggggagaagcctggaagctaagattttaaaggttatttataagttaagtgaactggcaaattcttaaatggtaaataaaacctttcctacatgctataggtagttatctaaatcagggcctaacaagcttttttatttattttcctgtaaaaagccagataytaagtagttgaggctttgcaggactgatggtctctgacatagcactaaagcagccttgggcaatacataaacaaaggggcatgtgtgtgagctgatggtccacgggctgcagtctgccaacctctgatgttataagccattgattttctacaacatatatatttagaactgggagtgtcagtgttattttgtcatggtttccagattaaactctttcatattgctgctggtcggtcaatgacagactaattctgctagcattgactttctgggccagggaatggggttcctagatagtgcagtagctttttatttattttcttttccattcaagggtaacatgcttaaaatacagcgtatgaagcttttggatatccactgtaaattttaaggtctaaaaatgaatgcaattgtgaaatgtttttgccttagagaaaacgctctcactgctttgtgttataaatgcatgaaaaataatgatgaattaaatgcatacaaacagatgcagacataatttagatgagtgtattgcaattaaaatattgcccactttcgctacggaatattcgttggacttatgaccttagtgtaagtaatgtttaataaggaatctgcaatgtgtaactcctccgtaaattattaaaaggattggcattcctactgtataatatcaacacaagggatagaaaatatgcctggattcttaatgaatgtgtgctaacgttccttctggcataggaatgtgtagtaaatacacttcaagggttgttcgcatttttatccgtcattgttataggcatgttattgtgtgtctcctattgaagaactgattgatcattgttttaagcttctgtgacttttagatgcttaaaactaggcgttcatggtaggaaagtagagaaacatgtggaagaaatactgcgtttcaagtttgggagtggctggtagaaaaatcaaactaggctagtcttayagctttatcgcagttttgttttttttcctagtaggaaaatgatagtattggttgtatattaaaacactctctctgacactgacttgaatcacgtgcgagttcattgagaacagggattttaacttggttaggtgattttaaacattatttagcaaatctggaaaacaaaagagaaattttcaaatatctttcttccacggtggtgtactggctctctggagtgtgatttcatcttctcttattattgcatatgtagtcaagccatcatgttcttgaagtgagacttcamccactagtggggccgtataattcaggatcttttgtttgtccttacrtagtttcttggcctggaatgtcaaaatatcagaaactgttctttctctggaatcatctgtctccgtgatggcctcgccatctgtacagtcatccaagctagggaccaaagagtcgtcctttactctctcatccttccggctgctgtgtctggctttcagtgtttgtgtagagcaggggtctccaactcctgtggcgtgttaggaagtgggccgcacagcaggaggtgagccatgggtaggcgggcaaaacttcctctatttacagctgctccccatcattcgcattgctgcctgagctccgctgcctctcggatcagccaccagcattagattctcataggaccatgaaccctattgtggaactttgcatgtgagggatctaggttgcacactccttatgagaatctaacgcctgatgatccgtcactgtcccccatcacccctagatgggaccatctagttgcaggaaaacaagctcggggctcctactgattctatattatgaagagttgtataattatttcatcatctattacaatgtaataataatagaaataaagtgcaccataaatgtaatgcccttgaatcatctccaaaccatccaccccactcctccaacccccaaaccagcctggagaaaaattgtcttccacaaaaccagtccctggtgccaaaaaagttggggaccgttggtgtagaggactcctcaagcagcgtccatatctgccctattctctctattcctccacctaggtatagaattctatctctaagacacagacagaccatgttcctgcctgggcaaacacttcggtgactgtgcattgccctgggtgaacgggggyacagaggtctttgtgacgccctgcaacgcatccctctccgagccgcggtgcgctcttcctcctctgtgccttgccggtgcccagaaccacccccttctccctctttgcacaagtgccttgctctctcctttctcaggccagtgctgctgatctgtctgtgtgacccgggtgcacagtccttggctctgtgcctggccctgtgcaggtctctgtggtggcacttagmacatggcgctaagattctccctgataggccttcagcgccgcaagggccagcaccgagtcctgcacatcctgctctagtcccacatcggcccaggggcgttgagctgaggacrgctccctaccccstttctgtgcttggccgactccagcgcccgttcttctgcccctccttggctctgcctccccaccccttggctgaatctctcctcctttcgtgcttgttctccaggtgacttattcaggtccatattttcattacccttgcatttcattaattttctcatttattttattctgtaggtttaggacattctttaaaacatgcaggttctgaattttaataatataaaagtcctctgtgagtgcccatcacattgcttttctgtcctccctacattaaagttagcactgatgcctttatgtttaaggaaagcctcctgcagaggggctctgcccatgtaagttcattrgaaggcaggtgtacagcctctgtcacctgaagacctcttaactgtctattccttctctggtctatcgaggtgtattgggggggttacagcaccctctggtggccatattgtcaggtgcatttttgttctagccaaataaaatgataacacaaatcgaatagtcgattggagttctttytcagaggacatcrttaattcacattttgtgtgtttcagcaggtatttaagccattctcgaatagtgacacttatgcagaggagagaatgattttatttaagtaatttctactttttacatagctagttttaaagtagataatacatagtcttaaactttatttcccctttatttctttcttttctgttagagaatttcttaaacttgtagaattatccaaataaaatgccagtcactaaaaaggaataattaaccaatagtgggaaaaaattaaattcttcaaatgaagagtactgtattcatttcatatggtcccagagataaaatgtttaggattcatttttagttttaaatgtttatgaatcagagcttcaacactcttccaggtttctttaagaaaggaatttgtctatctacggattaattaattagcagagcctctctgtgtcaccaagactggagtgcagtggtgcggctgtagctcactacagccttgaactcttgggctcaggcaaccttcccacgttagactcccaaatagctagaccatggtgcatgcaaccatgcccagctaattttttttttcaatttttctgtagatacagggatctcgctatattgcccaggctggtcttgaactcctgaaggcctcaagcgatcctcctgtcgtggcctaagaaaggaattcctcatatagaaaaatattgttatataaatagttgcctatatccatgctgtttatggtaacagctaaggttcatctcaaaagtatttgtatttggctttggaataaaaagaaatttcccctttcatagggttctgagattgtaggagtttttagtatttcaaaaagttaatggaacaatctgtgatgtgaaagagactcagaagaggctagagaggtctttaacacattttttttttgtattgttatcccttccctatagctaactttgtagatgacattgtttttcagactgatgattgtgaccctcaaccatggcagcaacaatttttaatttaaattttttaaaatgcaaggttgggtgattttctctctggatgcttgagttttgtttttgataaaaattctaccaggggcaggggaaagagtccattaagtcttggtgcaagaaacctgggcagattgcctaagtggatatgcatagcaaagaactgaaaacagagtagggggtgctgaaaacacccacagaggaaaatgcggggcggggggtgaatgcatctgctcattttgtaataaagtccttcctttcctttaacatctcttaatgttacaaataccaacaaaaaccatgcatgtcttcagtgggacagaaaatgagggaggcatttagggagaaaaaagtgtcagttgagatgatgttaaaataaagtttattttctttgcagttgcagacattaagatttattctctgggctgttaggacagttcctgcagctctctgtggtgacctgagcattgataccttttttttttttttttttttttgagatggaatcttcctctgtctcccaggctggagtgcagaggcgcaacctcagttcactgcaacctcagcctcccaggtagctgggactacaggcacctgccaccacacccagctaatttttgtatttttagtagagatggagtttcaccatgttgcccagagtggtctcaaactcctgtcctcaagtgatctacccaccttggcctcccaaagtgctgggattacaggcgtgagccactgcgcctggcctgtgccttggtttctcagatatttctgcccctgtagtgttctatgcactatgcagggaggtcctgactgctcagagcttaaattctgcattcctttattttaagtgtttggccaactgcagaggaaggtaccttgaaagatactccctctyctccctcactgctgggtcccctgtcataggagacctggcctgaggaggcttcttcctggtaacctgggttgtcactgggaccacatcttcccataagaataatgcttcaggttgtatgggagaagygtctgacagcagtaacttcagcacaccctgagaatggcccttatggcagacacaccggacagcagtcactgaagaaatgagggttgccacatggaggttgctgggaggagggtgctaagtgaaggtgctgtataagctgcatgctttttacaagcagttgaagttctgctgtccagcccagagccactgggccaccctataaataagttcctccaaataaaccctgtgccttgtttgttagctctgggtctcttctttggcttcttcaacttggtgctgtccctgttgaagttaatacgggtttggcacaacacaggagtagacggttacctgtaccctgccagctgtccttgctacaaacatttgcccagagagtggcatttgtgccggttcttaaagtgtttcttgagctgcacattaataggccatgtcctctttcaacctgccctctggctaggtagaacaaacactcttcacctgggctctgagccagctgctcacctgcagcacccccctccttggagatagcttttcatgttgcatcttaccgagttgattgagtattcacttcgaagctccatgctgcacgcatgggcctgtaaatagctttttcgtgcacttgtgggtgtcatttcagatcgcttcatcggatttcagttacccaagtttttacttggttcaccgtaagtttgcaaaaaagactttttgttatcctgaacattgcaggtggaaacatgattaattttgaattatttttgtttaacttctaccctctttcctatttacagcctattttgtttattttaacttccgctgttaagacttctaaggccaggcatggtggctcaygcctgtaatcccagcactttgggaggccaaggcgggcggatcatgaggtcaggagatcaaggccatcctggctaacatggtgaaacccygtctctactaaaaatagagaaaattagccaggcgtggtggcgggtgcctgtagtcccagctactcaggaggctgaggcaggagaatggcgagaacctgggaggtggaggttgcagtgacccgagatcgcgccccattacttaaaggaagtgggcttgtgttttgtggccttaaggatgtaatctgttggtaggagggaatgagggtgtcctggtaggggtgtctggctttagtgtcaccattcttttaggaattgccatgttgtggggtcacgtcttgtaggagaaacgttctgaagtcatgggattctctaccctcctctcctgctcttggtttccaccagcagcctgcttggtgtggttttgaaatggagcagagatggttttgatgagcctcactggaggtgctgctgagattaccgagaggccttgctgggcacctggagtcaatcatgccgggcactagcatccgtcatcttaggaggtagggattattatcctacctcctaagccatccctggagtggtggcttggagaagttttccagagaaaccgatcagttcataaagtttctgtaaaggattaacacagtgtagtccagaaatgtttgttcatgaagtcttggtttttgggtttaagaaagtgttctcctgtctgggcgtggtggctcacgcttgtaatcccagcactttgggaggctgaggtaggcggatcacgtggtcaggagatcgagaccatcctggctaacacggtgaaaccccgtctctactaaaaatacaaaaaattagctgggcatggcggcgggcgcctgtagtcccagctacttgggaggctgaagcaggagaatggcgtgaacgcaggaggtggagcttgcagggagccgagatggcaccactgcactccagcctgggcgacagagcgagactccatctcaaaaaaaraaaagaaaagaaaagaaagtgttctcctaagtgctgctcaccctttttcccaaacaggacctaaccctgcgagggagggtgaattaggccatttgtttacagtttcatcagcaccaggcgtgcacggcgttagtcatggtccttgctctcaaggcactgtacttgtagcagcagtatggtgcaaatgtgcagctgaacagtggrcacaggttcctggttagcatttagtgccacaggaatgacagggaggtcttaattgtgatcggaccgtgggagctggattaccccagactgtagctcacttccctgtaagcttttggtagggagcttggaattagcaccattagtagaaacagatttcaaagggaatggtacctgttccgtatgaaacactttaaaactcccggtgtccacacgtctttaaaaaagaggcttaaagcagtttcatttcatcaaccccaaactggagaagctatgaatgaccacactgatgaatatgtcctaaaatatatgtatattatataaagtgtaaaaacagacaagcaggaacatactaccagtttctatcacagctacccttaaactatcattggagggcaattaagtgggtacaacctctagctatttggaaatatgtataaaaatgacaaatgcctggttgggtgctgtggctcacgcctgtaatcccaacactttgggaggcctaggcgggtggatcacctgaggtcaggagttcgagaccagcctggccaacatagtgaaaccccatctctactaaaaatacaaaattagccgggtgtggtggtgcatgcctgtaatcccagctactcgggaggctgaggcaggagaaccgcttgaacccaggaggcagaggttgcagtgagccaagatcgcgccattgcactccaggctgggcaaaaagagcaaaactctgtctcaaaaaaaaaaaattaaaattaaaattaaaaagtaaaataaaatgatgaatgcctgtactcttagacccagcactcccagttctgccagttcatgcagcagatacatatgcacacgtacagagaaggatgcaacagatacatatgcacacgcatacagagaaggatacgtatgcacacgcgcacagagaaggatacatatgcacacgcacacagagaaggatacrtatgcacacgggaacagagaaggatgcacaagaacatacattccctagttgacggagtcgcagattagaaacaacagaaaagcgtccattaaacaacagtttgaacctgtgttgagatatcagcatcccttctccttctctcccccactccctctgccctctgcaggttttattctcagcctgattttctccattggatgtcagccctaggctggcatttgcagagagagatggtggctcctgcagagcttacggcctgtattttattgggctgtgttgagttacccctgatgtgagcaggagaatgggatgttctgtaaattggcctctagcccatcgtgaattcatattttttttataatgtgtgagtcacactcccttctgtcttcatttccttttcacactcccagcagatcattctctctattctgattggcattttatacatgaggcagcagaggctgagacctactgtattttgagacactgtagctttatatggcataattaaatcatagtcatcaatcactcttaggaggtaaggattattattggcattttccagatgagaaaaatggaggatgagaaaggttaggcatcttgctgaagtcacagcagacttaagtgccggagttggagctgcattccggtatgcttgcatagactctcttctcatgctcactgcacgccagtcacctggtatgctgaggccctgcctccaggccttctgattcagctggtctgcagccctggcatttccagctcctcaggtgattggaatgaaagccagagctgggagccactggtctacaccaccagtaaatgatcgggttctcacttgatcatttaattaagaatcttggttttctgctttcagtctgagaactcttgttcatgctctcaggcatgtcttcacgcaggaaagtgatctttgaaattaataggtgcttggaaagcctttaagcagcaggcagtggagaaggccactcagtaggaagggccgagcatgaagcctagtgcacaggcttttcaagaccccacggagggtcttcagaaaaatgggtttcctttgtctccgtggcttccagtctttgttggccagcagttgtctgcttcaaatgagctggctctagaggggcctggagaacccagaaaaactttgtgacaacctgacaagtttgtgttaatcttctgggcattggctttctgcacttattgctcactgaatcactgaaccaggcaggtggggtactggagggcaggggatgggtaagaagggcagcctttggaaggaaaatcagcagagggcagggaccggggaagaaggagtaagaagggaaacccttttcttaggttcttataaatcagaagagcaatraagaaaaaatttaaatctaaaaaatacatgattaggatttaaatccagtatgcttcactacatataaacctttgacttaatattttctgtagtagatgaaaataggactttttttgtttcccttctcttcacatggtattgagtttttttgtgttctgaatacgtgttaagattaattatgaaaatcaaattaccagatacttgaaatataaaattagtaatattcaaagacgattaaatgcacgatttccttttctcataaaaaaagaagcagacggaacttgtattctgaaagcaaatatggaaatcacattaaamatcagaaaatcctcaccaccgccccccacccccatgtgcatttcatttctctttggtctgagttcaagggagagagaatatgaatgtgctgctagctcaggaagcttcagttctaactttctaaagagctgggaatgtgcttgagtctctgttatctcttgtttgcatttttcgctactttgcctccatttgatccagggaaaacttcatggtagggatgtgagatgtattttgagggctaaaagaaaggagtttgaacaaaagcaggacagtgttccgaatgtggaagcaaagagtccttccaaggggatgtgcggccaacgcctctgttcagcgatagtccagctgagaccaggacctgtgcctgatgcccaggccaccccacaggacggtcctccagcacctcatttctcctttcatcagacacctcttcactggcctactgggagaaaacggagatgagtgaaaatgtgcatacagaacatagggctcaaagggaccctagcaccagtggtgctcaagcctgtcccagcattagcgtcacctgggagctccaaaaacatattgttgccaagactcagtccaaagcaagtgacttccttggcctggagtgagatgtgggtggccagggtcaggaaccaccgagtgggtccacctctgcagactgggaaacagagtctgggaggctgcttgttccctcaaggacctgaagtgacatggggaggcaggactagccttggggctcctaattctgtcctggcctgtattccagtgtgccgtggggcacgtccaatttgaatctggccccagtacactctcaagccctgtgttgctctggtcccacagcttctgcccttgactttccatataacagcacattggtggccagggctttgcactaacctacctgcctccaacattgtttttgaataatggaagctaagcagatgcatattaatgcctgcattatggagaagactgtctcttcacaagtaatctgtagttgttagtcttgaaagtgggttaattcattgtctttctagagaaaatgattgcatggcctaatagtcttccagttagtctgtgtggcaaggtagaagccaggagtggattcttagctcctgttgagtgctsctgtcctgaatcagagatcttctctcccgggccactttgtcatgagcaggattttgaaccaagaccttttcttcacctgtctcgggggccctcaccgtgggctttgtgatcccctgacagctccaaaagcctttatcctcatccaatatctggtgaacagctgacacctcctgggaatctttaaaattgttctctaaagaaaccattctgctgcaagtacctatttttagactttataaagcccacgtcaggttgtcgctgcctttctctctgtctgctaagcctgctgtttgaaaggcagcaacaggatcttttgtctttaaaagttcagccccagctggtgcattccccacttgaactccatagccctggtgtgctctggggtacgtctcttccaaaacccaaaccacaggcagtgacctttacaccccaggagttgaaataatacacctggaggaagaaaataacttacaaacaatgagcctagagtataaatggctatgttttaaaaccctcgattttccttgggcgtatttaacctgtacagctagactgttgtgagttttgggctctctagggggctgtccaagttcagaacaagtgcatctgctggcagccagcttaaggagttagcagccctcaattccaataacgaacgtgtaaatcagaattcaggtgtgttgaagtggggccttgcacacatcctggtcagcccagggtgatttcctctctggccagtggttttggsttttttcttcacatgaactcgtctgttgtaactaatggtcactgagtgacttcagaggtagtgatagctcatagtgaagcccgtgacccacagcggtgggcacacctcgatcccttctccttttcctccatccccacctttctctccttacttcatcccttcctctttccacattgggtcatccagcagaagtcaagtatcttctatttcatatctttattgaataagagttttacgatccatgttattgaagtaggtaaatggaatctcttatgtggaattctctaaaaaagaatcaaaactccagtcaaaccaaaccaagtattccaaatcgtttttagggaaaaaagatataattagaaaagactggagagggtatgcaaactattaacattatgttagggtggtaggagtataagttatatttgctttttctgaatttctaaattttcttcaattaacatattgttcaaagtatcaaatacatagaaggaagagtgtgcatgcctgttatctagcaaacacacttcatgcaaagaaactctcctaaggaagtatgaagttatattttatccttatctatccaaagagagtgtgtgtgtgtcatatacctaaagaattagttattaagatgaagcattgcttataatgaaaaagttgaagcaccctaaattagcttaataatggtatatctttataatggaatagtataaagccattagaaatgatgttacagataagtatttaatgttatggaaacattttataacatagaatgaaaagtaaattgtagattggtttgtataatttgatctcatcttaggaaacacataatacagaaatatagatgaaggtctgaagggtattaatgccctaatgtattagtagcattacctcagagaagcaggctcatgagtgtttattttcttttcttctaactaagtatgtatatgtgtaagtgtgtctgtatacaggagatgtacatacacttttcttgtgaagaatctgtattgcatttactactggaagggtttattttagatttagatattaaagttacctctttgagtgagaacctatgatttatacttcttagcttaccttttacctccattatttaaatctgtctttttctgccatcaaatagaagatgtaacagtgataaaaaggctgggtatggtggcttacacctaaaatcccagcactttaggaggccaggggttcgagaccatcctgaacatagcgagtgacgtagtgagaccccatacctacagatttttaaaaggttagccagacgtggtggtgtgtgcctgtagccccagctactcaggaagctgaggtgggaggattgcttgagcccaggaggtcaaggctgcagtgagtcatgaatacaccactgcccttcattcagcctgggtggcagagtgagactctgtctctaaaagtataatattttaagaaagaaaaaacaaaaactagtgataaaaagaacttacaacaaactgatttttaagtggactgttgataattataagggctgagatttttaattgccatttgtatcaatgaataacccccctgtcaccacattttctggtgtgtttggtgtgtctggttcctataggagagacagtaatgctatttgacatgctttattgctgattagaagcctaatctctgtaatgggaagctcagtaatgaagcttgttcagaattgtgttacagtcggttaatgaagctctgagatcaagggcctggcttttgatggcccctatttcagaatccagaggtttgtttctatttatttgggttttgcaggtaagttccctggactgaggtgatctgaaggttagctctgctataataggtaaattgctaagaaaaacattggccttggtatgtacaacttaaaattttattggtgagatagtcttcttacaaaacaatcacgttaagctagaacttggtgtataaccagcatatatactcctgccaccctcagtgtgtagccaaagttctaaattgcatgcacagataacaggcatataattggtgatttcagaaaagttatacctggtgggcagtgagaggcgagccctgatctgggaaaccccagtgcttcaaggggaagcaatctgggaaactccaatgctgggattgggattcaatctgggaaaccccattgctgacaaggtacatggtacaagcttgataaaaacttgcttaatgtcacacttgtaatcccaacactttgggaggctgaggcagctggattacttgagttcaggagtttgagaccagtctgggtaacacggtgaaactccatctctacaaaaaatacaaaaattagcctggtgtggtggcatgcacctgtagtcccagctgctcgggaggctgaggtgggagaatagcttgaatacaagagttggaggttgcagtgagctgagattgcaccattgcactccagcctgagctacagaaaataataataatttaaaaaaacttaatgatgatagcatttgagttggcttttcaatcctggtttcctaaatatgtgagcctggaccattaaactgtgtgacaaggagctgtcatcttaacatacagacattaaatgcattgttcaagatcagaaatgatttcttggttctgaggcactattgactgtgtgtaaggtgccatcgttaatttggtaacaaggggagacagtggcagggaagttccttttgcctgtcttgtgataggcttcctattttctcaaaggttaagatattaaattgtcttaagcaaagaaggtatttaagggcatcatcagggttagttctcaggtctcctgactcctagcttctctagtttagtgattcacgttagcctttcaacagtttaccactcactttaatggtttttcctagctgtcttgacatgcttttcactgcttacatggttagtttcctacctagctgaatgcaggcatctgtgctgtctgctgggttcgctggtggtgatgcagcccacaggtacctgtctctttgaggggagttcagcaaccatctatttatgtcgaaaggcactgtactgggagatgaagaacacggagttctaggcctccaggaatttatcatcacttgctaatttgagctgagcctggcacttgaacataggccatagatttccagatgtgaaaaaaagaaagaaagaaagaaaaggatcctttaatgtatagacttgtctttctgcctgctttcttcacttctgatcattttaaacaattgatatcctagtttgatgtgatcatgttccaacacagcacaacagcatgtatggtttggggcatgcacctgtggcagttgcaaaggtttttacagtgaagtggctaagaggagagtaagaccagtgtatagggtgtggatgaggtcagatgcgagactatttcttgatttgagtcattttatttaggagctatttctttggaatactttatatatgagaatgtacatctgattggaagacagaaggtactgaaatttacctcttgatcaaattattctggtataaaattaaactaaataccaatcatatacttaatttcacagacttgcaaataatatactggggtaatggaagtaagagacaggaccttttatgtggtatgaagttctgtgataattcctatcttcctttgtacctaaaagaggcaccctctcctgtcatactgcaaacagatgccactactacgtgtagacacatttgccagctgtggcacagctggtcacccagccctcatcacagctgcctgtaaaacccagatttattctcttccccctgatcttttttagaaattactggtatcgttttagagagtatccaacttacacacaccacttaaataatgaattttccaatttcttctttttccacggccttcacgtcatctggtaaatattcccctcaggttggcatctgcttctgagaccctgctggacctagatatattcaccagagatgggtgaaggctttggaagagtgaagtggttaggaacatttcttccgatatctcctgctcattgtttttgacctctctgatttccagtatattctctgctccagccacacagctttcctgaacagctaagtcttgctcaccggtcagggaccagctcaaaggctgtccctttttaaatttatttcctgggtcttctcctggcctcttccctgcactcggtggagatgcctgccccatggttttcagtagcgttggctcttagctgttccgttctggggaaggattggttgttttccttttctccatgtgtgttgtgaatttcattctgtgtcaccgcatcacgcgaggtgggtagggaagagaacttttacgctccccgctgtcgttagtggcctgattacgagtctgtgggaaagaatgaaggttggaaagaagatctggtgggaaagaacaagggttgtccttgagcagccaaactaagctgtgagaatgttaatgtaataaagcaggaattctaatgggctgcctgctacagaggagatgggagatggtgtagggctcatgactgtaaaagcaggagccaccagcagatggtgatgcggcctcttggcccaggtgggactctgcatctccccctcccatggacattcacttgataagtgttgggccggtcacccatgccctggtcgttcttatcttatcgaagagtgctaatataagtaagctgtaaattcccattgtaagaaataattgccttttaaaagggagcattcaagaaaaagaccttttggctcaataaagcctttattttcctcaacactcttggctcttaaaaggggcctgttcttggccttgaagtgggaatttacacagaactttaaacagaagaaaccccctctgccttgggctgcaacttgttgtccctggcagggtttgggctgtggggtcatgggatctgtttgtttgaccrttgtatgcaaaaatgattttaaaattggcctccctaatctgttggagacattagttaaaaaaaaaatgagagtaaagaggaaaatattttgctattgggtatgcactggatccatttttaaactgagagaaggtgaaaggggtgactggttgatttcggataatacttttagagccacggggaactgtgaaagacaagaaaatgtaaaaaaagcacattgattgcaggaccggtggtccaaaagcagcacgtgaaagaggtttcaaggctgtttctacaaacaagaatgccaaaggtggcataggacaagaagcttgctggatgtcacgaagctagtggagatgggatccaaagctagttttggctgatgaaaatacaggctcatgccctgtatgtgaggacagtgggacagtaatttaaacagaagtatctagaggagtttccttattgccttgaatgtatttctttttaacattgctatggacatttaggaaaagatgccactgatattccaaaaggggcattccatacacctgagagggatccctgaggctccagggtcacctgggccaagccaggtatacacacgtctcatggcaagttggctgttatcataacttccctggtgttgttttgttgcaagggcagcattgtggggctgtggtttgaattgcttttttgtgtctcttgaatacacgaagttcctcctrtagtcattggctctgctgcctctgatgaggcacttccgtgttccccacatttgaatttgctcccgattygagagaggcaggcatccgcggcagcagcttccaacccagacaggcttaagccgcgcgagggtgcccgggtgggtggctgcgcavggccctacctgggcgggagcggctgcagagccctgtccacgcggtgcctccccagcacggcacctcccactccaggctgttggttacctggccgggagctggcrgagaccaggatttctcctcgccgccgttgctgttgttaggggaaacagaccatctgcatctagacctgcctctctctccgctccccacttcagacgagctcttcctgcctggaatctggtaagtgccaccgaaggttccgttccctttattactcgattagtgcccacagcatcaggagaaggttctcttaccgtgaatccattagctttaacccaaatgtgcaggattagggggattatttgaacttgcttgctttctttttaaaatgtccattagacattttttgcatgcttcaaaatcaaaaggcggcrcagtgaaaacattttaattatttatgtatttaacctgtatcatcttgtttctaacctcttttcttcagggtggtgcagtcaaaaattacacagatattgctctggtgcctctccccccttttatgaataaattactgcatttgtcatcactgtgttcctgaaatgtcaaaaatagacactgtaaaggaatctgtcatgcagagttcagaaattttcaaatttctgagttcaaaacctcaggtgaagcgaggacagatcttttatttaaaatttgattctttgtaggcttcactgtgaaataagttcaatttagagcatagctaatgcaatcagccagctcgtgatgggacaacatacttctctattgttttacattcacctcctgggatacacacactttctcatttgttttataacctttacaggaaatacctggggatgagtcacatgacccctaacttgagtttttacatgtattcacccagattaaatgattttgctcttatatggataaacgtgcagttaggaactttaaaaaattgtaaatgaggtgcataatcattactcattgtcttttactgcattcttcagccctcaaacatacaaactgttattccctttaagagaaaataaaactggcacttatgttttcctttactctaagttaaagactacccatgttatgtgccattaaaaaagatgtagaaattaatctgtctttttctttgacctaatcttactagcagggatattggggctctacttttctgttctctctctctctttttttttttttttttttttttttttaacatcagccacaggtaatactctccggtaaacatataacttgaggaaaattgaattaggttaatgctggaatagaaaaccagggcagtgcctgctctttttggataattctgtataaacaatgagaaagtctcaggctgccttagacaaaggctgagacgggagctcctgatgatttttatgagggggaagaggagatggtgaggaggagggcaccgagcatgtgcagcaacttgaagcatgtcagaaagaacatttgccagaaatcttcaaaaccgtggcggtcggtaatgtgtgaaattgaacttctgaccctgtttgcttgatggcgacttctcgttgtgcttgagaattgtgtggcattgggtccctggatgtgggaggaacagcaaagtggtttagtgaatagagagggaagtgccttcctttttgggtgggacttgccatgatagagcctgggccgtcaccttaaaaggagatgtttctgttgagagatggaaaattggcaagacaaacgccataaaccttaacctgtttataattccttacctgtaagctgctttgcacgcaaggtgatggttctacctcataagggacaaggaagaacagcacataaacctgactgaatggagtgtggctgtgggtgggagcagctttacaagaaggaaacggggccccctcctgagacacccccgtttgcttctgctccttccttgccattgacgtgcccttctcctgaaactacccacacctgtgtttggcaacaagcggctgccccttgatccagatgcatttttcaacttgcgaactctcacctcttgccaagggacccaagtacctggttaatgatctttaatgtaaatgatcctttgccttgattaacattgagctgggttagtatgcacaggccgagctccgtggtcctcccatgtgatcccttccctgccagccacctgcccacctgtaggaactgggcatggccagttttctctttatgtgctctctttgccttggatggaatttgggctgagaccgatgaggtggaaccaaagctgttcagcagaagagagcaaccacagagcagcctgttgggtggagggcttgagggttcctaaaatccgaggactttctggtgagcctctcccctgagcctgcttgagggaaggcgctgccccacacactctccagtgggtgggggtgggggtggcagcggctgatcaaaggttctcacctgcaagtgataatagcctgggtctctttggcaccracctgccttcttcacctttctgctcagacaccccttggcacccctacataaaggaaagagctgtctggatggcctagtaactgtaggataggtaaagttagccctttcttctgacctagatatgtgatggtggtatttctacatgtttatgtcgagaactttacaaagatgaaagaaaagctttcagagctgcagaaatgagaggtggcccttttttaaaatttattttaagaaacaacttttaaaaccactttttgaaaaattggatggcaccgtcctgcagcctatcagatttcccttgagaactggggattattggcttattccttgctacctccaatcccaaattaagcagagtgacatgtaagaagctgggkacatcagcctaaagcgtttatcaggtatgtccttcccaactggatcttttctactccctggcccgaattttgttttagggaatggggcctattttaattgctggtggcaaaaggatccctgggcagtgtttccatggtcctctaaggtggagtgtcggggagctgggggacacacagtggtcatgggttatctgtcttggcctctttcccagaccaagttctgtctcatgcttattggtttggctgctagttatagaatctgatgtttaccttagaatcctaggatggaaagggttaagaatgatttctaatttgaattccttgtttctagggagttattaaacctatacattacatttattattttacaaagcactaattcataatagttgacaggaacaactattttttggcttctttgtttttttgtttgtttgtttgagatggagtttcactctgtcacccaggtctggagtgcagtggcgcaatctccgctcacagcaacctctacctcccaggttcaagcaattctcctgcctcagcctcccaagtagctgggattacaggtgctagctaatgtttgtatttttagtagagacggggttttgccatgttggccaggctggtctcgaactcctgacctcaggtgatccgcctgcctcggtctcccaaagtgctgggattacaggcatgagccaccacgtccggccttctttggttttcatattgattatattttctaagacaaatactcatttatatagtctaataaaaattgttaaatctaattaaacaactaataaaaatagttgtttaatccacgttgacatcttcttacattgcgatagaaattttgatatatttatccatatgatgaattgcttaaagccggtggttctcaaccagtggcagttttgccttctctcccacaagggacatttgacactatctggggacatttttcattgtcatattcaagggagtggggtgtgaagctggcaagcatctagtgtgtagaggcctgggtgctgctccactttctacattgcacaggatggcacctgacacacagcctaaagcgtcggtactggttgaccgtatacgaaatgctgtggaagaccaggcacggtggctcacgcttgtaatcccggcactttaggaggctggggcatgaggattgcttgagcccagcagtttgagaccatgtttaagtttaagttcatttaagttctctgaagtggtgattctgatgctatatagatgaaggttggtttgttgaagagctgactctggtatttcatccaacatytgcatttttctttagctaaggatgccttgagaaacattctagtctcttaggcctgaatttgttattagcttaatagctttcctctggttgaatttaaatggaaagaaaattgcatcttgcaacaggaaaaagaacattagggaaaaactgaggaaatggaaataaagtgtggaattttgttaataataaatcaaccttgatgcattaattgtgagacatgtcctgaaccaatgtagatcttaataataggggaaactggcttcagggtacgtggggactctatcttatctttataataattctctaagtctgaaacaaaaaagtttattaaaaaagcacaaacaaaattgctgccattttgttaacagatatagtagtcaatcttactgttttctttttctttgaaataggctgctgcaaaggtatgttctttgttatctcggctctctgctcagggtagccatgaaatggctcttttaaaaatgtgcccagataattttgaaccatttcaaaccatattatgtgattttaatttattttccattgcattcactaactcatttctgggtgatgtatttaaaagactagacagaatttacaggtttaaaaagttacattaacagaaaatgtaggtgccagttgaaatactgtcaactggaagtgctaccagcaatgtgctagctggacaatgggacttgtcccatttttttgctgggtgacagctatcactgcctcagggaggctggtgccatttaatgcctctgataatcagaataagtaattgtggcttctgggtctgtaaagccacaaaatacatatgcaggcctattttaattgacggtaagtcatgaaatacactattttcgtattaagataacgtggatatgttatggaacaaagttaaaaattagcatgaatttttaaagtactactggagattgttggctttaggttcgtgaaccccattcctgcccccacactcctgttagtggggctaccagaggggccagtatgaaaagcactggacttacagatgaaagaacttgagctggaatcaattcgagtcacttaccttcgctacaggtgggcagaggagtcatcctgcaattttgttgtgaaaacagaatgagataatataaaatgtatttgaatacagtgaggtctgtacagatgctgaatctattactttgcagtaggagtcaggtgtggccccacttccccaccttcttacctacttgtatcttagatcttatatatattgatattcacttttggtggactaaggttgtctttgttgcaaacctggactctcttgtawtcttgctcagtgtgtgtatgttaatgttagataaagaagattaggctggtgcattggctcacgcctgtaatcccagcactttgggaggccaaggcgggcagatcacttgaggtcaggagttcgaggccaccctggccaacgtggtgaaaccccatctctactaaaaatacaaaaattagccaggcatggtggtgcctgcctgtaatcccagctacttgggaagctgaggcaggagaattgcttgaacccaggaagcagaggttgcagtgagccgagatcacgccactgtactccagcttgggtgacagagtgtgatcctgtctcaaaaaaaaaaagcagaagattatttggaaagctatttttaaattattcttcaaacatatactaaaatagagaagacaacatgagagccaacagcataatgaaaccccatcactcagcctcaaccgttgttaacagtttactatctttattgctactgaaggcagttaaatatttcttggcagtccttttttatttagcatataccatcagggatgacaatagaaacaggtttcaaagtcaggtgaaataatgtttctctatatgagttcaccactaacttgatacacagtttatgtttatgtttatgttcttattacgttcgtgtattaaggcaacctttcatccctgccccctaataggtaactgtctttatttgttctgggattatccctcctccattgccctttttggaaagagtatggatatatttgtattttctcttactcataaagcagcacatggtacatactgttctgagccctggttttctttttttcacttagcgttgtatactggaactcactcaatgtcagtatacagagaattcccttgtctttttataactctgtgctatacgctgacggaagttcattcagtcagtcccctattgatggacacttgagttattctcagacttgtccattgttttgcaaaaatagccctgggcatatgtcatttggtatttttgtcgaggcattccaataaaaataagtaaattcttcctctcttgccttgaagatgtgcagctcctcagtaaccttttattctctaaagctctgtcctcatctttaatccctgatttaagaggtgcagctcttcaggccataaacctttcttcctgcctcaagtttttaaagctacaaaggaacctaagagatcccttgtgttttacagctaaaggacctgagagcaggaaacaaagggagagccggaagcccaggtctcctgttccctgcctggcaggtgatattctttctgttaaactctctttccctctgcctattattggccaggctgtcctccaggacagtgcttgccaaagtgtggtccatgggcagcagcatccccggagctcatcagcaatgtaagatgtcaggccctgccccagaggggctgagatagaatctaccaattactggattccctgggtgactcatgcagtcaggttggagaagcgctggactggtggctttctccagaggagcatgcaacagcggtttgcaaacagggatgatgcagttccttttcaacacgtggatttgcacttcctcctggtgcgctcctccagcctgcctgtcctgttcacaccagcctccccctggaaggggttcagacttgatcctttgggtggtagggtctttcttggatagcgtagccatccattcctgctgcatacattcaacacagccttcatccttcgccatttgtctctgatacttcatactccttttgtttgacaagtgccctagctttatttattttctcatcattgttgttaagggcctattgtgcttgctagtatacacaccactatgtaagttactagttcaatttatttgttttactgctgctgtgaggtgtgtccatgtgtgcacatctacctgtgttaataactgataatattgggcctcagtacatactttttttttttaagagacaaggttttacttcgtcacccaggctgaaggactgagacacacttgtagctcactgcagccttgagctcctggacccaagtgatcctcccaccttaacctcctgagtagctgggactacaggcacacaccaccacaccaactaatttttttattttttgtagagacggattcttactgtgttgcccaggctggtctagaactcctggcttcaagccatcctaccacctcagccttccaaagtgctgggatgataggtgtaagccgccgcacctggccctcagtgcatacttagatatacttaaataaaaacttaattgcaaattacttcttaaattatccacaaactgacttggcagtaaaagtgactacaagtagtgaaaccactgtcataataaaaataaaataaaagtctttattgttagatttagtatttctaatctcttacatttcagttttggaaggtaaatttttgggaagtggtggtaataatctaagtatgtctagattcagtgatgagagctagtacactgtaggaaagagttgagcataacaatatggaatgttggtaaatgtataggggttttctttttaaagacagctttttatacaaagaaacagatgatctttttttttttttctaaactatgttagctatacccaaattagtaaatgttaaaataaccatgactggtaaaaacattttgcaattttttttttttttactttttatataattaaatgaaattctccattkggtagttgatctctcagacaaattaagtcttgccagactgtctgagaagactagtgaatcagaccctaaaaacttgtagcatttgaaaaataacaactgtgtactgcaatttataagggcataattagagaaagtttttcagtctgaagatttatactaatcttatcaccctggttttagagaacccagttcaatccaactgctgtgaaaaagccactgcttttagccacagaaaataaccagtttcatagaatgacttataataaaaaattcaaccattttgactccaaaaacctagctggccgggcgtggtggctgacgcctgtaatcccagcactttgtgaggccaaggcgggcagatcatttgtggccaggagtttgagacctgcctggccaacatggtgagacccccgtctctactaaaagtacaaaaattacccagacgtggtggtgtgcacctgtaatcccagttactcgggaggctgaagcaggagaattgcttgaacctgggaagcggaggttgcagtcagccaagattgcaccactgcactacagcctgggcaacagagtgagactccttctcaaaaaaaaaaatgcctagctgactttatcatagatctgtctgtaccttgtaggcacaaatatatttacaaaataattaatggtgatttacttattcacaataagcagttattttgcttttggtgtatatgtgacaaggtggttatgtggagtacataaaggagtaaagtaagtccgttgacttcaagatgcttacagtctaatagaaaccttgaaatttccactgggcaaggttttcttgggattgctccaaccaaatgaatgagcaggcgtctaagtaaatgaaaatcactctcatcactttccttcacattatgttaactggtgacaggtcatgacgcatgggaattgcttatgtttctgagctttagtcttrtaaaaataagtttagatagtccatcatgttcttcacattagacactcattacataaaaggttttatatgtattgtagatctttctgaaggtcatctatgtgaatgtttaaaaaagaagcaagaaggtgctataaaaagcactagaggtcaaatggtttgcgagacaaaatgaaactctccagctctgaaatccaacagagtatgatgaagaaagggaaaaaatagatcaaaaaatggcaggggaggaactcggcatcaaaccagtgataaagcagaatgtggatcagatccagacatccagtagtctgtgagcatctccatatgggatgtttgggttgagagttcaacccatcaaatacattttatccataaccataagatattctaagatcgaccaagtagagtaagcaatgtagaatcaaaggtatcatctttattatgtcctatttgtgtttcctgcttttgaggttcttagtccttttaattaactcctaatgaactaatatagttttgtggtcaccagcttctagctagyacaggcacasttgtgggttggtaggagaatgagcastaaagccatgagctaacacaccaagtaatctgttgtgttcacaaatgtccaaragaataacagagattaaagaaaggtraatacagccacctggcaaaaatatttacccttttaaaaatgatggaagttatatatakaagaaatgtttttggtaaaaatatttgaaagtttgttttataatcataagtagcttgggctattttgactagaggggtgtgtgtgtrtrtgtgtgtgtgtgtgtgtgtggttggcagggagagaaggagggaggcaggcagctggtagggactgtggagtgtgtcagttgggagagggaaatgagatgattaagttagtaagaatagaaaacatgtaggaaggcggatcttgaaatttcagggctattcattagtcattagttgaagatttcacagagaaatggtagaaaccaccagtaattaagaaatagcattattgtttaaaaaaaaaaaaactcccaaaccctttccctggcattctggtagaatatagttttggtctaacccaggtcccctctcatttcctttcacatccccttggttctagccacgctagactgtctgggttgtctgtatatgttctgatgtttgttttcctctgtgctgttcttctggcctcagaatcctagtgtcyttgtgcctccttctgcatatgtctggactttgcttagctgatgagatccagttcagataccaccttctgtacaatggcttccttaattcctttaatttctcttaattgcaataaagctatttgcagaggaatgaaagatgctcccctttgcgctgggtacaggatgcactgaaactttcagcatggggcgcggtggctcatccctgtaatcccagcactttgggaggccgaggcaggcggatcacctgaggtcaggagttcgggaccagcctgaccaacgtggcgaaaccctgtctctactaaaaatacaaaaattagccaggcatggtggtatatgcctataattccagctacttgggaggctgaggaaggagaatctattgaacccaggagacagaggttgcagtgagctgagatcgcaccactgcactccagcctgggtgacatagcgagactccatctcaaaacaacaacaacagcaacaacaacaaaaacccaaactttcagcaggagagtagcttggttcagcccagcaacatcggtttgaagattatatcaagttttccagtcaaatgtaaccagtttatggatctgtgtttgcacggggtctgaacctcccctcctcaggtataagctcttggaggacagcctgctgcttaaggtacaggagaattcatctttgctggacatggtaacgtatgcatakagatctggcaacasaacttaagatatgtgggagaaataataggcaaaaactggaaagagcacaagtaagagaagagaaatccgcagaagtgagaartaacasaattgctggctgaggttggaggcatttaartgtgtgggtgtttgtgggaggcatggtggtctcctgttccttgacctcattgggcaaatattacagcacgaacatacaggtaggaatcaattgcatccccacctgggcaccttcatcggcagttggggtacaccacttgctacagtgtgatggaataagggacgatccaaaggcactcagttctcccacccatcctgtgcacaaggaaaagacctttgaattgtgtctcccctgttgtcctttgcattgtgaaagtgcatattagttctcccatccactcttttctctttaagctttagcatacggttgtttgccaagaatggaatcagatagaatattttcaccaggaagtgaaatttaaagtgcttgaaaaagatacaaggatatctggaagttccarccggcgccattttatattttaaccatgacaagtagctgtatatcayggaactttggaaaacagagattgttccatttatttttcacagatgaaaaccaragtgctgtgtggggatcaggaagagggaaatcaaccaaatrccttattttagagattttttttttttttctgggaaattggaaacagcgcttgtttatagccaatgcagcgtccttgaaactctcctacttacagttctggagctgtagtttcctccctgaagaatgggttaaggcaggcagggtaatatgcatagatgggagtgagagtggatggcctacagggttgttaacctctagtgcaacaggaatatatgaaggtacttgggctggtggtcctgtgcagaaccagccagtaggttctaagagacttgatagccgagggtccctgggccctgttccacctttttaaaatttctatgacttagtagcggcagtaccatgcccatcccccagtgatgtttggggtacagctgcacccttggccgtgcctctgcactcactcacgagtgtcatctgacatctggctcttgaccaggatctgaggttgcttaagcaggatccaggtcaggttttttgttcatggaaggtggaattttggacctttcccccaaaaagttgacataacttaaagagaagggaggtatattgagaccagcctggccaacatggtgaaaccctgcctctactaaaaatacaaaaatagctggcatggtggtgagtacctgtgtagtcccacctgctcaggaggctgaggcagagaatcagggggcggaggttgcagtgagccaaggtcatgccactgcactccagcctgagtgacagagtgagactstgtctcaacaacaacaacaacaacaacaaagagcagagtggtattatttcctcactggaacattaaatggttcctactaccaaagagttcctgttctaatgggggtttaatataatagtaacattttattcactgggattcactcgggggaaagtattcaggaacaaagtgacaaaattaaatataggacatatgaacattgtcattttggttctagttcttacaagggcttatggtagcaacccaaatagaagtatttgctctaactaacagataaattattagcacttcagttgtttacatatgagtcagagcatctaaaatttgttcccataagtaggttgagcctccttctcagcctgttgtcatagggtctaaaaatggaaacgtgagtccaaactctttccagatcataaaaataattctgaattagtagagcataaatgaatgtgattttattcgagtgtcattttcaagttccccaggccaggttgagaccttttaagtcatccttaattccctgtagggaggattaagaaaatagtagcagctttgcttctggccttagacagttttctaatgaggtcagagcctctcaccctgggagaagcagattcactttgccccttcagcattggtttttgagaattgctgtctgaagctattgcatagacaaggtcactttttaaaagggtacatttctgaacctggagaaggagtgggttctgaatgactggctcttctgattaacagagctgtatatcaagctgtgctgaaaatactcctcagatatattaggccacatttatgcatgagtgagctcactgtcgtgacatgggagtgaacctttgctgattcgagatcctggggtgccttcactttggaacactgattctagatatttaatagcagttttaaaattaggctaaatgtagtctgactgcaggattcattccagtgggaatttttttgtttgttggttagttttttaagcctgaatatgaacccaaacatgtttcccaaaatgtgaaatgaagagtgaaaacctaacaatgggataagaaagataatagataagagattatagttcaaactcggcctgcactcaggaaatggaagcaattcctccccctcatcctgcccccctcctcttcctccacctcctcctcctcccttacctcctcctgcactnnnnnnnnnnnnnnnnnnnnnnnnnnnnnnnnnnnnnnnnnnnnnnnnnnnnnnnnnnnnnnnnnnnnnnnnnnnnnnnnnnnnnnnnnnnnnnnnnnnnnnnnnnnnnnnnnnnnnnnnnnnnnnnnnnnnnnnnnnnnnnnnnnnnnnnnnnnnnnnnnnnnnnnnnnnnnnnnnnnnnnnnnnnnnnnnnnnnnnnnnnnnnnnnnnnnnnnnnnnnnnnnnnnnnnnnnnnnnnnnnnnnnnnnnnnnnnnnnnnnnnnnnnnnnnnnnnnnnnnnnnnnnnnnnnnnnnnnnnnnnnnnnnnnnnnnnnnnnnnnnnnnnnnnnnnnnnnnnnnnnnnnnnnnnnnnnnnnnnnnnnnnnnnnnnnnnnnnnnnnnnnnnnnnnnnnnnnnnnnnnnnnnnnnnnnnnnnnnnnnnnnnnnnnnnnnnnnnnnnnnnnnnnnnnnnnnnnnnnnnnnnnnnnnnnnnnnnnnnnnnnnnnnnnnnnnnnnnnnnnnnnnnnnnnnnnnnnnnnnnnnnnnnnnnnnnnnnnnnnnnnnnnnnnnnnnnnnnnnnnnnnnnnnnnnnnnnnnnnnnnnnnnnnnnnnnnnnnnnnnnnnnnnnnnnnnnnnnnnnnnnnnnnnnnnnnnnnnnnnnnnnnnnnnnnnnnnnnnnnnnnnnnnnnnnnnnnnnnnnnnnnnnnnnnnnnnnnnnnnnnnnnnnnnnnnnnnnnnnnnnnnnntccctcctcctgccccctcctcctcctcctccacctcatactgcccccctcctcttccacctcctcctcctccacctccccctcctttacctcctccttctctttctgcacaccccacccccgcccccactagggacagtttactcttccccctcctttcttagaatgccaacaactagcctgttagttccattacttacttgccttgtgactcataacgttttcatcttgggtatttttctttcttggtctttgtaaaaattctaagcatcatagagcatatcacctggagaaaagaccyacgttcattatttaatgaaggtaaaaagtaaagaattgagtctgcatcctaagaaattagaaaaagatcaactaaktaaacaaaaaaatataaaaactaggagggaggaattaggagatgataagatttaaaagttatgtaaatccaatagctggttatttgaaatgaccaataaagtaaactctcattatcctaactcaggaacagaaagaaatcatcctaacttagaactagataataggaatgagaggccgggcatgatggctcacacctgtaattctagcactttgggaggccaaggcgggcggatcacctgaggtcgggagtttgagactagcctgaccaacatggagaaacccatccatactaaaaaaatacaaatttggccgggcatggtggcttatgcctgtaatctcagctactcaggaggtgaggcaggagaattgcccaaacctgggaggcagaggttgcggtgagccaagagcactccattgcactccagcctgggcaagaaaagcgacacttcgtctcaacatcaacaacaacaaaaaagaaagaaatagataataggaatgagaaaggagacacaggagatatcaatagactttataagaaaacattacatgcagccctgtggcaacacatttgaaaatatagggctgacttcttaggaaaatacaaattaccaaagttgatccaagaagcatggaaaagttgaatagaccaattactatagaagagataggaaagatgattaaaagttaccattgagaaaggcaccaggaatccatggatttccagctgaggttttgtttgtttgtttgtttttggagatggagtttcgctcttgttgcccaggctggagtgcaacggtgcgatctcggctcactgcaacctccgcctcccaggttcaggtgcttctcctgcctcagcctcccaagtagctgggattacaggcatgtgccatcatgcccagctaattttgtatctttagtagagacggggtttctccatgttggtcacactggcttgaaaaaatagaaaatttgagtgttatttttactcttcyaggacatactaaaacatggaaaggttcccagttcattttataaaaccatcaaaattttaatttaaaaatctgatgaattaaaaaaataaaaataaagatcaatattatttatgaaagtaaatgtagaaatttaaaataatttattaacaaatagactcttgggtgcatcaaaacacgaatgcactataatcaatagttattttccagtaacaccagggtgattaactrttagaaactcatcactatcatcagttgttacacaatcatattgaaggagaggaatatatgaataagtcagtagaggctagaaacctatctgaaaaagtttagtagccattcctaatatagtacaatctgagaaagygaactaggaataaaaataaattacttaaacataaaggccatrtatgtgtacacaaacacacacacaccacagcaaatatttcctaaaagacaaaacactaaagccattcaattaaaattaggaatgagagaagaatcttacattttacaattagtatttaatattatcttagaggttcttgtgagtggagtaagacaatgaaatggtcatatgtctagaaatcgcaagagcatctagtaaaaaatctaaaatcaacagaaacaattgtcaaggaagctggataaaagataggtctctagaaattatcttttctgtgttttgaagataagcacctagaaatggaagttaagtatttctttcacaatagcagcagataacctaggaagacattgaactaatacctgtaaccttcttagtgaagaatgtgaaatataatctagagaaattaaaacatgtaatgcctgaatgtatcttattacaaaattaataagtaaatttcttgtgattccggttagaatttccaaagtggtgggttttctctttaattgaataaaataatcctgaagtctttrtagaagaataaatacgtactacctgagaggagccaagacaaatayggaaaagaaaaccggtgagggcagatttggcttacaagtaatgacaacatgctaagaataagaagtcttcgtgatcaaagcaatgtgktattgatccagaattacataaatagttcagtggaacagactagagaatctaggactgtgtctcattaagagagtgaatgtataacaagatgatagttcagtactgttgaggttggtactggcataaccagttctttatctggagagggggttgggggaacagcacagacctctatctaatatcataatcagtaataartcccggaatcttcaaacacttaaatgtaaacaagcaattcaacttttacaagaaaatataagaacctattttgtataatcttggagtgagggagaatggttaagcaaaatttgatacgcacaagctataaaaagagacacactttgaacatatattttatttttatttgtttattttttgagacggtctcactctgtcaggctggagtgcagtggcgcgatcagggctcactgcagccttgacctcccagactcaggtgattctcccacctcagcctcccatgtagctgagactacaggcaagactcactgtattagttctcatactgctaataaagacatacctgagacggggcaatttagaaaggaaagaggtttcacagtttcacatggctggggaggactcacgatcacgggtgaaggtgaatgaggagcaaagtcccatcttacatggtggcaggcaacagagtgtatgcrggggaactcccctttataaccatcagatcacatgagatgtaattcactatcatgagaacggcatgggaaaaacctgcatctgtgattcagttacctcccaccgggtccctcccgtgacacgtggggattattacagttcaaggtgagatttgcatggggacacagagctaaaccatatcagctaccatgcctagcyaattttttgtggagacgaggtttcaccatattgctcaggctggtctagaactcctgttctcaagtgatctgcccacctcagcctcccaaagtgctgggattaacaggcatgatccaccatacctagcctgaatatatatttttaaacttttctgtggcaaaagatacgtgattaagtcatagatcaagaagggatatttgaaacagacatggggttactatctataacaaaaaacttacaaattgttaagaaaaccacagaggaaaaatggacaaagaatgttaatatagaatacacagataayaaatgcagacagctagctggcaaacctatgaaaaatagttcatttttgctagggaaatgcagattaaacaatgagacgttactttaaacccatcagattggtaaaaatagagaaaaataacactttttgatagcaaggctgtratagaagtggcaagtggtattatttctcataatactgatggaaatgtgaattatgggcagttgggaaattgaaaagcagatgggcaatgtatattaaaataaaaaactatyatacctttcttctmagcaacctttgtcctyggttatttgtcttttagaaataaaaaatgtgtgcaaagtcatatgtataaggatrtttattgtaccattatagtggcaaaatactgaaaatatgaaaacccatcagttgaaaaacggccaatttatggactgtttgtaccatgtaatattatgagagaactagagctgtatsagagttggctgtggaggaatttctatgagaacttgatgaatgagaagcaatgtgtagaaaaatgtataatatccagttctaaaagacgcattcctcctgtgcccatatgtgtaaatgtgtgagtgtggagaacaagatgaaaatgctcattctgtatgttaagcagggagtggggtggaggttaatgtggaatggtgggagagtggggtggcagggatttccaagtcactcaccagtgatgagtgttaaccacatccccatttttttcctatgaaggaagctgcaatgctgtggtttgaggttaaacatgctggctccttctcttaggtcttgatttggtttttgttgttgttgttttttttttaattctagtctgttcttgttttgctgtgctgatatcctcttagattttacgagcatattaattgtgagtatttaacattcttctttggtttattctgagacccygtttgcctgccctttggcatcattggcagtttttggtggtctactgrtcttcctgtttgtgcctctcgtttgcccctttttcactggaatgtgccaggttgaagcaatatgtagggcccggtgggatgggccaggaggtggcctttcagatgtggctcctgcatggccctgcttgctctcttgagctgcctgcacttcagtcttaggaccacattcctgctttggcctacatgaagtgcaaggtagcagtgggaaaagcagagaggaaatgaagcttcctgataaatcacctgatcgctgccccagggttagtcactctagcccccttggatctcttgactccatctcttgatttgtttcttttgaatttctggcatctggagaatacttgtacagcagcagtcccctggttttgtttttctttcaacccaagcccatcccatatctgttcatgtgatgatactgtgtcttattttcccaagattcttatgactgtgatatttagtctgaatcagagaaagagagagatagaaatgtacactcagagggccacttggatggaaacttctgttgatctctccaagccttagtgggatcatctgtagagcagggataataacagcgcctatctgttactgttagggttactgcaaagattaaaataggtrgtgctcttaaaagacttagaacagtgctgtcatatagtaaggattccataaacattagctgctcggtttgtgtgtgtgtgtgtgtgtgtgtgtgtgtgtgtgtgtgttttgttgttgttgttgttttaaacgggatcatgctggaaatgatagattgcaacagagctttggggttttttctctaattaatagatctaggatgttttctgaggtgtgtcatgtttttaaaactctgtggtatttctgtttctttctttctttcattttttttttttttttgttgttgttgttgagacagagtctcactgtgtcacccaggctggagtgcagcgatgccatctcagctcactgcaacctctgcctcccaggttcaagtgattctccttcctcagcctcccgagtagctgggactataggcatgcaccaccatgcctggctaatttttgtatttttagtagagacagggtttcaccatgttggccaggctggtcttgaactcctgacctcaagtgatccgtctgccttggcttcccaaagtgctaggattacaggcgtgagccaccrtacccagcctggtgtttcgtgatatatctatgtgtgagggtttctgtagttaagttcccatagttgaattcctggttcaaaggacaagaacatttacaatgttcatagacgttgggaaattgccttctgtagtactgcactagtttccactggctgtagtggttgatgagagtaccagtttttccctagttcaatattaacccattttatcagtcttttcatcttcgacattatggaaggtaaaaacatctcattttatgtcttcagtcagtgatgccaagtatctcttcgtgtatttatatttccatttttatccagtgccaactcacatccttctgtcaatttttcctttgacctattaatttttcattgataagaattctttgtaaaatgggcagtttaactccccatctgtcatatgttttttctcatttgatttattgtatatcttgtatagcaccttttaattttaacattgtgtttttaagtgtcttttctttgttgacttggaaagctaacaactacttacagcataatttccttctgttaaaaacaagaaggaatttccccactctaattgtgaaaattatacatttttctaagtctgaaaaaaaatagaggaaaaaacagaaaaaacaacagaaagaacatcagtcactcttaatattttggcattttccttttagttgttttttaggagagaatgtatatttatacttcgcatcataacatagatatagtctattttggtgatttattccaatatgtaatatatgtttctgaatgtacaatatcctatttatcatatctgttaagtttgtttccagtttttcatttaagagagaaaggtactgggaatatctttgtgcaaaacaagaatttttttttttttttagtcagattctgttcctatgatacctccctggaaatgggattcctaaattaaagaatattaggatttaaatacttttggtatagattaccaatttgctttcctaacgtgtggtactagtttatgttgcaatcagcacaaagactcactgtgccatttatcatcagcagagaagagagcagccctgaagatttgggggaggagtgttcgtagagaggcacgtgaaagtgagtttgagaggtttgagaagtagccaggtcagtggggctggggaagggagagagttcatgggggagggctggagatgaaggtaaaggagccatggttctttagggctgtgtgggtgctggggaatttgcatttcctgcttaaggttgtagtaagtcagcctggagagttgcaagaaaggagtggcttggtgtgatttattgtagcaagtgagagtgacccagaggccagttaggaggctgttgcagaggcctgagtgagagaggatggtttaaacaccaaaatggtaacattcagaatggagaggaggagatggtgggagattaaatttggggatggagcccttaggatctgttgattgactggatgtgtaagagagaaagggaagagcagaactgaggaaatgtcctcttgaactggctgggggccactgagatgggacagatgcgctggggagcagtgcagaggtggaatcactgctccttttaggtctaaggcatcccttagatctccaagtggatgtgtgaagatggtggtagaggagaatggagctcaaaagaggggccagagtcatttccatttagatggtctttacagcctaaggaactggcagatttcactaaggttgaggtctttctttcctgtgaaaatgtgatcaggatcctaagtaacagccctaaaaattaaacattaggaatacaaggtttcataaattaggaactgtctgtagctgccagattctaaatgttttgaggatacaaatcttggggtcttttcaaatgctttgagcagaagaggtacatcgtattgtgtttactgaatggcatttaaagatgcaggagacctttcccccttcttgatgaaacaatttgcctttcagatgttttgttatagtgagttgattgtaggaccttatgaagcatgtaaaccacacatttgtaaggcattggaagaaaaagctaacgcgagttaggagggatttaagaccatgtgaggaaattcaagcctatgttgttatcaccaaaccttgcctgtgttatgtaaagatttttgcctrtgtcatgttatcttcgttgtgttcaatttattcctccccctccaagtgtcctagtttctcctctactgtagctggttttgaacaaaatagagaaacttgggtctcctctaccctcagcatctgaattcttctcatttggttactcactgtgttaaaataagtgatatagtacattcttagcagtttgtttatttttaattttattttttatggggctagggtctcgctctgtcacccacgagtgtggtgccatggtgtgattgcagctcactgcagcattataactcttgggctcaagtgatcctcctgtcttagccccacgagtagctggtattacaggtccatgccaccatacccagctaatcttagcaatttttaaataacttttttttccgactgtaacagatttagatattggaaaagataaaacataaagcattgatctacctgtagagccaaatagccacagggatataaattggttaccatttaattttatttccatctatatttggctatatttatatttatgtatatggaaatagtttatgaatttggaatcatactatgatattttttagaatgatgctttttaaactattttatggtaagcattttagtaaagctcgtaatgttatttttaaaaacgtacttttcgaaggctgcagagtatggataaattcatgatgactttttagaggaaaatatcaagatgatctcactaacaaatcctgagattaaaaacaaaagcaaacaaaatacaaaaactgaaccatctttggaatactatgaaattcagattttatgttcttaataaaatcctgttttgaatgaaatcagtcttcatgcttttcttattccttttggctatgttgcctacagttgaattaactgtttttatatacttcctttgctttgcattgaaacaagctgatccattgtgaccctttgtggtatttcataaaaccacaccctaaaaactgcccagtcttttaagtgtagtcaacagtattgagcaattttttgggtaatattgtcggaagtgttaggtgccaaccaacaatggcttattgcttacatttaagtgtaagcaatatacaattaaaggaatgtcatgactttttaacttcattttgaaatttgagtttagaaaaaattccaagggaaatgagcaagaatgaaagcatcctctcctactgccagacttctgggagacccacccctggtcttcccaggtgtctcttcagtgaccttgttggtcgttgagggctgtggaaagttytagggaggctgctcgtccctcctctccttttgcttattgcattctgcccagattataaaactgaagtatctgtcttaagacgccagcagctttttyttcatcaaatccagacacatcgaatcccccacaaccaagaattacccagccacaaaatgtcagtagtgccccggtaaaagaaagctggttttagacttagtctcagaacctggccatcttccatggattatcccgatatgtgcatccttgtctcttttcactatagcctggtgatcatggtggcagttttcattttgggacactggtgaggttagaatagcttcaggcttccctcaktgaatagtattgtgaaggcagtggtggtaacattgtgttggagctggtgtgagggttgaatccactctgtagcctctgtccctakatcatggcgctgctttgattgggccctaattttctcctctagacaaaaggaattgaactaagacttccagcattccctccaggcttaacattttttcatttggtgctgatggtcactgactattttccagttacattttaatgcaagtttggcagaagccgatttctctgggttagggaaaatgacataggtggcagggaggtggatgtacaccatttgtttgatcagtttgcctagaatggaggtggcagaattggagttggaaagatcaaatgtagcctttttttcccttccagaatgaggcttttctatgcatttttttgaggcatgagaacctcatgggacaaggcaaaagtgagcatactcaagtgaagtgtatggttatgggggaatggttattagaaatgtcaattgtctcaattttttagtattaattttcagagggaaacagtggtgtaattagtgttgtgattgtttgccagggcggtcgtaacaaagtagcacagactgggtggctcaactaccacaaatttgttttctcagggctctggatgtccggagcctgcgatgaagcaggattggcttcttctgcggcctctcttcttgacttgcagatgctcctctgggtcttcccaggtcatttgtgtacctgtgtccgtgtcctaatctcctgttcgtataagggcacagtcatattggattgggacccacctactaacctcattttaacttaattacctctttaaataccctctctctaaatacagtcaccatctgaagtattaaagacttcaacttaggaattttgggcaaatacaattaagcccatcacaatcaggtaacatttggtaggacgtgtagatgctttttatctttaagggaataggcaaatcgttaaaaataaataaataaaaacttgttcaacttgtttaggtacattttcttatagtgtattgtggttcttatttttttaaccttccarctagtgtgtaaattggaaacattgtagcttaatttgatagttttagacataatcaaagatgatggaaatcttgttcttaaatttagtctattcagcaacttgtgtatcctcaactgctgaagactgaaaacttgagatgttcctcttgttttaagaatttgactgaaaacgggctgggcacgatggctcatgcctgtaatcccagcactttgggaggccgagatgggtggatcacttgaggccaggagttccagaccagccttggcaacatggcaaaaccccaaaaatacaaaaattagtggagcgtggtggctcacacctgtggtcccagctattcaggaggctgaggcacaagaattgcttaaaccccagaggcagagactgtagtgagatcgtgccactgcactccagcctgggtgacagagtgagaccctatctcaaaaaaaaaaaagactgagaatggttggcactgtccccctgtctccaggagggtgaatgtttctagctgaaccctggtgcccacttgctcctctaagccttcagcagtcctcccagcctcaaggggtgatccgttcatcttccccccacctctggaaatcccagcgtttgaacgctggggggaactgcaagtctagtttacagggtttctcagctgagatgccaggaacacttcrygagtgagcatgccaccacatttgagtgcatatagaaagttagctgtttgctacaactggggacacttyctattagagccgcatctgctggggtggagggctgcatgggttggagagtagggtktgacttcttccagcaagaggaaagagaagtagcatagtgcccatcgcaggcagagagcacatgtttgacttgctcttggaatttctgtagagtaagggtggtcaggttgccagactacccctcaaacgaggacatggtgctgctgggtcccagggtagagctctgctggcaccttcaaggccctgattkacacctaagggcacacaactgggatctgaaaactgggatgcacagtasagactgcagatttacagggcggggctgtctctcatctgactattgattcttttgggggctgtagtttgtatcatagttatttttgttcctgtttttttcccctcttcaagacaataagcttttggagggccaggaagttgtgttcccatctgccgagtgtggggcctcgagggccagaacctcagaatgtagaagctgagttagtttgtggmagggtgaagggctgacctctactgttggmaatgccaaaatctctgatctggctttaaataagcaaaacagccccgccagacatagagtcatccacaaaacctcatgacctctgttattgcccatcctgtgtggaagcccactgagaacttcacttgaagatgctgcaggaacaactgcagggaacctggagataaggccccgggtgatgatgtaagctaattgctgagctgggtggagctacttaaccttatggtaggaggtggagcttgacgcaacccccttttccaccaacaagcatttctttctacctgtcattgaagtgaatcatcagtrtaagtagcgagctgggcgcattccttctcagttgtgttaaaacttgctggtattcccccggtatcagcagaggtgtgtaygggcactgctttaaaactgggaaggaggaagacgaggccagggagccggagggtcaccaaggtagatttccagcagcgctagtccagctgaacactttccagccttgtttttcagcagctttgaggaaaagtataggtaagaacaaagacaccactgtatgtttgctatatgaatgcataacatctgttcttggtgtgagtttgatgttggtttaatactgtttttatgtcagcggcatagttctagcatgtaccaagattttcaattttaaatgctttttggtgttcacagttagctataattggtcaattttaccctccttatgcataaaaagaatgataggcaaagaatgagccttgaaaagaattgggatcagaattctggtcccctgttctttgcttcttaactttcttgactgtttagaaaaatgtacagcttttcttccaaaaaccaaagcaataatacttttatttttgaaaataatggaaaacagagaccgctgaagttctatgaatgaggttttctgttttagaaatcacaggttgaggaggaaagaattgtgttttccttcctgttctgtttcgagtctcagtatttctgacttagaaacctcctggagaagagggagataccagctctcctttgtttcaagtaaaataccatcttaggtcataaaatagtttgcttggagaataattcatggcttatatctgaatttttggttggtagcaacagaaatctttctcttcctcggtatgagtaatttggcttacatgatttagactaaattttattatattttttgtttgagaaaacaaaagtcaaagcccagaacatattcaactgagtttttccctcaggttttctatcattttcccacccttcctactcatacatgtgaatatgctgaatgattaacatgtgatttttgtttctttactgtctcatttcatggtgattcataaactgttagttaactggttatagtgtatccatatgttggcaaagcttgaaataaatttgagtgcaggccacaccttcgtattaatgagccgggttactttcagtaaagtatttctgatgtcattaagtgttaagatggccggaattctaaagacaataaaaatgtatcaacaatatgaaatatcaaagcctacagtcaaatctgagttattctttagtacttatttcatagctattctttaatgtttattctttaatacttatttcacattgaaaagtactttacacatgtttgaatgagatattgccagtgaaagaaacaaaaggaagcaaataactctataagggaagtgggattttaaagtatgtttgtgctggccccaggctggtgagtgagtttcattagcaatgaccaggaagagaaagaatgccacagtggtgggtgctgaccttttttttttttttttaaaccttttttaatgtctgtaaggaatacaaggtgaactttaattcttgtgggaatctagtaagatggaagtcaagaagagaggaagaaatgctttttatttagttaagaggaagtaaacatctgtattagttacagatgttatgccttaacctttttcattcctattgtttttatgaaaatttgcctttttaagttaaatgaaggttttctggagtcctgtattgcaactaaatgttgatttaaaacgacacatttgggacattttcttggcactgtggaatataatgaaaagatataaaatgaaggcaggtatgaaattatatgaattctgctacttgagtgtagaagttttattccaaagtggtttgtttggtggatgtggtgatggtggggggctctatgtacttattaaggcaagtgatgggacaggagcttttgtggtcttgacggttctgttgggatgggagggttgtttgggatttttatgtttcattccaggcaatgtttattttttcagcctgtacttcttagggttttaccaagtcagttttcatgtgaagccattttcatatcgtttctttcaccttgatggaaatcttttccttcttatgtgctttgagttaaatatgatgtagtgtgctagtaacatagacggggctttcctttctacaggtgggcttgaagtgagcctgccactcgctcaccttgaatcacggaggtttcagaggccgttggccttcagggcaatggcagaagcacrtgttctctgctgttttctgagtctatcttgactgcgttcccagtggcccagaattccccaagggtcactcgacacaccctcgtctacagtaaatatttgtgcttcctctgtgcctggccaggttttctcagtacccaggagcacaggtgggcagtgggatgtgggcaggcggtacccagattccctcccacaggggccacagggaggacttgggcgcttcctgccaagagccccctgcccttcagactaagtggaaatagagatccgggagtccagtggactcagtggagttccgtagaatacatggaaaacgcaccgctttcagtgatgtaagctgtcttgttcacttcacgattactcatctggcctgcagcaggcaagaggatcacatgcaattataaacagcctcctctgactaaggtcagtgactggaaaccctgtcacgttatcagaggtcatttggtcatagattcttgggcagaagccattgagagtcctgggggtgtgatctttgagcctttgccagtgctggggtttgactccttttagctcaattaactgggtccaggagtttattttggccgagatctgccatgctgagttgacaggcttgacactggaaggaagtctctaacttcattagaggaaatggcgtggcaggctttaaggcattttgatatactccactttttctctcttgccctgttttgttgaggttttcagggccataactgtacctgaggttaatcagtgagtgatctatctgaaaggaatttgttctctttgggcaccgtcctgtgtggtattatatttgtataactatttagcttaactcattcaaaaggctatttaagtcacttgtcctgttcattacttgaaaacaagttgtcttctctttattcttttagtcagttaccaaatatttcctaagtgtctcttgtgctagacattgaggggcactccttctccctttcacttgtctgtttttgttgagctacattttttccttaagtcagattgttcttttcctgttacttttgttttcacttgatttgtttatttatatttaaatatgtactttaacagtcttgaagcattggtctgaatgaggatggtgatcagattgggaaaatgccccttaattttggtttaaaaaaatttattttctttaaattatttgtttattgataggggccacccactccaggtgagtggtttctctgtgtgtatggcagaggaatgctctgtgtctggaaaaaaaagtmacttagcttgaaatattatgaaagctgaagagtacaaatgtcagagagaaaggggtattgggggggaagagaatgagaagacaagacacagtcagggccctgtcacccgtgtggaactgcaggtccctggagagatgatgcatttatccctttttagagatattgccattaaaagttgatcttgagcatgacacagaactgaaagctttgatgacaaagccagcatctcagtttagcaataaccaggttagggaaaaaaccccagaaactcaacagtgagattcagctcagcaatgtgggcggggaacccactgtcccgccttgggcagggagcagccccagccgcttcatctgcctgatgctgggttttatccgcttcacaattaaatttcctttttgttatgcttgcgcacatctatatttggctttgcttcttattttttaagaaaggggagaagtgtgggcaaggtaaaatacagcttgcaagctcccaaatggcaaatgcaccagttagagtctaagtggcctcccaaccttaaggtgaaattcatttattcagcaaatatgtaccaagcccatcagggaccactgctcgagataccagtgcaaatagaagaggccaagggcacattattaggtccggagccagtggcctgcacagccatctgtgaccacctacctctctgcttgcagggaacttcagcctggtggaggagacccataatagccaagtcaactgataatagaattagtagtagtgttgagggacataaagaaatcagggtaaggccatcacaattacatgggtggatgatcttttataaaacagcacagttttgttttcttctgccatggtatctcctaacattttccagtgtgtctacttgcagttaatatggaagttgyggctgacactaggttagtggttaaaagaaaacaagaaaaccaacctttagaaatctttagaaacatcattatcatagaaagctataaactcttatgtatagaagggtaagtggccattgatcttggagcagaatgaatggatatttcctggaaaaaaatatttccactcatcaaagatactcaagtctcttctcatctaatcaatattggaaactaggaatatccacgcctatggaatatcctcagagagaattaattattctgccctctaagaggtatagtagtttagacttagaagtaaaggcctgaacttgaggctgcaccattgaaggcaaaagtgccctttatctcccagctttgtcatttgccaaatgcaattgtgttaaattaagtgacctccaatagcagagctctatgttttctcccctgacccccaagtcaaaattgattatagtaatccatcaaaccaggcctggcaaatgatgttttgcaactaaaggataaatactgagggggagggacgaatgtgaacgcatatgcagagcaacacagtcatgagaccattctattacttcctaaatttcttaaagcttttctgtcttttctgagctkctcaagtgagcaggggcatgagttcctgtgttgtgcctggggacagggaaggctttgggacctmctgtggtcttaagtctgagcagtgctaatagcctcggctcaccaagtgctgggcactgtgctagagggtgtacaaacctctcatctcatgaggcctcactgctacagctgacagagatgacatccagttgtttttagttgcacatggcagagctagaaaacaaaccagggtgtgtcagactccagagcgcatgccctctgtgatgccgctgtgttaccctagatcaaatcaaccaagccatccgttaaaaaaaaaaacctgatctttgtcaaatatgcaattgttatatttttgttagagtctgcctctccagtgaacgatattaatttccttcaagtggctactcacagatatcacaaaatcagaaagctgcctaccctgcagcctgtatctgcctccacgtccccacatcagtcctccttgctgtgcttcttgtctctttagtttttatcatcttctaacactgtgaactttagtaatttattctggattgtttgctacctgtctccccttggtaaaatgtaggctccgcagaggtagagcgttttgtctgttttcttcactggcatatctcaggtgcctaaaacaaccatgccagacatgtagtggtgccagtgacaacttgttgaatgaagaaatgggagaaaaaagcagaccccggagacttaggagggtctgtgtgagggagtctccaggcagtcttcctgggggtgtcctgaaggacctcctgatcgtgattttggtcagtgtggaggctgtggtttcttctgagctgtcagtatttggaggtgagttgtctgcaggtcacctcatcccacctttacacattagtaaaatggaattcgctgggtgattcttaggactgtgcggtcagtcgaattaccagacgtccctgcatgctctgtctaagggctggagtctgctttccttgcttctcttctagaaagaggtctgtccacaagggattagcctcgcgaagttcctactgttgttcattgacccagtgagtgttttacccactgtgggtttttcctacctaattgcccctctggttttcagtgttcaacatgctgcagttacgtgttctgctgtggttttacttagcttaatcctttattaattgcctcttgttcaaactccctaagagcagattatccttctctttcagcttctgctccattgctgttsaacttttttttggtcgtgacatcagaaaaataaccaagtgtgagtctgataatagcaagtaaggctattttatttctatccaatttaccccaaatttgagcagtattacaccttaaaataatagagctggctcttgcccagcatgtgaaaagtgtatgcttcacgatggacagatattttccagtatctacttaccataaatctcaagatttaccctaccccactccagccattacccccatgtcccatttgcctaacctaccctagggccatctcagtgccctgtaaagcaacctttgttgcagacccactgtgtgactggaatgtgatgcacacaagtgaccaaggcatggccctgttcgcaaggagcttccagaccaatagcagaaatggacacataagtaaacaactgcgctacttactgataggcttctgccaacaggagtggagcttgagggccaggaagccttcccagaggcactggagcttgttttaacgttacgtgcatgccaggtggggggcaggacatttctagcagaggagaaagcatgctgtgctctgagaactaaaagtcatagtcactccacttggtgacatgtataaggcacatggaatagggccagagctgggcagaccgtgtatgccacaatagttcgttgtaggttacaaagaaccagygcagagtgggtgaggcataggctatttgattartaatttggctgcattgacaagatacggaaaaggcgaggttgggactttccgtgaattttctcctcaaggtgcttaatcaktgaggttgggatggccggagggggccctcatttgcttgcctggtgctcaagcctgaggtcctggcctttaatagtcagggaggtctgtgtggaggcagggtgtgagccccctccaaggaaagctgcagtgtgaaaagaggcccagkatgagcgttggggagtatccacatacaacttgatattcctaaagtctcagttctttatgggaaagcccatgcactcttccacacttggaattctttgcaaagtgagtggtatttgagcttctttagagtcttgctactcccaccagctgtactggcatcaccagggagcttgttagaaatgcagattctcgaggcgcggctcacamctacccaatcagactacattttaaccagatcccaggcaatccctgtgcacgtgaagtgctagaacactgctctgcggtaaaacgactttgctaaccatggaagagggtgatttttttcccttttcctttggtgttttttataggacctatttaccttttagaactttttcagaattatggactgcagaatatatacagtgtcaatgtcattagcaattcattagtgatatttggctagaatacatagttgtttccacacaaatgccatttcttacattgagatggcacatgtctggttaggacttgggctcatttgtaaggagccacgctgcaggtaggcatgctcccgggacattagttgctcaggtttcaaactgctgccccagcatagcagatggcacggtaacaaagtccctgtgcactctcacattgcctgcggtgatctatcacacattttgtcccctaataacctagctgggggggagctcatgtctctgtttgtgctaatgctcgctgtatccccaagtggcagtacttaatataattgtcattgctctttaatattatctcattccacgtcagctgcacaaaaatttgaggttaatyacaatgaatgttttctcaatccttgttattgagagctgtttaatagtttattttgtatgtgaagattcatatctagattgaggcttatacaacttcatttaaagacagctttttcggctgggcgcggtggctcatgcctgtaagcccaacactttgggaggccgaggcgggcggatcgtgaggtcaggagatcaagactatcctggccaatatggtgaaaccccgtctctactaaaaatacaaaaattagctgggcgtggtggcgggcacctgtagtcccagctactcggaggctgaggcaagagaatcccttgaacccaggaggcggaggttgcagtgagccgagatcgtgccactgcattccagcctgggcgacagagtgagactctgtctcaaaaaaacaaaacaaacaaacaaaaaaggaaagctttttcaggttggaaaaatatcaacagcagacatgaaaaagcatgaaaaatgacgctaagaatgtaagcaactggaaacaaaaattataatggtgcatagtgagctgaagatctatatttaaatgtgaactcccctttcagtttataagtgattactaacagcctcatcaggtttctggaattaaatgttttattatttcctcccaaagttagtcctcaaacattagtatttcktgtgttcttttgatttgaatatttgtttttaacacacaaggatatcaactctataagtcagttaatatgttcatgcttttagttaatcgaaagtggcttatgatttcagtttttggtatcaggtgatgttgcgraagtgaggttcactgtgaagcttyttytttttttttttttttaatcattktgttgtttctttgagtgtatgtgagcttataactcaagacactatgtgaratgaccctgtgtttcctacattatagaaaagaggaaaatgaagcaagttcaagaaaattagatttatgtggaaaataaattstgcatctagttattcattatcaggtatgagattacaggcatgagccactgtgcctggtgacctcatttgaactcgattacctctgtgaagaccctgtttccgaagaaggtcaacattctgaggtgccattgtcaggtatgaggtaaacacactgagaataccacattttggcaactcagacaagactattttccaaacatgtaaccctgggaagaaggtaacctatcatagtgtgtgttaagaagtcaagcaaccaagaaatgttaattgaaggcccgttttgtacaaggttgcatggaaaagacacactakcgtaagacatggacagtggccctgagtgacgtgcasccggtttaggcgaattaagatttacatacttgaaaagggacaaacaagwctggacgtggtgactcatacctgtaattccaacactgtgggaggtggaggcasgaggatcccttgaggccaggagtttgcaaccagcctgggcaacatgggaaaacccctgtctctacaaaaattaaaaaaaaattagccatgtgtggcagcatgcccatagtcccagctactcacaggggctgaggtgggagaattgcttgagcccaggagatccaggctgcagagattgtgccactgcagcctgggtggcagagcgagaccctatctcaaaaaaaaaaaaaaaaaagaacagaaarggaacaaacaacagacacaagattccatggaaaagggagtggtctaagtattcagactgtaggaattcagagagtggagaggctggttattatgggggtgcttcatcctggggagttgagggaaaggaggtgctggctgcctggagcctggaagaatcaaagatttccaaggccatggggggaaagcatgaaggatgagtgaatagacaccagggctgagcaccctgaaaactgtgaagatactagattgacctgtttggaaaaccaaacagatgtggctgttattgacaagtggttttgtttttgttttgagacagagtctcacttggtcgcccaggctggagtgctgtggcttgatcttggctccctgcaacctccgcctccaaggttcaagcagttctcctaccccagcctcccaagtagctgggattacaggcatgagccaccatgcccggctaattttttgtatttttagtagagatggggcttcaccatgttggccaggctggtctcgaactcctgagctcagatgatccacttgccttggcctcccaaggtgctgggatcacaggcatgagccactgtgcctggccaacaagtggtttaaattggattctccatttcccacctaatagaaagtcggaagcatagggcaaaagtaaaggaaggaccctgtgttctgctggttaaatataacagaggtctgactccatggctattataggagaggtgcattttgttctatgtaaattatcttgatgtgtcccctgtgcctttaccccatgattatttagcacttttttctccacggtcacagggacagggagaaacatacacccataaaacagtgtcatctagaggcaaaaacttgtaatgctcaagcatgtgctctgacgaggtggggcagggtgtgtaggaacaacactctactaattattacagagcttgctctgcactctctgtagaagtccttcaatatccagtctaacacacacagtaacttaagagaggattttaaaaaatcaaaatgccctcagatttgtattggatttaaccaggctgagatccctgagatccaaatataataatgtgtcctttttggatgaatcagacacaagcaaaaatctccagtgtgtgtccmgctttagaggtgtagtaatggattccacagttcacgctggtgggccagccaagacttttaatgctgatgtgggcttcattctttctataaactccctttcttcttgatagtgcatgggcccaggggttccaaacatgggtacctgccgtaattgatctgtgtaaccggagaaaatacatatcctatggcacccttgtgtcgggatatagggggcatcaccgtaatgtggctctttttctgttgattatagttttttctttctgtgatcacacaattgttttatcctcgcttaaaaaatttcaagaagtgcagcactcagaataacagaaaagtcaggtgtctggtggtttgtttgcacatttaatagacttgaagataaactctctaaacatttattttgcaagttgtttttctgagagttgaggggaaacttttgccctttggtctccctgaggaattctaggatttcacaggtaggcgtgtgttttggactgcaggctgaacgtggttggcagggtggcatgaggagggcacatattttaagcgttcttagggcagatccacgatcctttacctgccatttctaagtccaaaaagccctgaaaaccaaagacatctttacaggtttgtaggaaattgatttgagagcaaaacctgatgtgaacagatttgagagtattctaggcatcttgtataacacttcattcaatgctttgtgcctcttgctgcacagatattaacattcacttatgggccctgccccatcccctactggggatgctatgcaataatcagaataatcaaactaataataataataataattggaataatcactgagtcattgtattagtccgttttcacgctgctggtaaagacatacccaagactgggtcatttataaagaaaaagaggtttaatgtactcagttccacatggccggggaggcctcacaatcatggtagaaggcaaaaggcacatcttacatggcggcagacaagagagaaatgaaagccaagggaaaggggaaaccctgtataaaatcatcagatctcttgagacttattcactatcacaagaatggggaaaactgtccccatgattcaattatctcccactgggtccctcccacaacatgtgggaattataggagctacaatttaagatgacgttgggtgggaacacagccaaaccatatcagttatctttctaaagtgagacaaaaagtcagaattctgtaacacattttttcccaagcgtttccaaaaaaggttggctttaatggagtattagtttgctaggcctgccatggcaaagcactatgaactaggtggctaacaacagaaatttattttctatcagtgttggagtccagaagtctgaaattaagagtcagcaggattctgctgtctctgagccctatgggaatatcctttctggctcttctagtttgtgatgtttgccagcagcgttctctgttccttggcctgtaaatgacaatcttctcgttgtatcttcacatcgtctttcctctgtgcctgtttgtttctgtgtctacctttcccctgttcataagaacaccagtcatattggatcagggctcaacctaatgacctcatttctttccttttctttccttctttctttctttctttctttctttctttctttctttctttctttctttctttctttcttttcttttcttttcctttctttttttctttctttctctctctctttctttcttctttttctctctctttctttctttccttccttccccccttcctgcctccctccctcccttccttccttctttcttttaaaaatatttttcttttttttcccttccttcctccctcccttccccccttctccttccccttyctccctttcccccttcctccctccttctctccctccctccctccttccctccctcagggtcttgttctgtcatctaggctggagtacagtggcatgatcatggctcactgcagcctcagcctccctggcctaagcaatcctctcacctcagcctcttgagtagctgggaccatgggtgtttgccaccatgcctggctaagtttaaaaaaaaaaatcgtagagatagggtctcactatgttgcccaggctggctttgaactcctgagctcaagggatcctcctatctcagcctcccaaaggggcgagattacaggcatgagccactgtgcctggtgacctcatttgaacttgattacctctgtgaaaaccctgtttccagagaaggtcacattctgaaatactgggggaacatagttccccatcttataagatagagaatggrtcaagacgagcagctccattctttstttgtgtttaggccagtgccaagttcaagatcttgcctcagggctttcctggtaccmctgggaatgtgtatcagcagcagctgtgtcactgaatgggtgtcacctggggggctgcctgttcagacattagaagctgccacatcccctgttaactccatgtgagggaggaatcccttccctccgacaatttcgcctgtgagaatcaagtcagattttgcagtgagaactgagctgagtgtagaataagttcccgaggtacttctggcaccgtwgttactcccccaccgagaagcccagaatgttcccaggtgtgttcaaagattgtacrggaagggcttaggacggtgcttggctcatataaacactcagtggcaaagaggttgatgcttaagtacacaggaagtgtttaccagtacacataattgtataccagtgagctccaccattcaatttactgtctgtccggtacattgaccctgtgaggcccactctcggtgtggcactgctaacaggttttattgttgcttactcacttgaaaagtgtctcccttggctagacctttgtcctgagcactggacacacataggtgctcagcagcgtccctctctgcaatgcaaaagggataccgtgtgcctctgcatgtcagctctagtcctggcatcccaggagcatacggtgacagtggaagtgaagygcaagccgagtcctgggaaccaatgtctgccagaattaattaaaagtaagcatctttttttccctggttagttaatccaggatgaattccctgagtagttcctgccgttagaacttgctctcttttttagttagacacagctcggtgttgcctccactttgacatcacgttcatagttcstgtgcttggccagaactgttttcagttgcaagsacatgggtgagactggtcaaggaattgactttcagggttccaagggaataattagttcagaagtctgtccccatacttgttttccagtacaatstgtgtctctgtgggtgttttyttttaaggctgtgtgctttataaactggagatagaaggagccagtttattataaaaaggataaaatataattaaacaattaaragtatgtctttatagccgggtgtggtggctcacatctgtagtcccagctacttgggaggctgaggcaggagaatcgcttgaacctgggaggcggaggctgcagtgaactgagattgtgccactgcactccagcctgggcgagagagtgagactccatctcaaaaataaataaaaattaaaataaaaataaacataggtctttggccaagtgtagtggctcccgcctgtaatcccagcagtttgggaggcagaggcaggaagatcgcctgargctaggagtttgagaccaacctgggcaacatagtaacctcgtctctacaaaaaatttttaaaaattagccaggcatggtggtgtgtgtctgtagtcccagctactcaggaggctgaggtgggaggatcgcttgagcccaggaggtcgaggctgcagtaagccatgatcttgccactgcactccagcctgggtgacagagcgagaccctgtctcaaaaaaaaaagaaaaaaaaawttatgaagtactggttgggttaacgtttcttcttctaaccatgagggaagtaggtgggctgttctggtgactcagtgtcctcccagactcactcatgagaggaagtattcayggactgtggtgatcttgtcttggaatttttttctttgcctcctggcctcacagccgttccttttcttttacacatccatgaaagggagactctaagatcttccttgccaaggttgttgtagggatgagcgatgatgtctctgaggcaccaggcacggtgctggcacccagaagctgcttaatgatcctggaagttatgaccattgctcatagtttttcctacgtttcagatcatccttaaataattgtcattggctgggcgctgcggctcacgcctgtaatcccagcactttgggaggccaaggtggttggatcacctgaggtagggagttcaagactagcccgaccaacatggagaaaccccatctctactaaaaatacaatattagcccggcatggtggcgcatgactgtaatcccagctactcgggaggctgaggcaggagaatagcttgaacctgggaggcagaggctgcggtgagccaagatcatgccattgcactccaacctggacaccaatagcgaaactccrtctcaaataataataataataataataatawcaacaataattgtcatttatcagcttcttcgagctcttaatatatatatcgccacctttcacaaaggcaaaatctgcattagaaacactgttgtctgattttggttcctctggaggaggggtagacagtctttttgtgggcagggtctgtgtctgtttacctctattccccgccccccactttggtgcccaccacagtcccttgtgtatggtggatgctccttgactatctgaggaataaaatcaattgtgaaacagtttccaaaaagggaacagtttttgtttccccgtttccttatagccttgtgagttgctatctctcttggctctattattaataacataaaagaaagagctgttttcttaacctctggtagttgcacatatatggggaaaaggcataagaaaatatgctggcaataaagacaagtcacagattgtcattttctttggtgactgaagggatatttcagtaatttataggtgaaatyttcctttttgtgacttccactgaacaacatttttactaccaaaagataagggaacaaaattttttaacaaactatttaagcttaaatatttaaacatttttattagtcaccacatattaataaaatatttttattagcacatattttattagtcaacacatgtgtacacagctctgatgatctctatgtagatgcctatataaatagctatatagatatcatcagagctgtgtatatatgtgttagagatagatgcacatacagttgccccctgkctcccaggggtctctgtgacccaaggttgggaccctcaagtgactagttatggatggcaaggggggctgcaaggccagagttggtcctggctagagatttcaagactcgagtggctgggaaggttttagaatgcaggtaaaccactagttgctccaaacaacaaaaccatcataatggaagcatccaaaagtgtgttcttcggcagcttcagagactatgcctaagcaataaagttttaatgtcttttttagctgcttaggtgaagaatgcatttgactgtaatctaacccattaatctcttatttttgctggaaaattgtacatatttaagagtagtggctcattgccagtattggtgatgagtgatatattttaaastatgcttcatacctttcagtaaatcttgggctgaaagatatgtacgttttgttttcaaaatttttcagtagtcatctatttaggtcaattttctgggcaaacaaaatatttgaagccctttagggtttgttattgagatgtaggctggccatgaaattacagggttcagtacctcattgaagtgtatatgtaactgttattagttttttgataacttttttatactcataaaagtagtacttgcttacagtagaaacttaataaaaaccataaatggaaaaataaaccattcgtaaacatcatatagagagaatgactattaacattttagcctaacatgattttaggggtttataatattctagtatatgattgtaccataatttatttaattgcttcccaattattggactggaagtttgcttctaattttttcttattatatatgatgctgtartgagtaccttttaccagtaaatatttacctgcctctctgattacttctttgggattaatccttagaaataaatttgatgaatcaaagggcatcaaccctttgaatgcttctgatacttctgccatgttgtttcccagaaaagatataataattattccttccagtagtagagtattaaatgtctgcctctctttagaaagtattaccttttttcaatctktgacaatttgttagataaaaacttcagtttcaatattattgcatgtattcatggatatttttcttctcacacattctagattttttctatattgtttataaatgttttataagtgttattactttattgaggatagaaattattatgtaacacttgatggtaacagtaaaagtggaaaagaatgaggaaaccttcaacaaaacaagttgtcattaacaaaacgggttttgcaatgcaactttctgtgggttagctaaatctttagtgtgtcaggtagtcgaaagaaatttgctgtatagtgctgtgaaatatgctgcatccatgagccctctgctctttgcccatagggagcaaagacacaatctttttgcaagctgtcccagtgccatattgaccatcttccttttacagcaaaragttattgcttcctttggttaaggttgggacacccctctggagrcacacttgaaaaatgaagacctttctcgttgttcttctgttatccaagtatcttggaagaacacctctatagcaggtagacaaggcagggtgtcattgcaatctggctgcagactgaatgtaatcccccttgacattttgccccttggaggcaactcctgccctcccctctccccttacgaccctgcccccttaaaatatgtggagctcagcaaagactatttattctgataaaaatgagcaaataataggtgtgaaagaacatggaacacttcagtgaatcaaatggagaggattaagcattaccccaataatgattggwcaggacgactgtccytgtggagtgtgtcccagaagggttgagcaatggagcaaacccagaaaatctcattctcaactctccctgacagatgacctcgtctgcgctgtcttttgcttcatggtgatgaaggtggaacaagacccttgaataagatttccatctctgaattctttaaacccatttgagatcagtgcaggcctgcagtctctctattagaactggagcagaggcccagaagagagaactgaattttcagcactggattctatgttgagaatgaaagagacaataattgaaaagcttttctcttggaaattttgcaaaatccgagtggatttttgaccaggatttcttggtgacctctcctgagagagcaggtgcctgaggatttcctgctgagtatcttggcatctgtcagactccttatgacttcattttagttcagggagtctgtttcctagccattgatttcatgcacaattcctggcatgtctcatatctctaaggtgatgtcacccttgtatttttttttcagatgtaatcttttatgtgacagtgaggtgtcttacttgtgagtgaacagctagaacctcccaagtggtttttcttttggattttgtttactcagtgaaaaatactgaggaacctgagatccttcagggtgcattttggtgtctgcccaaccttgacgtggatttggaggccaggctcaatgctcgaacttcttgttggagtggcactaaatcattaggatccctgaggacagacagttcaggccatcattatttggtaggcccttgcacacttacacacaaatgcatcattatgaacatggagcagaagattctagggccccgtgtgtaatggcacaatttgtcaagaggcctgagacctggagttggcatggattccctctcctcctracccacctacctgctacattcagttggccaccctgttcttttgagtccacctttggatgagtagtcagtcctttctgatttttgccacctctgcattcagagctttcttattctttggcgcggaggccttccgttgggtcccactgcctgctgtmttatctccttctaatgaatatgatcatgatttttstgtatttagacaactccacgatgaggaggatgatggcggcagctaacatttatgtatgtatgtatgtatgtatgtatttagagacagattctctgtcacccaggtgcagtggtgcaatcttggctcactgcaacctccscctcctggattcaagtgattctcatgcctcagctccccgagtagctgggactacagatgcacaccaccacacccagctaatttttgtatttttagtagagacgagattttaccatgttgtccaggctggtccggaattcctgacctcaagtgatctgcccaccccggccttccaaagtgctgagattacaggcgcctgcctccacacccagccagcagctaacatttattaagtgctcactatactcctgccaagcactattataatttgtcttctaacaggctttttataagggaagtgctactattatacccattacatagatggtaaaactgaggcacagagaggctatgtaagtttcccaaagtcatgtactaattgatgaagacccagggtttgagctctgcaggaatggccgactccttgtggtttgagcctgggctccctctccatctgtcttttctccctgagccctcctgactgcagccatgccagactttttaatgttckgaaccccagctccagcctatcactggagctctgcctgtgatctttccacctcatgcctcccggttctatgtgtgcsttcagactccatctggcagtggtatctggatggaccagtgcatagaaatcacatgagacactcaataaatgtagactcctagtgattctgactagcaggtctggggtggggccaggtacccagatttgcacgggaagtcagggaccactgctgctgactgctyttttcctgggtgcttggcacactctgtcacaatcatgttttcatttctctatgttccatttcaactggatagggacagtgtcttttgtttctggaacctgtctcttttcttggcatatagtaggcactcaggaaatagaaggttgcttgaatcctagtaccagtttactatctccttggaaagactgaaaggtagaatgtgatgtctaagcagcttcactaagcagagaaaacaaaaagtttgcaaaatagaatttgccttttaatctacatgttcttgcgtagcattgagcttcctagagagtcatattcatgctagccctgagttgtatcagcagcagccactagaacggtaacttgatgccaagagtgaattctgatgagcttcattgtgagtaagagtcccagtttgatcatctctacccagatcccgtgggacctccacactgtatgaataatgaggaggcgtggaatacgtagcatgctgcagttggccagcacccagtgtgtactgtgaggtaatcagtgtcaaatcagtcattgtagcaggagttgggagtcaaaaggagcaacagagaacctcacacgtctcctaagagaggaagcaaagaacagttaccttggctgtcatttatggggcatttgtattgtatgtttggaatggtgctgggtactagtattaatacatgattttctctggtctttgcaaaaactgcctgagttaggaattgtcattcccatttcattcatgagyaggctgaagttaagagtggttaagtaccagctgaaagggaggaggagcctgagagcaatctgggcacccgttytccccctcttcttatttatgaatgaatgaatgagacagggtctcactctgtccgggtctcactctgtcgcccatcctggagtgcagtggcacaatctcggttcgctgcagcctccacctcccaggctcaagcagtcctcccacctcaacctctgtggtggctgtgactacaggtgcrtgccaccacacgcagctacattttttttgtatttttttgtagagatggggtttcgccatgttgcccaggctggtcttgaacccccgggctcaagcgatctgcctgcctcagcctcccaaatggttgggactacaggcgtgagccactgcgcctaaccctctcctcccctcgagcttacatcctactgtcctgtagccagctccaagatgttggcctttggttctctcttcaggctgaactctctttcagggagtttcctaatcgatcttccatagagttgatcataccttagtacctacctggatgagcactcaagatgttacatattcccacctgacttctttattactgctggaagatatggtgtcccacacctaagtatcccacccacagtccccagctgcatgtgtcgattattgtgagctattcaagggatacagactgaggtaaatgaaccaccagtggaagaatgtggatgttctattacaggaaatgcttagctctttattgcagttatataatagccggcaatcatgatagctgaggggcataaaaatgagagcaacagagtttatgrtattctttataactgtggattctgtatgtgcgtgtgtgtgcacgtgtgttctgcatgcatctccayggcacattatctggaggtaacatgatcatcaggccttgagctcttttataagcaatagattgtggctggaaattgaaaatttagtttstgtagctagaaaatactcttttcaaatgccatctagaacagtagttctctgagtgtggttcstggatcaggagccttggtatcactgggaatgtgttaggaatgcagattcttgggttctaccccggattgaattcagatttgggagcggggcccagttatstgtgttttaatcaccccctcccccaggtgaatctgatatgctaaagcctgagcctcactcccctggaaagtgacgcctgattcatctgccagcccatgggcacccattaggaaggtgcttatgggagctttgacctgggctaggtgccggctcttgatccatctttttctaaggctgagggtgtccatagaaggagaagtaggtgcatccgcttagatgttatttaaccaaataaaggtttacagcttacagaaaagaggcaagattaactaataccttccaaaccataatgtaaaaaaaaaataaaaaatatttactcataatggagtataactgaacaaatcatgttgctaatttttttaggatatgttttgtagcttccattcagatacatcttatgggtaataaatacacacgtgaacacacatatgtgtactaacaatatttttcagacttttgattttttagatattgagtatagccttgttactaccaaacttttatcatacttccttgtgaaaggatttcatggcatatttattatttgaaatatcaaatagaaatcagtacagtctcagcattttaagatacttgatgtaatctttggaaatatcttagacattgcaaaataagggttaatagtcatagtatagccactaacgggcagttctgaaattacataaagttaatctgatgaactgatagcaatcagtttttggctatacataactagataagtgagaatttagagattgaatacatgagagccctttttatgattttcaggatctcaagtatgaagcaaaataaattcttctataccctaaattcttgcaaagtgatattttgattagatttgagctaccccagggctagcaatacttgaaagtgtgactagacttaacctcttagtagatagtccgcagtaatcctttgaaatatacatcttgctaaaagttcctttcccaaggaaataatgattaaagataatgtgatgtgtacaaggaattctgggacttgtagtcgagaaacctgaactttaatctagactactcaaatttataactttaggcaaatctctcttgactttctaggctttagttttctagggttttgttttgatttgtttttttatgtttttgtttttgtcttttttttggggggagggtgttgagacagagtcttgctctgtagcccaggctggagtgcagtagtgtgatcttggctcaccgcaacctctgtctctcaggttcaagcgattcttctgcctcagcctcctgagtagctgggattacaggcacctgccaccatgcccagctgatttttgtatttttagtagagacagggtttcaccaggttggccaggctggtcttgaactcctgacctcaggtgatccacctgcctctgcctctgaaagtgctgggattacaggtgtgagccacctcgcccagccttgatttggtttttaatctgtaaaatggtaggtgttgggtcacatgaacaatggctcttttacctccactaattacctagacgctagaaataagaatatggataagacctaaaccaaattttctagctaaattttgtaaagtctgaacaaaatctgtgtgcgttttaatctttcttgtaatcttttcagactctgnctttaaaattatatatatttttagcttctaagtaaacattattggcactggttttgataggaactttactccaagtgtattgacttagtagatatgttaaaaaggttattgcttagtttgtggaaataatmcaagctgagactttaactgatatttgtattttcatttaggttccactgttttctcttttgaatgaaaagtataatcctattaaatctaaaatattttcttacagtgatccgtatgtgaaactttcattgtacgtagcggatgagaatagagaacttgctttggtccagacaaaaacamttaaaaaggtaggtgtcgatctttaaccaaatgtcatttaagtcataatttaatccaattatgcacagtcatgtgctgcttaacacctttttggtcaaggatggactacttacacagtgatagtcccgtgagattataatggagctgccatatacaagtgcatcactttttctcttttttttttttttttttttttttgagatggagtctcactctgtcgcccaggctggagtgcaatggcatgttctcagctcactgcaccctccgcctcctgggttcaagtgattctcctgcctcagcctcctgaatagcagggattacaggcacctgtcaccatgcctggctatttttttttttttttttttttttgtatttttagtagagacagggtttcaccatgttggccagactggccttgaactcctgacctcaggtgatccacctgtcgtggactcccaaagtgctgggattacaggtgtgagccaccrtgcccagcccactttttgtcttatatactgtattttcattttaagtgtctttcagtattaaatctaraagttttccaagacttttcagtactaacccaagatagtgattcaggtttttacttaaatgcctacaaaaacagtatcctgaaaatgtcataagttgtaacattttttcttgcacagaatacagcaaaaacaaggatttgtttttgkctttgtatgtttcacaaagaaacttaaagtaatttaaaatacatttaatgaaatggagctgtttgtggaattggtaggcacaccaggaatagtttaacttgaaacaactatttctaaaggaagcaaaatacttggttagctacatggaaatagagaaaatatattaataataaagctatacatgtatgtatatatcttattttcctaatttttatgtacatgatttcattaaaaatttgtttccataagtatgtcttttagttatttatttatttagtttgagatggagtgtcactctgtccacccaagctggagtgcagtggcataatctcagctcaccgcaacctttgcctcctgggttcaagtgattctcctgcctcagcttcctgagtagctgagattacaagtgtgcaccactatgcccagctaattattgtatttttagtagacgtgggattttgccatgttgaccaggctggtctggaactgctgacctcaggtgatccacccgccttagcctcccaaagtgctgggaatacagatgtgagccactgtgcctagccaataagtatgtcttaatttgcctatctccatgtatttatagacatatgtaatatatatatatgtaaatattttttaccctatgtttggaggctttattgaagatgcatgttctctattaaaaatacttggctgcatgtggtggctcatggctgtaattctagcactttggaggccgaggctggcagatcaattgagcccgggagattgaggttgcagtgagccataatgatgccactgcactccagcctgggtgacagaatgagaacctgtctcaaaaaaaacccaaaaaacaaaacaaacccctttcatctgtgctttagtatcatttatgggttactatgatttttttccttacctcctttagaggcgggtgcttagatagtctaacactttgctgaacattttctggacagcatgagtgctttaaaaaattgtaactgtcttgctgccatgcaggcacccaggatgcagccaggtccttttgtgtaaggaaccrtaactgcagcgtgtcctccacttggcattgggactggcattaaaaatctgttttgcaaacaggagccagtcttttgattagcagggaggatgcctgcgagggacggaggccattgttccctgtgttaggcgttgttgctggttcagtttctaggcgagtgggggctgtctagaaggctcaccaggaaggcagctgggaaacttggttgcctgctggatgtggagccaggaccaaagccggcgactggggctattgcaatggatttccttccaaagggaggtcctccttctccctccctttycacggtcgagggagtagctctgtagctgggtttgccctccttctcctgctgcccgcctcctggttcgtatgcctctgctgcgttcgggtgcgagaactgccgtcatcctcctctccttgccgtgttgtgactggktcttcgttcgttttgtgctctcctgtcttgttgctttcctcgcctgtcatttcccatgtgcatttccgygaagctgccctccgggactgcagccagaggcaggccaggcctgctgctccactcccctcccctcgttcattaccatcsttggcttcattcacatgggagaaaagtatgaaccccattatttaggattgaattcactgtggagttgtgggtggggaaagtgctgaatttttgaaaacgccggttcagtgttgtgtgagctctgtgtttcctatttttatgttgcactctgttgatttttttcatctccctgaactgatctattaaaggaaatagattgataaatatcattttgactaaaaatatctatcgctgttggtgaartgatgrtttttttttacatacaatttttaaragctgtctttaagaggcttatgcatgtgcasatgcatgaacacacatgtacagtcttccttcctakaacatgcttcctcttagttttgggggatatctggcagtcctttcttccatgctgaggacaaaggtatccttgccatctccttgtgagatgtrcatttaagtagactgatagaaagatgaacasatggatgaatggrgaggaagactgaaggataagtagacaagtattttttaacctggttatttttggagaaaaaaataattcacttttggcttacatttggkctttttttttcttgttataaaatctgatcctcagtatagctctctataaaatgttaagatttcaatatttatataaacaatgaacacattcaactttcccccacctgcttcgttactctgcaaaacagatttgtagcagggagagggaagtcaacaaagttcatttccttcttggtagaataatcatatcaatgctaatttcttgaagaaattttttatattttcacgatgactctttccaggcctttgatgtttttccttctggtgatagaagcagtttaaggtttcatacctatgaagcatctgtttcataaatacattccctcccsctccagtttggtttgtacgctagtctcaaataatcgactaaatgcttctcttagctttttttaatcaaaaaaatgtttaagcaaatatgtagactgtattgtactagtaactgctaatgtttgaaagactaaaagatactacaagataatttctcttccagacactgaacccaaaatggaatgaagaattttatttcagggtaagtttttcattgtttggtaataattgttattgatacgtctaggtcgattatcacagtcaattcatcttgaggaaaagctcttaaatttttaatgagaaattccttttaggatgaaaaataggtagcctcctaatgtgtcccaaattttgaaagactagaagtagtggtcacagaatccggacttgtttcattggggagtgttttggagaagtcaaaagaaaattatccaaacaccatgtttcatcttttgaattcaaacctttctttaagaaataagataaaatatcatttatgagaatggtttaattctatgagacgggttatgaaatattttagagagagtaaaacagtagaggcaacatgattaaaaagaaacataaaaattaccagttatattctagttagggaggaaaattttggtaactgaaacacttgagtgcatatatatgtgtataatataaaattacttctggaatctaaatacaacagaattargtaagatttcctcaaccttttatatttaatatttagaatagctatatgtcgaaatgactgaaatatgtgaattagcagagatttctgcttattgagcatttgtggttgttgctgtgttttactactgacattttggaactattagactgcttagctatttaattgaaagaaaggactttctcttcaaaacgaaggtatcttaattgtatagctgtgatattaaaaactgcttacctccagaaataatccaggtcttctgattagtgcagatttccaaaggccagtattgccatgaggcccattataattggtcctgatttcttcctctcaatcgcaatagtattttttgtgctccaaacttgggctactacatacagcatctgctttccattatgctcagagctgaaatatggcactgatactttcatacttggtgaaatcmtatgtacagcctccaccagatgtatttgaaattaccctgtggaggactgaaaagctaataggagctgatagatgctgttggcctttagttaactctgaaatatagctttccacttgtgaacctccaaagtgtttagactcctttcagtggaacactggcacagttacataaatgttagtacatcccatacttttttcagctaatcttggcagtaggcacatttaagttctatttttgttagtttttctgaaggttttttttgtttgtttgttttgttttgttttgttttttgagatggagtctcactctgtcaccaggctggagtgcagtggcacaatcttagctcactgcaacctctgcctcccaggttcaagtgattctcctgcctcaacctcctgagtagctgggactataggcccgtaccaccacgcctggctaatttttgtatttttagtagagaygaggtttcaccatgttggccaggctggtctcactctcctgacctcgtgatctgcccgccttggcctcccaaagttctgggattacaggttcttaaggtctttatatttattcattttacaaatctttattgagtgcctattatgtgccagctcctgcctgtagcctgtggttgcattggtaagcagtgtgacccttcatagagcttctaaacagatagcaaaccccatctgcttgttctgtcgctaggctgcaggcagaccacggaccagaagcacaagctgagctctctgtgcttgtatggtcaagtgttatttcatgcattccccaccatgaagcagccagggcctaggtcacctctctgctttaccatttagagcctttgtgaccctggaaaggccacctgaggactctcaatctccctgggatccttatctctcacataggagagagaatccttacctgcaagggttgtttcaaggatttgcatgcgatgatgtaaatgagaacatgtagctctatgtcacacatgtggttggtgcttagtaaatgatacctgagtttggaagatgatatgggccattttggtgaggttttggtaaggaaaaggaagcaaaaagatatggaaagcccagtagctctgtcattgcctcacagttccaggtctctctcatggttcacagtctaggctctggagacaggcagcatagacctagtgcaggtcctggttgccctacacattagctgtgggctcttgggcaagttacttcactgaacctcagggtctcggctcctcatttataaaattgcgtgatagttatacatcataggattgctgtgaagattaaaggagatcatgggttgttgatatttaataacaagacagtgcctaaaaagtaagtgcacaggctgggcacagtggctcatgcctgtaatcccagcactttgagaggccaaggcatgcagatagcttgagcccaggagttcaaaaccagcctggggaacatggtgaaacctcatctctacaaaaaaatacaaaaattagccaggcatggtagtccaagctactcaggagagtgaggcaggaggatcaattgagcctgggaggttgaggctgcagtgagccatgatcatgccactgcagtccagcctgggcaacagaacaagaccgtctgtctctgtctgtctgtctgtgtgtttgtgtgtatgtgtgtgtgtgtgtctctctctacacacacacacacacagatacattcttaagctattacaatcttcttcattatttttatcattactattactgctatcaggactaagaaatatcctcaggcatagacattttttgatctacagtcatgagaatgccttgtacagaggttaggaacccgtcaaagctatttacaactatcctttcttattttagaaaaacagctaagagccttctcttcttttgctatgcctaaatttggggcagaataatatagaaatcagtaataggaaatttgatttagtacacatagaattcccagaacagcaggataattgttcatattatacaattgagttgggcgcattgtaaagcagtatgttattctttctgttccttacgtcgctgttcaaatgattcctgctcgtttaaaaaatactatttatgttccttataggtaaacccatctaatcacagactcctatttgaagtatttgacgaaaatagactggtaagtggatgcctgtrtttgaattttgcttcatttttttattaactggattttcagagcagcgtctttaaaactctgtgtttatgttgtacttaggacagtatatgtgcccaaaaagaagactgtttttgtcccactacgagtttgatgttcaaaatcctaacaaatagttttrtgttgctaggataaaaaatgtatttgtatgtgtgtgtatttttattgcagttaatgttaacgaaagccactggtgatagtaccagcccatatgctcatgctctaatgttgggaatacagaacggtaggcagatctctaaagaggccatcaggaatgtaaacaaactttgctcggtttttaaatgaaagccagaccatagtactgggatgcattcagtagcaaatctatggtaattctctcagggaaaataacaatctaattaacaacgtatagcaaaaagtgaatctacatttagcaggtaaagtcaagccgtattttaaaagtggttgccttcttaagagagaaccttagaaagtacctttaaagaaacaaagatatgcctgaggcatataacagatacaaactaacattttatatatagattgatgtatatatartatgtktatgaagatcgacacatacataactgaaataattatgatttcattttattgtttttaattttttttagagagagggtctccctctgtcrcccaggttggagtgcagtggtgcagtcgtagctcactgtaacctcaaacccttgggctcaagcaggactccaggatagctaggactacaggcatgagccaccatgcctggscagatttcattttagaaatggaatttttgaagcacattttgctttcttaactatctaaaacgtgtacatcaagtagctgtgaaccaggtgttccaactatgaaaatgaacactatcatgttaagtccttaaggtaccttcagaagtgacactataattcagtgcagtcattctcaaatttaccctctctgaaacttgtatggtatgttgactggttaaaaggtgttcttaagaatcctttctgcagtattcaattgaaactccagatttttaatagctggacgttaatagaatatttgaattggaggagccttatacaataactcatttaactcctgttrttgtcgatgagaagaaccaggtctagagcctttacataaacacatcagtcagtggaggtgccagggtctgacctgctggcctcctaagtcccagcccagtgatagtttgggaatgtattgaatctcatatgattagtattattctccaaaagagaaaactaacagattttggcctaccatcctagtatcttttccattaaagtatgggatgttgggtgatgaacagtcgtacagtgtaactaaaccacttttgttgtatgcatcaaagtactttcttgtgaaattggatgagagattctgctgagggtgcagttcttgtctctccatctctcatccagtgaggaccaagtgagttaagcagtattgagtagtataacagtacgttcctggagacatgggtgtgtctgtagactaatccttattctccaattattgagtataatatctcttgtttaacatgaggaaagggtcaaatttgaggaaaaatggcctcttgtttgatgtgttttagttcattattctcttctattaagagaaattcactgttaaaaaattgtttcccatttccgtatctgaaataatgactgtagttgaggtgatcttgccctgggtctgaaatcatacttccaaaccaaaaaggactttgaatacaaaacttttaagaaatcttgtatgaatacaagctatatctgaaaaattgtgttttataatattgatgcctagttttgccccaggccatctgcagtgtggttactatgcaaagaatgctggtgttgctgtttttttttttttctttgttggctattaacccagcggagacaatatgtggmtatggtagtacttggaagttctagcattacacagactagcttccatttctctcatagaggtcatttttggcatttaaaacacatacttttagaaaacagatttggatgtatgtaaacacagggttaatccaccacactctggatgctagagctgttgacaaagtcatgctttgcagattttaaaataaactttttgttactcttacagcttggtattttcccctcctattttttttacctcctctaaataaacctctttgttaaataattgatgtttctggatcatagaaaatagtaagtttaaaatacagaatatttccaagctaactacaaatctgatgacagttttttgagtgtgcacttttccttttatttcttaggtcctttttggtcctttgcaaacatagtaagattccatatttgtgtcccaactgtggtaatattgctgacttcttactggaaaacagtcagctctaggtagcatttcttctgtgtggtatttaagttaaattattaccaaaaaaaaaaaaaaaagcccacatgcactcccttcttcaattttccttttgttttttgttgtttgtttgttttttggttgatgttttctttcctacctgacatatggaagacaatgttttctccagctgggttcattttctctttgaaaaggagacactttggtgtctgccagtcatatgtgagctacacacacgtatacaccttttaaatgaaaaatgctgtgatagcaggagggctctgcttggctaactggttgtgtagcaagtcgggccccctcccctccacttagctattttgttacttgtagatcctgctctaattatttagcattaaacggacactaactctgtagggtgtgtaatcgtatttatagtactgttttattagtttgcattccatcctggtagtgtagtgatgtcataaataacagaaacatggtatccgatgcttgggaaggggtttacccggtggccaagccatattttacttgtcattattccgtgtggcggaaggtgggaaaataccgtgtgtgctgttaaacatgccaggtccctgcactggttagacagagtctcagtgctgtgctccgttgggraagaagtgccctgcgaatgtgatgtggtttagatttatagcagcgtggcttgcagtgtgtttgctgccttagtcagctgtgagagcgccctgctggggccactcctttctgatggaaaagcagcagctgggaaggtgctgtttcaggctcttgctgtttaaaaaaaaaaaaaaagagcgagtaggggaaaactcctctaagtccagaagctggcattggagggggagagcgcggtcatgtggttctggccaccctaccctctgtcacagtgtggatgagagctttttgctcttatccaatcatgcctggaatgccgcttgccacttgggttatttctgctatctgtcgctcccggtgccgcagtgctaacagtttggcagatgggacactttttcttggartttgtgtctttggtttgtgacttctggcagtgtcgggcctgttgttgccgcttgccctagccctcctggcccccctggtcaccatggcccatcggcttcggtttcattttggctctggtcgcagcaacacagcccccgaatcagacatcctagaccaggagagagaagacgacttcttcatggcattccacaccctaccgcggagaagcagcccgcaccccttcgcccagaacggaggggaggacggcggcggaggcctgcagggaggcgtgggtgcgcttaagcggagctcgtccatgttcatcccgcagctcttgaccagcatcgacgcccgccccacgtgcagctcctccgtgcagatctccctgcagcgcaaggccacggacggggccacggacgggtgcgggccgcccgagggcgccgacgatgggcctccatgcgcaacgcccgaccccagggaccaggcctccgccactgccaccacgagggcctcgccccagagtggctcccgggagccctcgccgagggacacccccgggagctcccctccgagggcagcccgggacccagggctccaggtcaacggcacgtgcggccgccgcgtgcggtgctccggccccgtggactgcgcggaggaggctgccccgggcctgcgcatccagcaccgcgcctccagcgccgacgtgcgccaggtgaggctgctgcccctgggccccgatggccagggcggcccgsccgcggcagagcccaggcgctggtccctgcagcacgttccagatgcttctggaagctstggraagcggtgttttgtcttccagttgcagcagccccaacaaggcgyttcggggccagrcagcgacctcaactttggcttcacgggcacaaaggggsacaggttggtgaggtatcctcgcattcggctggagaggagcacctcgtaccccacgcagccccgaagcgagmgagggagccccacggaagatcggggagccctggaggcatcgcctcgagctggcaggatggctcctgaaatccgcaggacgaactccgcggagaggactccgcagggccaggggtgcacatttaagatcaggcaggatcagaacgcggggcagcagcattttagaattcttgtaacccgggggccggaagaagctccccagaatcccgaggagaaaagcgccaaaagccctgtttccacgggagctgacaccacggtaagttcacagcgtgtttacatgtgtttactgatttcaacttcgatgcttactctgcggcgtaaccaaaataaaacctcaccctctgttccgggagtttccctgcttcaggccagtggatctgaatgtttggccgagttctggcacgatgatttgtggtccagtgtttggtgcgcaaaacaccayttctgcaaatgtcttctgtaggtcctcaaagtcaaagaactttgtstgtttgggaaatccaagcagaataccttccccctgcttttatttttctgaatagaagaatttcgaataaaatttgttactttaatctgccaaaaaacaagtcagtgccccaacgtgmtgatgttggaattgcatttaaaaagctgcttgcaagtatagcctgtgacaatactttaaaaataatcagttctcggaaaggggaggatattgcaaaggacctcagtttcgtctcttaatagttaaaataggtgaacgtaaagtttagtggaatttgattatctgtcatggcctgtttgctgcaggaggtcaggtcagtcgttgttatataatktgctttgttttktgtcccattaagtaatactgaacgagagtagtgtcgcttgtgggatagtsacattactatcccacaagtgacactgctaagatactaacagatgcgtttttaaagcacattgggttatggcccaaggmtaggggaaactgatggggactcgttaatggtcagatggcgtggcgtgcaatttaacactgcacacttgagtgtccaagcmgaggatgstgtatatagaatagtaagtaccctgtctccagctgtggagaaatagacgccttagaacagattctggccttcctgtttctstgttcctgatcgctccctttcagtgaaatggagtacagagagacagstgcacgctccatcgaccaggcatatgatgactctgcagctttcgtggtttagagtggaatgaaaagtttaatcagtttggtttcttttastagtaatcamtagccagtgagtgctttctcmtaaagaacaagctccttatattttgaattggatattttttctcctgaatttcatgtgactgccagtttgaggatatgattagtaaatgtmtaggggacttttctttggatttcacttatgaattgtgattttgaaaagtgagcgtctgagtattactctagaattgtattgtcttttattgctttgtgttcagaaataagtttcgtctttcaagtaaactttatcactcctccatcattggttttcatcattttgaagatacaatcagatgcttaatgaaaatttatttttcttcttctctttccttccatgtatctcctttctttcattatctcaaactcttctattgggaaatggctaagtgctttgtcttggtctgaacctataccatgtattacacaatggtacaaattttgacagtgttttgatattatagtagcctttaacgcccacccccaacaaattaccatcatgacagttgtaggctttgttcggcaacacaattccatgctgaacttggaccacttaccgcatgaagattgacaaaaatatatttcctaaagtttgataactattcaattatattaccaaaaactgaaatcactttgcagttctgatgtggaagacaaagggattcatacaattaaactcaaaaaagttcaaactcatttggtttgaactttcaaatgtaattagaaaacaaatcgaataaactaaaacttatgtgtaccttgcttaaaagggctattctaacttgcaaggcctatgtagtgaaaaacaagtttctacacatttggagaatataaattctggaataaagagcttttcttggagagtaagttccaactagtgaacagtagtttgcattttcatatgtatgtatttttgtacacatacataaattagtacgtggttagtaagctggttttcttttaagcaaaacgatttttctttaaaaaacaaaaccaaaagtggtcacataacaaaaccgcctgctccattcagcaactttgtatgcatttcatatggacaggggtgttaagtttaggcagcagctgccaccgccttacttatcttgaaggaaaacattcacttgggcgtctacagtctggctgctaccaagcttttttggcgtttcaaatatccactgctttggtctaaaggacattacattattaagtttacatgaaaaattagctagaatctgttgcagtttggtggtggaatgatacggaaagtcttcctagatttgggaataccgctcgggattcatttgacaacgtgctcatatttcataagctatactttagaccttattacaagattaagttgttgagtacttttatctgtgcctcccaaacatcctgccatgactaaatctaaaatgtaacatgactccaaaaaatgttaaccaactaaattattagaaaaaatacaggggaaacccttgtgatgataagttttccacctggtttatcactgtcagtagacaagaattcattcgtatagtcatcaattataatcagttaaaaattttcagaattgttagaatttaccaattcagtctgtggcagtcattagtagtcatttagtgagtaatttagttattttcttataaattagcttttrggttattgggttctgagcctcttaactgcattagagttattctgaggaagttggaccaccatttaccagcatttgtgccccctttgtatgccattttgtgcataataactgtgaaactctgcattttacaagcttgaggagccagttttctaatctcattggtgttatgaagtactcaaggtctactgtgtatataacattacacccgttacttggaaagtttcagggactatctcagtgtcttgctgacacagtttgtaatgtaaacggagggaggagggcccacccggacaaaagcagtaattctaacacctactgcatatgctattggagaagagagcgttctttcagctcaagctctctggactttcctctgtgtcctctcagtggacatgtacttcacaggagtagtgtagtaatctcttgtgattaaaaattacttttattgaacaacaaaggaatatccaaattcttttcatttggggaaactttgagtctcttttacagaagatgtttttaatatacggccattttttgacattaatattagtcgatgtctgttttttaccctaaaaataactcgagtatccaatgtattaaccacccctttattttaaaacataacaacacaggaggcgaaggtgggaggattgcttgagcccagtagtttgagattactgtttctaccactgctctacagcctgggcagcagaacgagactttgtctcaaaaaaataaaaataaaacttaatattgtaatggagaagaaaaacaagtagcattcttttcattgacctggtttctgactggattcaatcaactttctttcttctctcatgtatagtaatgctctctcttaatgtggtcttagaataaaccaatatatatcttcaaatgtcacctgttttcagggatgttttgaaaagttggataggcagtgcacaaggttgacaccgatatgtttgtaaacagaaactgtacatggcttgcagcatagctcatgtttstgtagcacttcacaatttgaagaatgctttgtttatttcacttaatatgtatggctgtcccattgtggaggcattatctcacttgaccctcccatgtgaaatggtgttatttcactgtttcagatgaaaggatgtgataccgttgttaggtgtaataacattatgtgtatatcatagtgtatactatgataccactttgtgcacctataatgggaatgtgtatttatgtgtgtgtgtatatttgcacaattaaaaagtatatgttaagccaaaaagcagtttaatgcttcctgtgatgtgacagtttttttgaaaagtttagaggtggtaacttcatttggtgtcttgcagcactggcctgaaggtgagagaaggcttctttggggatccaaagagccgtcctctgcagttcactagcttttggtcctggagtacttagactccctctctaagcctattcctcatcagtaaatttgaggataaaaatgtccagctcgtaggttcatagttaggtttaaatsaaagtgtccatggaagtacctgattcgtgaaccaggtatctgtaatatacaagtctttcccctagcaggttaattaggttaattgtgaacaaccattttttgatcagtatggcatttaacacaaggacaacatgcatttatggcatacctggaaatgtttaataaatagctttgatgctctttctgttgtcatctcatctttcctaagtatttgtccctaacaccaaatacagtcttggaaaagaattgcttcctgaactatgcattatagaaaaggactcgtaagtatatttactgtgttgattttgaagccttataacattttggcttgcatttctagcatattttttaccatgtcattttgctgtaatatttccagtggttgagtctactgttactttggtatagactgaggcttttgagaaacaatatagtgttatatctacaaaatttccacattgtatgactttaaaatgagggagatatttgggaatatgtcttattttaagatactgtcttttagagagttttcataaatggtgcagctgcttctcttggctaagcctggtggcagaattcctagtcattgaaataaatctctaattttataatacatactgataagaaacttgctatcttttcataaaagttcacagtaccagaataaatttactttatgtaaaaactaccttaaaatgtaataaatgttggatagttgaatggtttctggatagttgatgaatatttctgtatagttgaggcgaatctaaatggtaatgctacttgtgcaactgtcaatgatctagcacattttttaataaaaataattacctgcatattactgtgggcgatacaggttagctatcctaaatacgtttttacctttttaactcttaattatattaagccatttgcaagaatgggaaaaagcaggaaattcataggtggtgttgaaattgctgattctacacaaaggtaccagaatgtctacatttcctctgtaaatgtcaaaggaaactttggaaacccacctcagagttggctggtgattattcggacaggttatcatcctgtctgcaaccttctagttctcttagttcataccaagcagcatgatattccatgtcctgcacaaaggagagcaccaaaacagccttcacctgctgcgtatgccccactctgaataaaaaattaagaaggccaaaggacggaatgtgttaaatattagcaaaagcaggtattgcagaatgtctatacatttctgggcaggtggagattattgaaagatttttagaaataatcttcgttcaccacattccagtgccaggccctggacttctgtctctatttgtgataaaatgtttttaagaaatgctggctgggcacggaggctcatgtctgtaatcccagcacttccagaggctgaggcaggtagatcccttgagcccaggacttcgagaccagcctgagcaacatggcgaagcctcatctctacaaaaaatacaaaagctagccaggcgtggtggcctctgtctgtagtcccagcttcttgagaggctgaggtgggaggatctcttgaacccgggaggcrgaggttgcagtgagctgagatcgtgccactgcactccagcctgggcgacagagtgaaactctgtctcaggaaaaaaaaaaaaaaaaggaaaagaaataatcttctctcagtgagcatgttgaatgcataatgttctcactggagttctcctttggaatctcttgattattcygctgtggcttccttgggccaactaggatacagaggagaataaatgagtaactcagtgagacaggtggcctgatgtgagtgggcctgaaagttagcccctgatgtcctggctggtttcatgccatgtcctaaacgggcactttcctggtctctaggcatcaccatgttttgacaggaagcttagtttctttcaggatggaggatggaatcaattgtatttcaagaagcctgttttttatgccctgacaattttagaactgtggactgttctgacacttttgagtacagtgattaaatctctgtgaagggacaggtcatgaaatcaaataaaaggacggatcataattgagctggaagggggccctcctatctctgatttgactcgttgctacactttagtattcggaaactttgtattggttcccttaagtgcctgcacaacctccctatttctggaaaccattcagtgtttgttttaatgttaagcattatgccacgtatccagtaagcagagcagagtaaattcctccaggtagcaagagactggaatttcccccaggcagatcagcttttcacaggttcctagagtttacacagccttcttttgtgacttaatttttgtagatcacagtgagtcaagtgacttttacttccctgtataataactttgaggagcctacttgcaacccacatcatcactcattatcttgcttacttctttcttgggggttagatgggctggggttgttattaagcatgttaaatactttgaaattcaaatcgtttctgatagatttagtttctctttcttctattggtcattcgagagctggtagacttttaaaatacatttaatgactcacacatgtcataactcatccatttccttgacattttcaagcgtgataataaatcctacttcttaggcttttttttttttttttttctctctctcatgttcttttcaaatgcatggctaggtagttacctcatgaaggaaaacaactgttttggtccagattttaaaaattgagttgaatagaaaaggtggggtggaaccagmaatactgaaatgtaataatgtatattaagctccaaccaaacaatccagcacttcttcaaatccaggaggtcttctggctaggagttacattgcagaactaacatggactcttaaactttgtaaggaattagtcacagttgaacactggaaaytatcagcatacctctgggcttcttttatatggtcttcctcatgagttaaaatgccttaagcatagtatstgttccatagsaccttactgattatgcttttccacttgaataaaagagatattaagttgtaataaaactttaaatattttaatttagtttgaatatttaagttgaattaacctcttacyacagtaattatcttttttgctaacttcttactacggtaattatctgcttttataaaatccagaaacgatgttatacacattagcacgcattattaggtgcccaaatgccaaggmtaaggacacagcaatgmtaaggacacagtgtgcctccggcctgcttgcaccctcggttgaaattatattagcaagagaagctcctgcattctgcagtatggcatttttctccagctaatgtatgcaggggtcatttttaaatgttagattcacagatttgcagagctgtgagttgccttggaaattatgctggccagttcctttaattttaaagatgaggaaagtgagaactttcctttttaaaaattgatacataatagttgtacctgtttatgggggtacatgtgatatcttgtacctgtttatgggggtacatgtgatatcttgttaacatgcatacagtgtgtaatgatcaaatcattacatactgaaatatttgaaatatctgtcactgcagacatttgtggcatctgtgtgttaagaacatcccaaatcttgtcttctggctgttttgaaatgtatagtaacttcttattaactgtcgtgctgagsacatggactactgtgctgttgaacactagaacttactcyttcatctgaccgtattttcgtacccatttaccaaccctgagagctttacttttgcagtaatagagaatattctttttctctcttgagtatgaaataattatttttgaataatcastgcacgtgaagccctatcyttcttgacgttggacatataaatacttagggagcttggtttatagagctttcagtttcacaaacagatgggacagctgaggtgaggcctgcmtagcagaagaagccttactcctgatagcaggcactaagcaaggcattgggtgacagattgcttatgcacaggctgggagggacaggaactgtgtcatggaggggcaagactggaactagatgctgaaaagtgaccagatttgtctcagtgggccagtgggaggggcctcattgaaagactgaaggtagatgtgcctcccagggatgtggtggtcatattggctccaaattgccttgttcattattagcaggtttcagcaaattatttttcatgtgaaacgttgctgaagatttcttgggtgtggctgtcatcacaaacaattcctctcttttccatcaaatgtggagttggatgaattccttccttgctggcctgccttccacaaagctgctctctgaacacctgccaggccatgctgaggacaaggaaataccaaggcacagtttctgccatttaatggtggtagcagagacccaggaatgcaatggattattgtcactttcattataacatcatagtgtaggatcataactggaacagagaggatgaagctttcttttggggaattgagggagggagacagggtcttgctctgttgcccaggctggagtacggtggcgttaagatggctcactgccacctccacctcccaggctcaagtgatcctcccacctcagactcccaagtagctggaccacaggtacatgtcaacacacgcagctaattttttagtttttgtagagatgggggtcttactatgttgcccaggctggtctcaaacccctggcctcaagcagtcctcctgccttggcctcccaaagtgctgggtttacaggcatgagacactgtatccaactaagtaggctttatttatggagtttataaagaaactgtttatatatacaggggagaatttatcctgaagaaaaactaaagaaatgaatattttaaatacgtctctgcatttctttttgttggatatgacatttatgtaagaaaaatgctaatctgtatgatatgagacatgttaactacatatggtacatgtatttaaatatcatatgtatttagatttagcaacaaaaagggaaatataaaccatatttccaccatttgaacaaatcgtattcaattatatgtgcatataaccatttgaaaaaattataatgttgatcggatctgcaacctaaaccaagtgccaaattaaattcaggatagataatttcatataaaatgtttcacatcatagaaaaagcagtgaaaattgagtatcagatctgtgaaggatgatacatttctaaccttagaagcagaaaaggaaatcacagaagttggatagattcagccatataaaagtattaaatttctgaaccatgaaaaaaataactaaaatgagggaaacaccagatgtttttcttagtgattcatgtaagttctcatatgtatatcttttcagtgtctaattatgtgcatattttggccagtgggtttgtatctctgtagaaagttctagtaaatactggagaaatactgaggttcccccactccagctctttcactccattgcaaagtaggtcttgtaggtgaatcacacaaacggattaacaagaaagacagaaatgtccagctcccaggttcttcattatgctgttgtgttgtgccaatagaaaatacaatatatcaaattggagaacttgtggttgaaaataatatacgcagattgctggtggcagtattcatggatgtgactttggagtgatttttaaacacttaagtatttttaaatgataagaccaattataggtactaagagtcttgtgttttgaagtgttggagttaatccagataaagttacaaatctaagcagacaccttattaagagatcattattctctgcttttaaagtggacttgctttctatatagttatgaagaacagatagaaatgttttaagattactggctactattaaaataatctggtgactgcagttatatctgggtctaaggcattagactttttggaaaatggatgcttttaatctttccttccgtatatttgtcacccagaattttaaaatttggaaatttcattcattcagtccagatagagaattgatcaattggcaattttattatttttcgctcatgaaaaactmtagggttacaagaatatgctcctgaagttaacatarttacttttaaaatgtctcaattctaatggttaggtattagtcctctgagttccggttgccccttaacttggatcttaatttacagtttacagaaaattgttcatatttcatattttaagatcatgtactctaaaaccctattatacttgaaatgaagacctgttatgttatactagaatctctcatgaaaatgtaacagttcccaaggaactttgtttctgtctccatggaccacactggctactgtactggatggagggcaaggcgggagctgagaggcctttgcagaagtgcatgtcgccttagtatgtggcagatcctggtccctggcctgtgctgtttccctccacaccctttgatttctccgaataccaggaaagatcatggattgtctcgggagttagtctcccccttagtacttagcctgtcattttcatgttgcaatgcctagaaaatgggaggtttttcttctccttaaggaagtgttatttcaagatgctttctgctgcctgtgtcatgccagggcgtgggtggatatatttttgcacttttgcaccagcgagtctgcttctgatttgcagattgcatttattataaggcgtattgtccattgatgaataatgtgtgggcattaaagcaaagctgatacatagcttttaaaatagctcatttatcctgcaagcttcacccccatagagaggcaggcccttcagaagcgttttccaggagcaaggtttctgcatgtttccctcagttttggaggtcgtcgttttttgcccctactgtgggggccaagggaaaattgctctgcgccttctgatggtcccctgaaaaatcaactgtcaaaagcccaattaataggagaaatgccatacaactttattaacgtgcatgcagattgattaccccaaccccccaatggggttcagaagcttctataccatcctgaggttataggaagaatggggctcagagcccgaccaaaaacagggtatggtggtcaatcaggttatggtggcaagaaagattcttggagggagagaagaggaggcctggctagcagaggtggccctgtcgtgtagatgaaacctcctaggtagcagccctcacagagaaggcagatgtttctttcagacctttaaagatgtcagactctcagtcaatcttccctagatctggacaagggagggccttagagaaagatggcctcccatcagtgcagtttcctccccaggtgcaaatctccccccacagacctgccctctgaacagccattcacagtgtatcaaagaggtatattttggggtgaaatatttttattcccttcacccctagtttatcatgtgtttccttgatgggctgagggcttgacagatgagcagatagacacaatcttagttcatggaaaaggcaagaatagagatgggtagcggagagtttttaagttgctgctgatgaaatagacactcctttgtctcagctactgaaaattttctttagaacgtggatttaaataaagaaagaaatagacatcatgctttgtaatgaagtcctttggtcatcgtaagtggtcacagccagtttatcctcaggcttctttaagctgaccagttaaggtttctgcagaggttctgtgtttgagggaggagaggaagtccttggggaggagggkagcgttctatgggagacagtgctcttgggagcattctttcaatctgatacccatgcaagggtgatgacaaggtatggccttcagtgactcagagcctcctcccttcccaagcctcaggcctgaaagtctggtgatcctccctggcagaaacctcactggggatcattttttccttttgaacaagtttcttactttgcctcatatgttccaatcttctgtcagtggccaggtgacatctgttggaatgctgatgtgtgttgccaagcaaaacagatgcaggaagacttgcccaaagtgggggaagagagggaggaaagggaggaaaagtgggaggtagagtgtgttagctggggagatgggatcgagcagtatttatctatagaacagatatcaaagattgggtaaatcatggcttaaaactctcagaaaagcattctaggttcttgcacatctttgcaaggctrctgaatggctcatttttatttcccaccctgcattcagagtggtgtttaaatggctcaccgcagcaaaaaggattaggtattacccttgtgctcaacacaagtctgtggtcagcagatttttaactttatcctagtttattgatatttctgtcagtgaacaggtttaactcttaatggaatakaatctaccaagaataatgcasactggataaaaagaatttcactgattttgattatttagcacattaaaggggacccctggccasaagtakatgtattgcttgggagaggagggcatagtacccaggtggtacttcagggattctgattttcagtcagggttgagaaaaactgatttaagaagttaatgctactgacagcctaaatctgggtttccttgataacctttggtgtaaatactgatttaatgcatttttttttctcacccacttttccttcatcaccccaaatctatattgtgttcacatggttcctctttctagaggtgggagatgtccttttatggctcagaggtccacaraataaacttgcattcaagcaaggttgtaaaatacctatgcattaagagcagtccagttgaatatttgcaaagcatatataaaagagcttctctcctaaaataactgaaatgaaaggattaattttctctcagtttcctactgcaagaagtaagtaaaagtggaattccaattctakccatggcaagaccggtctatcctgttatgtcttgtgtgccaataccacttttctccasgtaactaaagtatctccctgctgtaaatattaactgagtgcatttttgtggcttttgataactccacgtcttgaaagtgttggccasttgtcaaattttcatgaatttcasagaagtgggtaataggtggtttctctcacggtatttaaagcgaagtagtaaagaggaaaaagactgaaaaggtaacctgggtcaactcattttttagggcgcacagaagtgtggtagcggagcctggacatcaggtggcctgaagcccaaaccaccagctcccccagcacaggagagtgcaaactgtagctcagtcttggccatctggggtcttctgcaaatgaactgcccatagtctggccaataattcacactgttgtattgctgtctttcattctctcttaagtagagcgttctgaacayatctgaacaattttttgacacgctgttactctcctagccacaggttattttatgacctagtcattctttacataaataaacatttatcaacagtgctgtctgggcctagtaaggtatatagcctgctttgtttctgcattaaagttcttagaccgccatgatcttgagatgtttgctgcttattgtttctttctgatttctattgcttatcagttactactacttgtggctccaaggatagaggccgattccctcttctaatttgctgcctctcatctgcttgaagtttaggtgtttagtcaagctcactagcattgtttataaaggaagaataaataggttgagagtgaggacttagggtagttacctttttaataatgtatatgatctgtctttggtctttctccctcatatctctgctgattttactctcgtcctcctggaacgtctctggaatcagatagatttttgtaagatttggatgtaagaattcagtggaataatatatactagctgtttagcctagtgctcggcacatattaatgcttaataaatattagctcttattattattgtttttttccctgaaagagaaaatcttaattcctcacagatgtttaggaattggatatgtagcaaccctatccactgaattagtatcagcaaacacatttttagttcatcttgatttttatcttcattgggattatgcctttatccctttagggttaatgaatttcctactgtgctgttatggaagaaccctgaaaaaaaaatcaataaaatgtatccttaaaaaagattttatgattcacttgactaccaggtgtcagcaacttttatttttattactttaagttagaaggactttgaaggttttcgtggtttattctcttcttttttaaaggccaaaccaagatcactttttggtaatggctacctttcctctgaatgtatttctcaaaaagttctttctggtttttattaaacccamacagttgttataatttaaaagttacccttttagagtgagattagctagaaaagaaattaaggattattttaagtaactcagcaagtaaccttttccaagaagcttagattataaattaacgaaaaccaaattataaaccaaggtgtatggttgattgtgggttaagaattttatcagcagttttgctgttgtatgtaccagtcgtatattttactactgagtagaagaaaagtctaaaaatcaagtgagtagtttttccttagctggttatcatgtttgtttgatcattatattaaagtgctccttttatttttcgttttgtatgttttcccaacttaataatgaatgtgcttctctctaatctaatctctgaatttcaggagtctattaataaagtatgtgtaaagaattagttgctaattttggatgtggctgaaatgagattgtcagcaaattacaacttcaagcctaggactgcagtgttatggattgcacctcatccttggttattgaagatatattcaaaatttatgaaaaatagaaaaaccttattacttctgaatttttccacgttagactttccttatacttttaagatagtgaaagtgttattatataagatcatggaaagtttgtctttccagacctattttatgttaggattttacaatattaaattcataagataatagtagagactagaaaacaaatccttactgataatgaatttcctaagtagtaaatacaaatgaatatttatttgtaaacctgggtgattaagtaatagctgttcagtgatattgatggaaggaaattaatattatttaatccaaaggccaggcgtagtgactcacacctgtaatcccagcgctttgagaggccgaggcagatagatcgtttaagctcaggaattcaagaccagtctgggcaacatggcaaaaccttgtctctccaaaaaaatgcacaaattggccggtatgtgcctgtagtcccagctattcgggaggtaggaggtaggaggatcacctgagcttggggaaactgaggctgctgtgagctgtgattacaccactatactccagcctgggtgacagagcgagaccctgtctcaaagaaaaaaaaaaaaaattaatcccgaccttcctccaaaaaagaataaattaagtccagaaagtttggtgattcacttgctgttgccgcctttataaacataaaagtcagtaaggctaagggacacttctgaattccttctgctgtccaggtactgtgccgagttctagagatgcaagtagtacataagacagatgtggcccctgcccttgtggagactgcagaccatggctctttttcatgaatggtagagacactcatargtcaaatacctacatattttcatgaatgtgccaaaggaggcaaacaggaagctgagacaggaaatcatggggaggcctacttgaagagaggtaaggaaacccccaactcaggagtggcctgtaagctgaggcctgggaaggacccctgtgggcatggccagtggaactgcagcggaagcagccgttcgcccaaaggtcctgcgctgggaagagagtcagagatgctggaggatcagaaagggatcatccaagtgagtggaggagacagtggtccaggatgagcttaggggaaaacaggggcccctggattgttcacgctgtagaacacagtcatgcatctgatatataaatagcatggagataccctcagtagatgcaaaactcaaatgagctcagctgctctgaagcctgggaaaagtcagcaatttgtaaaattatgacacatccacattttcacaggaaaaacaaagactagtatgtaacatctcctttggtatttacagaggatctctctctctctcgttgttactcttacaaatgataggaggccacttttgttttccaaattctgtgccagatatcttgcctttcctgagatatagacacggtagagtcaggagtgtgtgtgagggcttgcagacttctttttatgtctttagaatccttcttcacttttgaatcatttggtccaggagtttaaggccttttcatttggcttttgttgttcatttgttgaacataaataactgtgttcattatgcagacaccgtgtcattgttgacaatttggtgttgtagattaaggcaacgtgaccatgtaacaagttgggcaaatgcacttatccattcagtgagctctaacctacaaggtgttttgcttcagaccaaaatggtagactgcagaaccttcggcgcggattttaagtccatctttaaaaccataggtagagattgtatctgtgtgttcttctttaattaaaaatgggaaaatgatgcgacagagcaaagacggccatggatcctttttatccctctcccatccacacagagagtttatttcccctcccctggagtccaggctggccttggggttgccctgaagtgatgccgggccctttctacacgtagcctttcaaaggaccggcagcttccacttcctgccttttggaaaagcttgctttagggatccagctgccacctaaaggccctgaagtgagccacgtagagagaagttccagctttmtagcccatctccragtgtcaggcaggtgagtgaagccatcttggatgctccagcccatcaccatccaactatagtcacataagaggccactgatgggcccagtcygtctccacactcctgagagttagtaagtggctgtcgtgttgggctctgaagttgtagactagtttgttagtgacgtatamccaaaagagagagtgtacttmacatttagtcstgggaggttcgaactttgcctccgcctgtacgtgagctccctggagtgtgggatgaaggagtgcttggcccagttgttttcccggaagctggaggagggcagccatgcacaggttgtgtagmccaaacagttcagggatgcacttggcttagacagctgataaacagctgcagtgcccccaagggagttgaaagagtgggtattttgttgtcaggagtagaattattcaccttgaagaacagaagatttgtagtttaaggaaattcaccatattcttaaaagttgcagaaagagaagagttcttagcctaggcstgcaccaasatccagttcttttgaatctgatttaataggcagatgatgaaggacttattcccaataataaagaatagttcaataggaggttggtagtcttaattgtcttccttgtcaaatcmtagtgaatttcacatcagatastgtgccstgtgaggctmtatcaccttagcacttggtaatacgttttttatgtagtaggtgctcaataaatgggttgagtttctataataatttgatttctgtagcatctgatttaactaagtttgctataaaacgaaatctgctattgtattcaacatcacaataagcagtatcagttgtaaatcatacctacatacagttaacccttgaacaaagtggaggttggggtgtcagcatcttaacacatagttgaaaatcttttgactcccccacaatttaactagtaatagcctactgttgacagaagccttactgataacttaaacagttgattagcatatatattttatgttataaaaattaaatactgtgttctcataattaaactagagaaaacgttaaaaatcataagagaaaatatatttgctatttattaagtggaaatggatcattgtaaagtctacatcctcactgtcctcacattgagtaagctgaggaggaagaggaggggttggtcttgctgtcacaggtgacaraggtagaaaatccttgtataataagtgagctcatgcagctcaaacccatcttgttcaagggtcaactgtacttgaatggatttttttccctgtcataattaaccacccacacacatcttactagaccaaaaaagaaaacttgtcaagcaaataatctcccatttcttgggtcatttggagagataacacaggccaggttatatgtcctgaaagatgagaatgtgtgaagtccccagagagtctgatacgaggccttcttccagggagtagtggtctggccgctgcaccagcctgccccctgccatgccctgactcacctgcacatcatgggtgctgctgatgcccaggcttcatggctgagcatggcacccttagcacccctcacctgttacccaacggagatttgtgggtcggaggcatttcaattggagaaggatggaatggctgagggcaggaaaacttaacaagcaggaagtctgcaccctggctgcacatgagaatcccctatgggcrttgaaagtagggrgagcattgaaggtagggggagcattgaaggtagggagcagtcaggtcccatttcctaagcggctctgcaggcctctaagcttgtcagtcatctttttggtgctgtgtggactagtgccagcaggaacaactggatagttttaagtctttggcctcttctgacactttttaaaccaaacattttattaaattctcattcaagttaatagcaaaaaaatattactactggtttcatgtttaggtctcatttgcagtttttwaaacaacctaacggagtatagtaaatacataaagtactcgatttaatgtgcattttctttttcgttttttttttttttttttgggtggggaggggggtggttttctgagacggagtctcactctgttgcccaggctggagctatctcagctcactgcaagctctgcctcccaggttcaagtgattctcctgcctcagcctcctgagtagctgggaatacaggcacatgccaccacacctagctaatttttgtatttttggtagagatgagttttcgccatgttggccaggctggtcttgaactcctgacctcgggtaatctgcccacctcggcctttcaaagtgctggaattacaggcgtgagccaccgtgcccagccctagtgttcattttctgacaagttctatgaaacctggtgacttaacttttctgaatctgtttccctatttgtaaaatgacaatacttgcagtagagtttatgtaaggaattaatgagggtaactttaagatctttgtaaatgctaatgtgttttacaattgtggtcagctataataataataataatattattattattattattaataaaatgcttactaggcgaagttaatagctcccacccattcccaaactacttaaggaggattttaagctggaaacagttaaggaaagccgcatgatgccatgagcaaagccttccatctgcacttggcatattgcagggtctgtagttgctggaatgcctatgtccctggttacgagccttgatatamttgtgctaaggcattttggtggagtggaccgtgtcctgctgttgatcaaacatttctgtgtggagagactttgtttttcccttggggagtatttattttttagtgccaggctccgggttggctgtgctacgcttggcttttcagtgccaggcatacaaccatgtcagaagggggactgcatggtaggtctcaggaagaagggccgaggaagaggagaaaagggacttggctgtggacggggaatcctgtgtatcttggcttctctgagccagctgtgcctcagaactttgatttgatctttgtaccccatgggtcctgccaggtgaggggcacaatggagaagagaaaaaaaaaaatgctctgctgaaaacataagcaacaaataaaatagaggatagtaatcstaggataatccccgaggcagcagagaaaggcaggctctggcttgcatgtcaggagctctcttcctgggggcaggagggagggtggtatagtcccagatgagtgcttggcaggttgtttagagcctggtagcagtgaaaagaaatgtctaccaggcatcttgtgcatgtggtagatcttgacttgtaattgtggcagtctcccctaggctcctcggcagctaggtgacagttgcctgctagttcatgggtcaccttctcaccctctggcttgcttctcagtgggtgtaaatggggtaattaaaacctgtggttttagactttgctccaaagactgtttctggggttctgcagacattgacctgaaatttatttttattatttttaacgtttaccacctgtgaagatactgtacatttaaagatataaaatgtatcatattaaaataaaatagcctgtatgttttacattttgagattctgtttatgctgtttttttaaaaagttagaaatgtattggcatgttctgatagcttatttttaactacttctccattgttgtaatatcataacaggttggactggctaggctatggtcagaaattgcttatcagtgttttatacatacccaagggattccaacacagggtgtccatggtcctctttgagaaaactttgtctaaaagatattgaatgatgcctcattaaaaactcctcagaaatattttctcctggcttgttttcgccttccgtgtcattgtttgagaaatatccaagattccttcttttttacaattaaaaaaaaaaattgaagcaagtccataatcccatgtagttctttgatagaattaaacttcagataggcataagaaattcagataggctttctctccactggaaatgcatgcctttcgcaatcaacagtgtatgatgtggtctgttctggagttggggtctgacccttcagcatggccagcgctatctgaagatcagaaaccctggaagccccttgtctctttttcatcttccacatctgtctggcgtccaggccctgcccctcctgcctcttcactgccactgctgtggccagcctcttattcagaggagtttcctacctggttagacacttaaccacctccagacggaccccttctaatccacgtcccacattatakctcaaaagtatggattttacasatcttatcctctcctgttctgccaaaaccccatacggtcctccattaccaatcaggtgaatcgacttgcatttcccagcgtgtscccacacccacaaacactccatgacactgggcccgtccctgcctttattccctgtggcccctgtgtgcasgagccttccctcccctttctatcagtccctcatgtacaggccttcagccccctcactctgccstgttcctacctccatcattgtgccatttatgtttgcatgtctgtcttctctgtcatatctatctcaaactaggttgaaaattttttgaagatggagattttcagaataaaattgttcacacagttatatatttgactgattatacttttatttttatttatttattttttttgggatagagtctcactctgtcacccaggctggagtgcagtggtgcagtctcagctcactgccacctctgcctcccaggttcaagtgattctcctgcctcagcctcccaagtagccgggattataggcatgtsccaccacatccagctaatttttttttttttattatagtagagatggggttttgctgtgttggccaggctggtctcaaacgcctggcctcaagtgatccgccyaccttggcctcccaaagtgctgggattacaggcatgatccaccatgcctggccgattatacttttttaatgtgttagttaagatgagagagtccaaagtgatacagcccctgcccccacagagcttccagtctagtgagagaggcaggtaccaaaaagataatgcacatgacagaatggactgaactaagtagtagtagaagttcaaacgaagaagaagacacaaatggataaaagctatggattctcaggattgaggatgctgaaaggctgcacaggatgaaaggtgcgaccaagggtcctgaaaaaggcataggatttatacttgcaaaggagggcatttccagcaagaaggcttggaaatgagaaaatctcgggagaataggcccatgttagaaattcggtacacgattgagaggaaaagaagtgccactggggaagtgtgttgaagcaggtatgtggatgttcttccctatgcagtggtgtcagtaggattttttgttggtgtgagatctgggatctgtttgtaagccgtctgagagctgggactttgcattgatcamctttttgttgcacatgctctgtgatgtaattggcactgcatgatttgacaagaatgtgttttatgctctaaatcaggagtgagcaaactttctgtaaaaggccagatagtaaatattgtggcctctatttagtccattctgaatgtacattagacacaagtttctaaagtacattcacaaataagcattatacacttagttgtaacatacacggatgttgagcagagaaaaagctctctgatttttgtggttcctgctctaagccaggctaagtggtgttgtcagggttccaaccccttccatccctgaagcacactcagcaaaccatctagtttataagccacagtgtgctagtaggtgctgtgtgtatttttttgcggggggaggaggtatttattttgtttttgagatggggtctcactgtgtttcccgggctggtctcaaactcctgggctcaagtgatccttctgcctcggcctcctgagcagccactgcacgtggctgcatcgcttttaaaggtagatgatgcctctggcctttctcattgcctctgggtgtgtggcccatgtcactgtccagcgcattccactgtccagcccattccactgtctggccccatgccactgtccagcccatgccactatctgtgtgttccgtgccactgtccatctgtgtagggaagagagcaccaggggctggcctggtcaggagagctttctgggcaggggttgagggaggcacatgtgagctggactttgaataaaaagaaaggaaagccaaggagcagaccgggcgaggctgggtgcgaagaccagatgtggcagggatttaggaggcagagcgagcacaagtctgtgcatattggtaggttctgtagacttgtcggttgtgcagtggattcatggagcctgtcgaggaagctacctgtgtgcttccactaggaaagcacagccacagagagaagatgaggggcagggaagcagtattgtggggaattcggagtgagggctgaatctgagaaatattattttaaaattatgttaaatacattattttttgctgtctccaaccatcattactatgttcactgtagaaaaattaagaaagtcagtatggcatatagtcccataaccaagaaattcattcattgtgacctatttgagggtcatttaaaaatgactgatgtaatttggtaaaagattaatcaacaaaatgacttatttcataattaattactttccactaatgtgacatttctcaaactctgcagtatttccttttcttcttttcttttctttttttgtttcctgagacaaatctcactctgttgcccaggctggagtgcagtggcatgcaatcatggctcactgcagccttgaactcctgggctcaagcgatcctcccgcctcagcctcctgagtagcttggactacaggcatgcaccaccatacccagctaatcttttatttttttgtagagaaggtgtctcactatgttgcccaagcagatcttgaactcctgagctcaagcaatcatcctgccctggcctcccaaactgctgggattacaagtgtaagctgctgtaagctgctgtgcccagcctatattttcaagtctctctccttttttttttttttaaactggaaaggatagctgtgatggaaatggaagacttccaacagaataccttagttagcataactgtgtagtacaagatgtaaaaacctgttgaagtgggtggccttttgttatcattctgtctttctgcccaccctgtggcacagttctcaccatattttctgtcaactgctaccacatggtccccttctttatgttataaagtctcttaattattaggtaattattcattgtcctagctctccatgcttaccaaacaatattaacaagagcacggtattacaaatgagtcaataacaacttccctaaccttatggcagctgttttggaggaaaaagaaaaaagaaaaaaaaactgcctttttttttcttaatgcgttacaattggttgatcagaacagttttaaaactataaaatgttggctgggcgcggtggctcacacctgtgatcccagcactttgggaagccgagacgggcggatcacgaggtcaggagatcgagaccgtcctggctaacattgtggaagcccatctctactaaaaatacaaaaaattggccgggcgtggtggcagtcacctgtagtcccagctactcgggaggctgaggcaggagaatggcatgaacccgggaggcggagcttgcagtgagccgagatcgcgccactgcactccagcctgggcgacagagtgagactccgtctcacaaaaaaaaaaagcaaacaaaataactataaaatgtttaataaacatattttaaattaaaaggtaaggttgtatctagttatttatacagctatttttaaaagtcaggttggcaaargtctctctgartttcacaaaatatccgcgtgagtggtgcatagtttgtgctggcttatttccatttgttcgttgwgtttatggtaaccagtagcattttctaatttggttaaaatgctgtcattagctggtaaatgcagtcctgtcacctcagaggaggaccaagaaggagctctttctagaaagggagggatcgaattactcctcatcctcatatctacttatctatctgattttaagacaccactgaaatttatactgcgagcaatttaaatgaatgcagtaattgattgcaaaacatgtttgtaatatcagtgactgaaattaaataaaagataagtcagtactttttggatcaatccagttgatctaaaaataaaaagtagacatccactgaatggttgggtaaatgaacgaatgaattttggcttatgtcagtgaattggcctgactgggccttgatctacatagcttctcttgacattttgttgcccaaattgagtttgagtgtttttagtaggcagggtaaattagcggtatggatgggtataacattctacatttagttttgctactgtatatgagctyatgaaatggacttcccttccctaataatatagaaaaaagaaaaacctaaggaaatatagagaacacattcaatttgggaaattcccgtctgtatcagtcaaggataggctagatcatgttgatcatgctgcgtaacaaaccacatctcagtgaattaacccacaaagggggattttcttgctcacaatacacaatctgtgtcagcaggagagcagaattatctgtcgtcaccaagagtccccaggatgatgacggctaatcccattgtgccttcaccatcactgccataggtgaaaggaacgtgataaattgcacactgccttatttatttatttatttatttatttatttatttatttatttagagactgtgtctcgctctgtcgcccaggctggagcgcagtggtgcgatctcagctcactgcaacctccacttcccgggttcaagcgattctcctgccttagcctcctgagtagctgggattacaggtgcacgccaccacacctggctaatttctgtatttttagtagagacggggtttcaccatgttggtcaggctggtctcaaactcctgacctcaggtgatccacccgcctcggcctcccaaagtgctgggattacaggcgtgagccaccatgcccagcccatacactgcccttttaaagcctgtgttcgaaagtggcacacatcactgccgctcatattttactggccaaagcaagtcacgtggccatgccatttcagattgggaagtacatttttaccattgcccagaggaggagagagatatgcaatatttgagaatagccctaaagactacaatactatcccttagtccacctaaatgatcctgaggctttggggcaattaaaaaatccttactcttaaaaaatgtcaggcagtaartcttgaagccagctgctggtgctacacaacatacccttgtcttgtgaggaatcccttttgaaaaggtaacttacctcgtcacttcattattgctcattgctacaggttgaattgtgtccccccaaaaagatatgaaatcctatcagtacctctttgaaaatagggtcttatttgaaaatagggtctttgcagaccctcttgcagatggagtcaagttaagatgaggccatgaatgtggaccctaatctgactggtagccttataaaaaagggaaaatttaggctcagaaacagacatgcacactgggagaatgccatggaaagatgaaggcagagatcaggtgatgcttctacaaggcagggaactccaaagattgmtagcragcctccagaaagcaggggagmccatggaatctccctcagccttcagaaggaaccaccctgcccatatcttgatcttggacttccagcctccagaacttttaaaccatcaatttccattgtttaagctactcaagtttgtggtactttgttacagcagttttagcaaactaatatgctaatcaatatatatttttatcatcttctttggacctagcaaggagaaccacttgggaaattgaaacaaggaccctctcgggaaagtttggtgaaatcctggccaacatgatgtctaatgctgattgcagtgaaattgagtactgttgttgatttttttttcctcaaagtagcttttggaagtgaagagtaaaatgtgttagtgggaactcagtattagcaagaagagaaataagggactatgctagcaaaatgaataatctgtctttattatactgtcacaggtggttatcaagayacagtttttgtgagacaaaaagctttgtggggctggagttgcttttgatggtggtggcagagggagagttatacgaatagaagtaacttctggtagtgtcttcgttgcatgtgggtacacccagtcttatgggcaagctgattttatataatcttgttcttttcagtaaattttgtatatcaaatatttaatcttacttctttgaaaaactttttagataagtgatgtttgcaaattgaagcatattgaaccatatatctggatattttgtttgattataaacccatttttacaccatggccatagagaatggtgccgtgggcactatcaggagtgatgtcattaaccccacagggctatgtggaaagcgtgtggctgggactgctgtgtggttgggacaaggcagtggtgcacatgggccagctcctgtaactttcctgtttgtggctctcatggggcactcctgctcctgctctccccgtcctcatccatgatacatactctctctcatctacgtgctcataaatttcagcagcaagaactgcatgatttttaaaattctgagtagatgcttccagcaaaggatttcctaactgatcactgccagagaagaagaggtgctaaatagttgccaagttacatgctttttttcccaaatgaagtacttcccctgctactgcttgtaaagccctgattgtgtgtgtgcgcagaacccacatctggtgctggaagcctaaggactagtgagtggtcatgtggtttatggcccctataaaaggacccattctaaaagtctccaagaagctaactccacaatgagatgatgtgtgtgtgggtgtgtgtgtgtgtgtgtttgagatagggtcttgctctgtcacccaggctggagtgcagtggtgtgatctcggctcactgcaacctccacctcccaggttcaagcaattttcctgccttagcctccccagtagcttggattacaggcatgtgctaccatacagaattcagattcctctcctacccctagcctgatgccctttcattagctatacaaaggtggttgagtttcaggttaggcttattatcgtttaaactataaactaaatattcaccaaagctagcccagcctaagcccaggaataatcaaggcagcttgaaacctaaaagcaagaggaggctgggttagatcagctcactgtataatttttgcaaaggcggttttattgaaacctgttcttttttgaaagctggctctttctaacattcaaatgcttttgatcaacctattttatggaagcagaatattgaaattaaagtaaatattagatgaactttatagccagttgttttcctcattcttcaactctttaccctacaaatcttatttaaacaacatgttcagcaagctgttatcttgcttacgcaatgaatagaacattatgttctaaggtacagtttgctcacctatgaaaagaatttaacctcttttctaagtagctatacacaattgtcataccttaagttcttatttagatgcatttcagaatattagagcattttgcaagtagatgcacgttcttacccagtgtcagtgtttatagacagacactcaccatgggtatatttaagtctagggtggtaaagaatataaatgtcatttattaaaacctgaacatagccaactatgaattatttgtgttaatgtaaacgtcgaatgagcactgcaaacatttgatgtttgaatatttgcctgtagaagtgcagtactatgttctatagaatataagtagatgccaccccagtcctcaaggtttcagtgaggtcatcattgtatcaataaaggtgccaatttaagatgctaactggacattggaaaaaatttgttgtcctattctgaaggatgagtcttatataaagtgtttttaaaatactytattgaaactgccatgttcttttcaatwttggtagctcccctgcatttaatttagtcataagcgtctgtattaatgggtgtgttcaatatgaargcatcctgtgaagacaataaattatattatacttatctagtctgcactctttatcatgttgataaaatggcccttaccagtaaaaaaactgtttcagaatgtgtaagagtaagtctgtctcagctgactgagggcttcatcatgttcatgataatcccagcagcttgaaatgtcaaactggtagctgatccatagcacacagtagtgctaattgagataggttggtgtggataattgaatttaattgaatattaaacaccagtaagtgctatgctagatgttgggaccacagtgatgaagatgacattatcctgacccgggaggcgctccttatgtgcataaactgcatttggaaattttcatgatttgagagtcatctatggttgccagtagagattttcccagaaggccaaggatatatggggacatttgactgttctttgaccataattatataactttttatttgcccaraatgaacaactgcagggtaacatttatacaaaaggaatttagtgtgcttagagtgctgataatacttgaraaactaggagagctgttttaaagcacttctttttcttttttttttttttgtttttttctgggctgttagaatttgacattgttcaactttaactttgtcctcattgaactttatcctgctaaggagctaaaaggtccatatgatcaaaaaggcagctctcaacccagcacgaaattccaggctcattcatttctgtttacctactgccaaataagtcagacaactgcatacttgctttacagacgaatagaggacagcatgttgttcaataattgtagtttaaaaagtatatgtaagatacatccacaagaagaaagatagagggagcataccgtttgtcttctagtataggctccctgcccatggagatcacagagtagaattatgatgggtgccttagagaccagcctccctcaggatcatgagttcacctcggcaccacagctctgggcaacgtggaattagacaaattaaagtagttaagttctgacttcatagaacagaatctaaacttttgttcatactgcttttgtgttcttgggccatctgaaaaccttttctgtgtaaatattsctgcaatatgcggtcttacagaggtcttatcacgcatatttccctttgcttccttatgtatcgtattttttcaagaagaagacattcaactttagagacaatggaatcattgtgttgtggctttaattcaggtcattgtccttttgtgagttgcacgtgtgcgcgagcctgtgtgttttgcttggaggaatagtgaataagcaaggagcagagtccatttgctttttctaacagagggtggggcagattctctcacaaccattaaagaaaaaaataagataccagcaataatgataatcagtcatgcatatgtaatcgtgtgtagttcatacttcagattcatatacagctgagcaygatcttgaatgttacaggaagcaagcttgaaagtcaagttacagtagaactttgctaattcatgcctgactaatttgcccacccagtagttcctactgaaatcttgccattcctctaccaactttcagaaaaatttgatagcaggctgtggagaaggctcatgttacttcttatgtcaaggtgtaaacaaaaaagagagcacaaaatacatccatcagmccacatraagtgaagagagagaaaacatctgctgaaagccggattctctgtttttttcctgctttttaaatgtaatctgtctttgtttatgcatgccctagamacatgcataagtaaccctgagtagtctcttagtttaagaaaacctactataaaatttcttgttgtaaaataaaattctaaaaggaataagttgtggacatataagtatcagacagtttatgtaagactttacataggatgcaaggtaggctgtaatatgatttggtaattgttttatgggggaattttgttttgtatagcgaaaaagaacagtgagtgatttaactgaattttatagtttaatattgttgttgttttaactaaaatctttggtttgctattgcaaaatgaaagagaaaggaaattttggttaatgttaactttatttccaaaaccatgtgatggatgctgaccaaatgtgtctcaatagtgccattgaggtctgttgcctttttttttctttgaggtgctaagtgaaatgtgttttgaaccttgaatgttcactatgcgacgttctttgcattacaggtagatactgcaaacttgcttcaaaaaaactaaaaagttcaaataactaatggktcatatttgttccagttagtaaatatcacgacaaggtrtcatcgtcatcccatgttctcagtatagattcagcttcatttcttacaccacacacccasaggcatawatggaagtacacagacaaaaggaaaggcctgagtttaaatgtagttatcatgttcagtgttcgacattttattctgagaatttaagtgtttctactgcagtaccacaaagtcaatctgcatattactttaactagatcacttgtraaaataaatgaataaatgaccagtgatggttcastgacaagagtgccagatgagtcatgaatgtkttcacamgtaaatttgatagtaaactgctaagtttactgtayacgctgtgtacaaattagctcagaytcaagatttttgctctaacaactgaacgctcagttgcatctttaaactttktgttgcgtgagaggggctgaggggcaggtgggagraagtcagcctgcaggtgggaggtttctgtctcaggattgctgatacccctgcatgctgctgggttgcagccttggagtatatggcctatgagacatggcatgtctgatttgatggaaaaagcagcggagaaccagtgaaccaagctattccgygtrttgactttttaatacgtttactacaagaatctgccttttaaagtacttttaaataaggttataaacataagtgtgttttggacacagcctgcagcaagcatgcctctcgaggtgtaagatgagtcagctacacatgctcaggggcccgttccaccagccacagtagctgcagagggtgagagcaactgaagcaagagaagctcttagtaattaggggaaggaagcctccacttgacaccgcatcaccaccaagtatttattgagtgtctttggtgtscaaggcaggagaatatcttctatggattctacatatttcagggttaccagagttataaaatcccttgaaatctatatgcacaaattgtaaatacgtatgcagctttttataagtgttcaaattctgccttaattgtgctcaaggatcagggtctcaccccagcattgtataccattgatagtcatgatttccttagtgaaattaagtaaattgactttcagagactttatttcatattcatcatgtccccatgtagccatgaaaaaatgatatgtttaatattcatctatttgtatgattaaaacaaaatatccgcaactactgacgattcaatgatcagatattttactgtaaattaatatcatcataaactcctagacattagacttcagacattcagagcccactcgatgcttggcacaaagcaggcaccaaatacatatttatagaatgaatgaacaaatgaaggaagaaacaaagaaatgactaatgcaccaaccatttatcaggaagtttaacagggaaattcaacaaccagatttgttttgctaatcttattaaagtgcaacatgtttgttgtaaaaatagatccacattcgtcattgaactggacagtctaaaatagatccaaacccattgtttgattatacttcacaaatgtaaggtaaaatagatgatactatctgtcatttgcttgatgctattggcaaatgtgaagcagttaccagcataaaagcttggaggttactccgaatgtatataaacaacagtggctaggctcacaastgggagagagtctaaaaataggtaggcgatcccttatctcgttgcattgaaaattgtgtttatatgaagtgatattattagaaatgatgtgtgagaaaagaatttctgcaatgtctcctacaaattagagtgagaaaatgtatctttatgcagctttgaacaaaggattattattgctggactgtggaccmaaattttagtcaagttttttttttttaatgaaaagaaactgttmatttatgcagacatacaactttgtgtcctatagagacttgtcatctgctcttaaagttagcaccctatttttcctctggatgtccactgagaaacccactggtgtgatggtcattgaaaaagagagttgtgtcagaatgccctaaaatcttagtggcttaacacattcccaagtttatttctcattcacactacccgtcaacataggttggcaggcattcggatccacagggtcacacagagaaccaggccgaccgacccacatggtcacacagagagagaaccaggccgaccgacccacatggtcacacagagaaccaggccgaccggcccacatggtcacacagagaaccaggccgaccgacccacgtggtcacacagagaaccaggccgaccagcccacatggtcacacagagaaccaggccgaccaacccacatggtcacacagagaaccaggccgaccgacccacatggtcacacagaaaaccgggctgactgaagtttgcactggagcttttcacagcccccactcagaggtgagataggtcaccttttctcattagccaaaactggtaagatggccttccctgaccacaaggatgctggaaagtgtagtcatcttttctctgtgcctggagaggagagagaagtgaaaattggtaagcaatatttctattttaaaagtggttagagtgtagtgcaatgaatctagcaccattggttcagttttaaatggactgattccatttgtctaattctgtgtcagttggctgttttctgacccctgagaataatttagtctggctgattcccccattgtaccaattgcctggcatatgacaaatgcatttttgcctgtaagacaatctttgcctaggaaagacagccctaatttttatgtcttgtattttccagtaagctaatctggagtatcagtttttaagactgatacacaattagatgaaactaattaaggacaaaacatttgccacttttaactgttgataagtgaaactgagatttccccccaccccatggatacagtgaacatttgtcagcagctggtaatggctagtataaaratgtattcagttttcccttyccttcctctccctccagccttccagccacccccttcccaaacatttatgctcatttagagaaaagcaaccccagttctcttacctgggatatcaccagtataaaaagcacattcgtataaattatctggcctttaattacctgtaaccctgtaggaaaccccctgggaaaagtaccacaaaagaacgcagctctgggggtctgtgagaggcacccagttcacacccctaaaggacagagcgagcactcaaacgcacagctttgggtgccctctgaggcgtgcactggctggtagcagtgggtatcaaccatggaagttcacggaagattaaaccgcaagttcccacgcaaggccaagtggctgccaggayttggaggcactgaccctgagtggtccttccacctcagcgtatactgtcactgctgcctctgtggcttcccctttccctccaagtagagatagatgtctcgaggtgctccccaccccagccaggttgtcctctcctgggtggcattttcctttctactctctggggctttcaccaccccactgggcataactctccacaggctcccctgggaggggtgcccccacctcacccgccacctcacttctcagcccctcttcccatccaagggctccctgggctgcccccaccctastcatgatctcgctcctctactctctcgtagtactttatttttaccttgctcctggctcacattacatgcttatcttgtatttatagatggttctatatatgtctccttttgcatccttttctcaaagctcctgtgaggccagggatggttttatgccttttctcatccccttatgttctagtataatgctttacacatgattaaattctcatcagatgttgaatgaatgagcttattatgcattacttcttagtacaaagaaatatttggaacgtaagctctgaaatgttgatattctgtggatgcttggattacatacaatgtcctaaataaacacttgcctgttaagtagaagtcagtctggaaagtgatacctttagatccataaaatgtttataaggcacatgaatggacaaccacgttgttttttgctcttttatatgtttaggttactgacagcccaaaatacattagcttgtctttgggctaggaggtacctaaagttgtatttttctctcatgtcattttcctgggtttttatcatatccaacttcgtaatgtccaggaatttgagattaattcctcaaacttgtcgaataatacaagaggaaacttgtataatacagagcaaacttggttggtgagtagctgctagagcaaacttggttggtgagtagctgctacagcccatacatggatttgtttcttcaggtggggggataattgtatccatggactcttcttcattaactgacggatcaaattattttatgaagctatgatgagaaatggcttgtgctcttgggaaaatcaatgccaatgtaggtaatgcaccagtctagctggtttttaatttaaagaacaaattatcttctggaatagtaataaatccccctttggaacagcaagaagacatcagctgttggatatgggataattaccatatgtttcaatgtcgtaaaaaggcacagcaattttaataacccaggttgtgtacaagaaagctcttgcttctgaagaatccatcaaccatgcgctatgatcatgtaataataaactgctgtttacttaatgctgtttttatttaaagttttaattaacataacctagtctttgcaaaacatctgattacctttgactcatatgttttctggtatataataatgggttctcatgagttgtttattttataagatctcctgtttactcagagtaaggaaaattttttttgaggtaaggtcttgctcaggctggaatgagtggtgcagtctcaactcactgcagcctctacctcctgggctcaagcaatcctcccacctcagcttcccaagtagctgggaccacaggcacatgccaccatgcctgactaattattgtattttttgtagagatggattctcactctgttgcccaggctgatctcgaactcctgggctcaagtgatccttccaccttggcttcccaaagttctgggattacagtcatgaaccaccatgtccaaccaggaaattttggtattaggaagtttcccacataccatttgtctttggtgccatgaacacctattttgtctaatttttataccaacctttcactttggcacatgggaaatctgataaggaatcgatatcacggaaatacacatcacactttctgcttgccgctttcttccaaaataaacccaaggattccccttttccaccaccaccttaatttagataaccaagataaatgagaaggttttcgcacttgatggtgggatttcttatcaaggctattgaatttggtttggcactgactaattttggtatccatgtgtttttagagtaagttgtagctagggtggtggggtgatggggagactctcactgaatggctctaaattcagtattttattctttaaccaagcagctgttcacacacatttcttaggaagtggctaaataaaaatatggcagccctggaatgaacagaaactgttgctctttcaaaaaccagcagctacaaatagtgatttttcttccacaaatacttgtttttctgtgacattctcattggttttattcagttaaactcccagaccatgttgatttttttttgccttttattttttgagctcataggtaaaaggagttgaagtgattttattttctgtttttgtcttttttttttaagtttttgtagagacaggggtcttgctatgttgcccaggctggtcttgaactcccgggcctcaggcaatcctcctgcctcagcctcccaaagtgtacccagtctcaagtttttttcacattatatatttgtgttctttctgtttttaactaatggtctccattatttaggctatattaaaataacaataaaaacagagcagatacaacagaattcatttggttggccattggagctgtttttcctttttctttttaaactgactttatttttttggagcagttttaggttcagagcataattgagaggaaggcacagaaatttcccatgtatttcccccacacaggcacagcctccctcatcatcagcatcccccaccagagtggtatgtttgttacagttgatgagccgacattgacacatcatcacctaaagtccatagtttacactagggttctctcttggtgttgtacatgctgtgggtttggacaaatgtataatgacatgtattcactattatggtgtcatacagaataatttcactgccctaaaaatcctctgtgcttcatctgttcatccctaccatgcccctaaaccctggcaaccactcatccttttactgatttttacagttctgcctcttctgggatatcatgaagctggtggaataatgcagtgtgtagccttttcatagtggcttcttttacttagtaatatgcatttaaggttcctccgtgcctcttcatggcctgatagctcatttctttttagtgctgggataatattccactgtctggaaatgccaccgcttagttagtcattcatctactgaaggacagctgggttttggcaattatgaataaagctgctatgagctttttaaaaaatagtttaaatgacatatcaatactttaatatttaaaatatctcagtgatcatatagcctcagaaagcacagttttctgagctgggtgtcatgttgagtggtgttagagtgccgtgctgcgtgctcagrtgctatgctgtgaggaaggatgataggagcagattctgtataagcagatgcacaaccacccacagctgcactttggcacccagggcagacaaataaaaagggggcargatttttttaggggagattcctggcagatagagattttcttcagaatgtacagatttatttttggggggtggttaggggcgacagttgttttaagcagagttttgaaggagtttggtttggtgagtgaaacagtatttcatttttgattgcctttgtttttccagcaagaaagctactcctggtctgtgggcacacaccaaaaggctttgggcaagacagagggagcttgtgtgtgcccccagaccggagtcataccacagttgtcagatcactttgcggcagaccttccgacagtctcctcatctctcttgtggaatttgagtttgacccacaggtagcattttttattttggtggtaccctgatgtttataaggaacctcaggacactattagttaggaaggagattgtcccatgcaattcagccttgcaagagcttcctggttgatctagggacaaggtrtctatcactcagccctccaggtcttttcttcctaaagcaggctttggagcaaagcctgacyggtctttgcctatgactgagtttcccagggctgctgtaccaaactactaccagttcaacttaaaacagcagacatttatcctctcacagttttggaggccgcttcaaagtaggtgtcactgaactgaagtcaggatgtccgcagggctgcgctccctccagagcctctaggaacacatctgccccttgcttcctccagcttctgggggctgccagcgggctccagcctctgccgctggggctgccttgcctcctctgctgtgtcagatctccttctgcatctctcttacaaggacacttgtgggccgggcgcggtggctcacgcctgtaatcccaacactttgggaggctgaggcaggtggatcacctgaggtcaggagtttgagaccagcctggccaacatggtgaaaccctgtctctactaaaaatacaaaaattagccgggcgtggtggtacgcacctataattccagctattcgggaggctgaggcaggagaactgcttgaacctgggaggtggaggttgcggtgagctgagatcgtgccactgcactccagcctgggcaatagggcaagactctgtctcaaaaaaagaaaaaaagttaaacgagtgtcttggcactcccctgtaatcccagctacttgggaggctgaggcacgagaattgcttgaacccaggaggtggaggttgcagtgagccgagatcacgccactgcactccaccctatgcaatagagtgagagtctgtctcaaaataaataaataaataaaaataaacaaggacacttgtgactgcatttagggcccagaacaatcccccatctgaggacctttcatttaatcacatctgcaaaggcattttcatgtaaggtaacattgaaaagtttcaggggtcaggacctaataaattttgtgggccagtattcagcctactgtcccctagttacaacaaggatggggcagcttatggacgagagtgtcaaaaaattcagattctgtcctacagggatcatcttaccctgcagctgagttgagtgattattgagaacatactacgtgttgatgctgttgcttagcactgtgggagatacagagatacataaaactctgcttgccctgaggttgcttgtggttttgttggaagagaagacgtgtgtgtaaaattagtcataagaaaaaggtcgtgtttgatcctgagagccagatagtggtacccagcagtgagcatccaagcccttatctcccaaataggagactttgtaggctgaaaactggcccacasatttattakgtsctgacccctggaacttgtcaatgttgccttacatgaaaatgcccctgcagatgtgattaaatgaagggtcccggtatggggggttgtcctggatgagctgagtgggccctaaacgcagtcacaagtgtscttttaagcccctgctgtgcctgttctcttggtaaatatctctgtgtgctggaacatttgaccagagagagatttcggtgatcatatccatatttgactgtttcctattccataatttgtcgctgtctccgagtcttttcccgggagccccctattacaagtgcacctttctgtgtktattcttccctgttgtgcttcgatgatcccttttttctattcttcagtggctttttctccagtaaaatagcagtttaaattcttgaagggaaacaattaaaaaataatgtctctgggttaacaagtatgattaccgtcatctaaatcagtgatactacatgagaataaaatcaaggagacttacatttacagtagatgaatctatgataatatgccctaccgttttgggtaatttaaatttatgctagttcactctgtctacatgmatgtcatatcttagtgtaaattatagaaatatccctataaaagaaaaaataatttttttctgtatatgttttaagggaacctgaatttctttgggttgtaatgcatgawacagatagtattctgggaatacctgatgttcagcttatccctggaaccctggttatcttagtaaaatatgcagcaacaatatagaagacaatcctgaattttccactgcacaattagggcttgattcaccgtatgacttgggcaaattacttaactttttgaaaccacacttttctgattttcaaagtatgactaataatggtttctgccttaggattattaagatgattaaatgaaataatgcatgtgcaacgtttagaacattgctttaaagtttgtcttttccttctctctccccttttttcctttaaaataaacaaacatgtttgagggctgggtgagttgatgggctccctttagtgcagcacttctaagtaatcactgttccctctggttcattccattgagcacatgatgacaaacatttctggggatatcatgtcaccttggatatagaacagtctcctaaattacattttatatgacaatgtctcactgtatttttgtcctcttgaattgcagcatagcatattatttcttccagcaaaaagcaaaattaaataaataagtgattaagttgctggctgtagctgatactgattcatgacatgactgaggattacttagccatcacattgaattgatgacagttgccttctaaatattatctttagtcacatccctcgaatgtttgcagtgactttcactcctcaactagaatatgcacgtttacatacacatgcgataaggctgaagaaggcttgtggctcagcacaatttggtcttgtatgcacagtaatcattctgaagtgtatgattctgttttattagaaattctcacttgaatttcaagagaataaaggaggattcctcctacacaaagctgctaattgtttgcacactgtgtgcatcccgcatgataagcgatttgagaaggtgccacatcagtgcctttatccaagtgtcacctcctgtctacagttcccttagcagggtgaagggagaaagatgcaaagactgagcttggctgaaacaaatgtatttttgtccccttgacttcttgaattgcagcagagcatatgaataacattgatatatttcttggctgctagacaacaacgtatttctttgacagattgacgcctgaaaagaaaaatacagtatgtactaatgaatcaaaacattttttagtacctttgtgtatactaaatgtattttagtttctatctggagctagttgccatttactgtgggtttgaaatgccctaagttatcttctatggatgggtagaatcaatttacccacacattgacagcttttacagataggtcctgtaacagatataattaagttaaatttcataaatagataggcagtctcctccccagtcctggtccctttgggagatgaattggggtgggggtaatggagagtttcaaaaaggctttccggtgtctttttttaaaaataaggttttaagagtttcatggtcagctgttctcagtttttctcaagatggtatccaaagtaaggctcaaatttatgatttatcttccaaatgcttaaatggtccatttatgatctgccagatgttacaatgactagctccccaaggaacgatcaagaatgtgccaatgtctgggcaagatttttatccagcaaaaagaaaaaaaccataagaattggaggttttactttgaaaagtaaaatcagccacatccatgacttaagagactgtacatattgtcatgggtaaggatttagatcttggctccactgcttactcacagtgtaccctggacgagttactaggcctttctgtgttttactatgctcttttgtaacacagggagagatagcatctatcttctaaggttgttgtgaggattaagtgaactaacttgtgcaaagctcttagaatagtgctgggcacagagtggtgagtgccttgtatatgctaatagttgttgatttatagcttaaaattaattgtgtgatgcaaataggagggttaccaccccaagcttaaatggaagttttgcagcactttgcactcttgaggatgtatctgggtttaatagtaccttccatctagtgcacaagtcttctcccaggctcatcctcccaaacacctctcagtgttatccccactttgcaaatgcagtagtagctgggctcacagaagttaaataactacaccaagtcaccatccaaaaaggttcagggccaggaatagagcgaaagacagaatacggagccatgctctttttgctgtctttctcagtgctcagttctcagaattactcaggaatgagagcagagaaactctgtataggccatgcctggagttttttgcacatggcagtcagagagtcccagctcagttcagtgcagtattaccgaattccagtatatgctgggctctgttaggtgcaaggggttccaggatgaatgagtctgtggcccagtggacaaggtttgcccctgtgtgcagctctgtctgctttactagatttgctcctcagattctaaattggaagtatgtgcatattgcttgatttacagattattagagaatttttttcagttaaactttgtccaaaatagacactaagggcaaaggaaactggtattattacagcagggtgtatctcataagctctgagaattgtacatgtataaagaatctttgaatcgccgagtcttagccccacgttttatacagcacagaaatacagcacagaaagtttaggtgatttcccttgggttccatagtgtgttagkcaccaggttcctttaactctctcagtactctttcctttaaactatggaagagctcaaatgattaaatcaataaaagaatgacaacttatagagctcatttacgtgtctgaatatatcagtttagcccagagtatctgaactcctgggccattgctattcactgaccccttctcctcctcgtgttctagtaaaattcagcccatgaatatagtcattagaagttgaattttaatgaaattrggcgctttgatcaatgggaaggttgaaagttatgtgggaatcatctrtatagtttatagctgtgactatgtaggccagctcctaagtgccccctgcaatgtgtcactctctctggttttctttccagggargtaccctgtagaataacagtctaatttacctctcagacatctgctgtctttcagaccttatgctagttttgtgcatatcttcatgattcctctaataatgcattggattataaactattatctccacttgagagacgctcagagaggctagggagcttactcagggtcagagggagtgcagctgaacagttctgccagggtccctgtgattgttggagcagcctgtgttttttcaagctgttgtctgtgaatcgtacggtagaaacatggtgcgtatttctgcagccttagttctagccattgaaatatcatggagttgaatgcagaatacccattaatgtttaggatgaccaagaaactgtgcccaggccccaagcccagctctgtcatcagaggtgagttaccactggtgccatgccctttgattccctacaggcgccctatggaggtgcccaccagtgtgcacttggaagtgtgatggaacgcatcacatccccttgttgcccctgccccggtgatagggggattcactaagaacttcagcatagtgagagaatgtaactgaagctcctgggttagtgctgcttggtatcccagttactttgtagatttcggaatcttttgtcgtctagcctgaggattactgttgatgacacaattttctttgggattataggcttcatgtttcatacaaccagcatatacgtaaatggcctcttcagtgtatcatgtatacacattggtgaatagcttcccactagataatgttttaaaggggaaaaaaagaagtcatttctaaaatcccaagagagtgtccccgttttgaggttagagcacgttttttagccttatttagtcttgcatcttgctccttatgctacctttcattgctttatgaaattattttttaagggatactttctaacattccatcccactttttttaaagctcgttcatatactttgtcctcacagaatagaacagggtttctcaaattgcacacactgaactctgcaacacaacagttccttcattggagaccagatgaattgaaccactggctttctgaaaataactgtatgctttccagttggccagccttggcagggacccactactactcctatttctcaacagtcaatttaaaatattgacagtagcttaataacattcaatagtaacttgcagcagcctttcatataccctgacatctgagatatgtaccagtttatgaaatagaacacgcagatggtcttagccccattttccagatgaggacccttgtccagggaaggattggtgcccatttagctagctctttcccagcaagcaacagtacccaaggctccatgccccaggcctgggaggacccctcccacggcgtacttcagatctccacctgtgactttgaacacatgcttcgaggtgatgtacttcttggagatagtgctttcctcatctcttctaccttgtagtcgtcagtagagggcatgcagtgcaacagaagtggatttcaggactgagactagggtgaggcaagagaggcatcaraatgcaaaagtgaagtagacacctgccgtcagcactgggcagccctgctcctggggccttacttgactcatcctggtgggttttccaaatggcagaggtgcacaaccacttcttgcaagcatgggcacttgaattgtagcccatgtacacagtgattcttggaaaaagtcatgagtaatgaatggaacttttctctcccaggttgatcttgtgttttgagacataaagagtcaaaggttggtgccyaggatgctcattcttattgtttttggtagtttgattgttgaaggcttttgacacgacattgaagtgaatatttggggcattttgctcctctgggcttttctctaaagcaccctcacatttcctctctcatgttcctgggctttcctggctttgatgctagccccactgtgtgttcccattaatagccctatgtagcctggctccttattctggaaactgtgtaacttttgctcttgatcttaaacacaactcagtcttgcaaggagctccgcctttggtctcagcttcttggggatttccctggcagccacatagtgaactatgtcacactctctgttttacccgttaataaggaaatactctggtacatggagctttgcttgctgatctttttctaagtactctgggggcaaaaggaaaagcagctagaggataaggatgtaactttcttcaaattaagccatcctgacccgtggtagagattagccactaagaaatagtggaaacaaataactgtttcactcttgagtgttagcatgraagagattctggttgaaatcctagtcctgccactttctggttacagaaactyacattacttttcttttgatgtttcaaggagataggagttaaagaaaaatgaacaccagattactagaacattcttatagagttgcccaaagatggaatggacaccttccagagtggaggggagggagtaggattgsacagtagtcctcaactgggagcayttyttccccstgaccccacacctgcctcccagggacgtttgacagttttggattgcacaaaactgaggggtgagagttgctgctatatctagtgagcagaagccagagatgcttccaaataccttacgaagcataggacagccctcacggaaagaattatctagctccaaatgttaatgatgctgactttgagataccctagtcagaagtaacatttattggccaggggcagtggctcatacctgtaatctcakcactttgggaagccgaggtgggaggatcacttaagcccaggactttgagaccacctggacaagaccctgtctctacaaaaaaaaaaaaaaaaaattagcctgatgtggtagtacatgcctgtagtcttagctactcaggaggctgaagtgggaggattgcttggacccaggagtttgaggctacagtgagctatgtttgtgacactgcacttcagcctgggcaacataacaagactctgtctcaattaaaaaagaaagaaagaacatttgttgaatctaattttcccatgtaatatcaatgactgtgcaagataaagtggtttttatcctcactttggatgagattggcctttggtgattgagaaaccttcctttggttgttcagctacttctagatagacatgggattttaaactagccatctatatgtccaaaacccatccgctttccacaaacccattatgtagttagctccccatcactgatgatgttcaaagctaagcagggtgagcaaccacttgaaagaggggatggatgaggatacaagcctaagatgtatgttgcactaaatgacttttgaggtccctcctaaagatcacattctctggttctattttgaaatgggatttgtctttttagccccagtgttagagtggcagccagatatcccttggctatgaccagtgaaatccctgtgctttgtgcacctgtgaatcttactcctattaatatcccagccctatcaggccagagggctagggttccaaacaggggcagccagaaatgcaccatcttctgcatcccatctgcattccgggcccaggcagttatttttacctccatatgtaaatgggcccagcgatttctcatttaggagaacagcagaggcacaagtgaggagagctggagaaggaggggaacctatcatatactctgagattgcaatttagtatcagtttgctgatcagtgtcactccactagtttaataagtaattatagtttctcttttgtgaacaaggaaaacgggtagcttcacccagtggttgtcagccctggccaaaaattagaataagatagagggcttttaaatcacacctacaactgagcccctccaccagaaatttaattttctgaggtgaggcctgggtacagtgatttgagaactttgcagggattccagtgtctaagcagcctgggcacctctggttaatggcacacctcagtgctgcgcattctgctccagtacctgctggtgttactctgtcataaagagactagaaaaagagtgagttgggccctgtttctcagtgtgtcttcagtggattgtagggagaaggaggcccatactctctgcctaaacgagcacctgctagactccgaaatctagttaatggaagtttctcctcatccttggacatccttgttttatatggtatacgttcaaaatacatataatctttggtttaatttgttttacaaagttttgaagttttcctctccacacttttctcatcaagctggtgtgtggaaagaaggaatttttcttttccattgctgtcatctaaaattgttgtgtcgggtggggaggggagggagccgggagacttagctttaactacttagaagttttcagggaaatgtttttataacaacctagttaatagtttgactttatgatagattctgttccttcattattttgtcctccagtggcttttatacccagcaaagtggaccatggtgtatgattcaagaagggtgaggagtatgtctttctttkkaaaggcagggatggagggttgtgatttagaaagggtaagcaggaaaggagagccacagaaggcaagcactgttctcatgccagatcggtttcaaggaagaggacatatggaaggatctagaaaatgatttctctakaattgtccatgtccaagtcccctggaatgtstttgtatatccccagagctgtgcatgctccagtttgaagagctctgctttaaaagatatcakgggtgggggagatgaggggggtgaagtaaaagaataaaaactattcaattccatttgttttctctttcaagctcatacgttactcatttcatttttatattaaaatatakatgaggaaggaagggcacatggcaagatttggcaagcataatccatgaggggatatggagttggggatggcagcatakcatactakgatttttgaggagggattcggggagcctgttcatgttttccttacaactctggtacatgaagtacaggttctgcatcatgatggaagactgcctgggttcatgtktgggccactacctactagctctatgactytgggcaagtttctttcttcttttttttttttgaaatggaattttgctcttrtcacccaggctggagtgcaatggtgcaatctcagctcactgtaacctctgccttttgggttcaagcaattctcctgcctcagcctcccaagtagctgagattacaggcaaccgccaccacgcccggctaatttttgtatttttagtactttagtacagaccgggtttcaccatgttggccaggctgttctcgaactcctgacctcaggtgattcacccacctcagcttcccaaagtgctgggattacaggcgtgagccaccatgcccaggcaagtttcttaacctccttatagcagtgtttggcacatgatagatgagctacaggttggcttgttattccttgcaatcctgagtttctccccagagtaaagctggagcttttcccccagccaactttggtggagtccactgggcagagatgtgatttcagccaaaatatggctaaaggaggaaaggatctgagacagccaggtggaaatggctccccgggagagcctctgaccgacccgcacactgggaggagtgcgcactggggtggagccttgggaagttggagccatttgcagcagggaggagcctggcccctcgtcttcttggatggtacctaggattcagtctgcgaggcaggaagcacactagcaggactccagcttggtggagagttcctgctttcctttttttcctttttgtccaataaatcccatttttctcaccctttaaattgtgagcctaatttttcgtagtcatgtgacaaggacccctcttaagctgaactaaggaaaagtcctgcagcagatctaactagaatgccaatgcctacattgaggctgtttaatggagagtttatgaaaagttagctagtgtccttgtgtaaacctgtatgactctagttcagagtcttcagtaattgcaattcaagaataaaaccacacggcacttccattcccgtgtaatttgttgttgctggcttgtgacattctacatatcccaactatgagacagccaggcagtgggatggactgtgaggttcagatgcccggagatatgtgaggaagagcttttagcaataaatatgaaaatgaaatcaaagtaaaaactggcattgaacccctggtgtacttaggcttacttttacccaaatccaaatcatttcttgacactgcatggttaccaagagtgtctgtcattcaatatttcagattaagatctgttctttggtagctaagttcagagaaaaaaatataggatctagaagtatcattgctattttttccttgatacatttagtctggtattaaaattgcttgcagaagatttgattttaaaaaagtagaaaagagacacttatcctggtaaaattatcctgaaatcttaagaaattaagacaaattgcaccataaaaccagaagcacaaaattaaacaatattatattaagagaacccagtgacacattttccttctaaattaactttaaaattaacttttaaattaagttcaatctcatatcagtttgctttgtaagaaatagaatatatgtacatgtttgccttatttttagcatgttatattcattaaaatgttttagtttattcagcagatacatttagcatttctttcacaagaaagacagtgaaggaacaattaataacaggaccccagtaatacctggggggtttctacatctgcattttttgcaaaaatagaatagccttctaagaagctgtcagtggcatttgtgcagctggacagctttgcagcagatgtaacagtaactgtgatgccaggctgtgccccagaacctgtaagcatgacaagctctggcttcttccctcctctgaaaaggtacaacattgaagaggcagtcgtttcccctagatctgtaaccaagcacatctgggtgaaaggggaagacatctcttcacagagaggagaataaaggcggtgaccatcagggtgacaggcagcatggactgttgccacctgtgctgcaggcagcttcagtgcctggatggtgggacagctggtcctgcactcagyacgagtctcaggcagtggtctggccgcgcctcccttgggctgcttcttcctccaccgtcctccacttttgctttgtgtctgcgtcaagtcagtaacgttggtctgcagctcccatccctcctgatgggcactgcactgaggccttagtgggcattacctgatgccctcatcacccagtgtacaaacacctgctgacaagaagcgtccctgagcggaacccttctgctgggacaccgcaccttccgtgtcctgagtgggctgcaccctcgtggtgctcaactgggtgacttcacgctgtcctcagcgctgtcctcggcgctctctctccagtcagctctcctgctcaggcacctttttgggacacagtccttgccagttattccctgtttaatgtsctcatgtgtcttcacttgccctgggagactgtcgtcttgagagagcaagccatatgggaccctgaggcctggcctcagtttccctcccccccactgycccacggggccacgcctcatcagtggcatggaccttttagtcagcgagccctcagccggatgctcccgtgctggccactcctgtcatccctgctctgtcctccctgcaaactcctccctcaggaccctgcttgaagttacgtcctgcacagtcatccctggccttccctcagcagaatctgtcactccctcaaggtgtccctgcagtattctgctcatgcccctgctacgtggcagaactctgttgtcctatcctgtccagagctccaaagcccccagaccctgtggctgctgagcacttgaaccatggacagtccaggtgaggatgtgcggggagagatgcctcctgcctgtggctgagccctgcctgaaggagctgatgaggaaaagctcctaagcacaacagtgctgctcacctgggcatctagttggcagagtcctatcccagtgttcgcacccccagtttcctgggtcttaagttcasattatcaagtgctcctcctgcaaaaaaaaaaaaaatggkgattcttgtggcccttagttgaccccgcacctgggatatgctyatatttggtgtggggcasagaactgagtgttcttgaaccacttccacccaaccagagggaggtggggacatcaggtacacctcatcccctgatgtcacagccaagtacctggagccaccaggactccctctgagcccacaaaggagtgtcttctcaccaccccgattatactggtctagttatgctttggagttaaagccaggctgctattgcagggctgctgcaatccttgcaagcacagttgttctttgcttgcgcttgctctcgctctcgctctcactctcactcttgctcgctctctttctctctctctgacttcagtttaactttttaaacttcagtaataagtgttcctcaaaatagatggtcttcctggttgtaggtacagccagcagggttgagttctgctgccttccagcatggttttcctggggcctgtaaaagtcctgcaaatttgctctgacactctgttgacatggaggtcctgtttgttgttataaataaggaccagtgtctctaggacacaccttactgtgtataactgaatggcagattttgtcccttacttcttaaaaattaaatggcagaggagctggccatgtaaaagccctgtgtgtgtttaccaaaaagtacttgaattttgtttgggttttgtgttctggtgcatatgaagtgaattttggtaggagtatgtgcattcagagaatatgtcatcacacttttttctttatttgagtgccacttggctcttatttgattaaggtaatttcagtgacatattttgaagcaattcaccttgaaaggcagaggcaccacccaggtgcagaaaccttccttgggttatgcaacgcccagcgtgggtggaaccgcactcacactttacctcttcctgaaccacagccctgctctgattgcrtgatggaagctgaggtgcctgacaagtggaaggaggaaaaggaacattctgccttccttttctctgtaatgccaaagctggcgtcatgcattactgagggcctctgtcagcactggggccggccagtggcacagctgatggggtagctgcactcgctagtcctctgggaaagcccaggttgtttttctggcttagtgttagaggcagctgtgatgtttacctcgatctgtaacatacaaagatctgatcatatgctgtctttgcttacattctattattgtctgacttatgttctaaattctctacaattcccttccatttgtcttaagaaactctaaacctttttttttttggaaatcactacttaatgattttgaggatgraaccccagacagttggtaatagtggatggttttccttttctgtagttgagtggctttctaattcttttgatggcacacaaaaagaaattaaccttagatcacaacttagtacacacatttatgtatgcatgtaactgagatgagttcctcaaaatagcacatacctgtgttttatgtgaggcactgatattttctgttctatattatgcttaactttaaaaaatacttcctgtgtaccatttgtgggactgtaactcacaacttaaaaaatattaccttgatacatagctccagaaatacacatggktcattttaccaagaatcaccagtgcttttgctctgttaccccggctggagtttggtggcacgatcatagctccttgcaccctcaaccccctgggctcccagctgggggtctttaggaccccagcgtgacctgtgggtagcccttacttcctttaatacttttcttctgcacagtcaggtgctctccctttgagcttccgtgtgaagttcactgtgcacccagctctgctaccaccgcctctgtcttgaaaggaatagggtggggtggtcattggtgtatagtaagattcgaatcacatccttcaagtacagttctaccctaaagataagagtccctgtggtttttgttgttgttgttgttgttgttgtttgaatggatgtgttctttgagaaattgagtcttgagtattttgtgaggacatctaagcctggcgtccacgtcagtgctgacagatttgacctagtgtgcactcccatctggggaaatgcccataggctataatctctttcactggagcgattataatagcccccgggcttcaggtcccagtggcatccacccttggtggcagcatacccctctgcatgaacagggcgcccacttgtcccctccttcttacttagtagtgatttttaaatgggagggtggcagtcctgaatgtagttcatcagtatttaccgcacaagctctaaaggacacagtgttttatttgtgtatttatttaacttttccaatatcggaatatgaatttttgtttcacctgataggacacgtttcaggggctccattctacattgtcatttcacaggaaaaatatttgatggctcattagaagggaacatctattattttgttactgaaaggcacattttcaaccttgagaattggatggcaggtaatggcatggaaattgacagcattttaccacttaaaaataaccacaagaaataccaatgttcaccgaatgagttgaagttaatttggttttgtaggctattgtagttaacttgatgcttgatggaaataattttgtattggaaatcattaaaaattgatttgattaatgcttttataatgttggtatgaggtgttgcactgtggtggtgatgacctaagggtgctgtgatggcctcaaacgttgtccctccggggcccacaggcaggatcccacacactagcacacctcccagttcctcttaccatcaaacagaggtgttccttcaacatgcctgctcctccctgtggcataaaggcaccaggaggttctctgatcccctgttagatctcctctgcagggttgaagacattttttgtttgtttgtttgtttgtttttgagatggagtcttgccctgtctcccagactggagtgcaagtgacatgatctcaactcactgcaacctccgcctcccgggttcaagcgattctcctgcctcaacctcccaagtagctgggactacaggcatgagccaccaagcccagctaattttgtgtttttagtagagatgggatttcgccatattggccggggtgatctcgaactcctgacctcaagtgatctgcccgcctcagccttccaaagtgcttagattacaggcgtgagccaccgtacctggccatttttgtttttaatcggtgtagtgtccctaacctaaatatttcacatggcctgaactttctgtagttttagcagcaatgggatgctttgaaacctagatctctcaccaactacatcttccattgactggtgaaacactagtttaagccaattcattttgaccatgtgcatttttgtgcttgatccctattttatttcaaaaataatttccatctctattcatgtaaactaataagagccttccgtttcctttaatggcaaattgtctcatcttttactgttttaaaacatttttttaacatcatgagaaaacgtgataaaaggtataagtgtagtttcctggcttttgcagtacctcagggaattcggtaaactgtattccatttgaggaaaggaacggttggagtaggaggtagtgtaaagataacatagcaaataagcattttaccagaaccctctgaagtctcatcagastgtgccatcatcagaatccctcccttctcatctacaccgtttaaagccagcatccagtcagaagcccagagctggtaccgccttgctttcctgccagttgctgacatatggcacacagtgtcagttaagggcacaggctgatgggcagyttggccacatacctctstggcttcctatstgtaaaatgggcacaatcattgtacctgcctctgaaggttgttgcgagaactagacgcagccttggcacagagcccacagagagtgagcactgtgtaaagactggctgccagccattagtactgggtgcctgtcttttggtgtctgggcaaagctttaacctgttttatcagtttagaactcagatgtctccctggcaaaacaacacgggcatatagatattttgtgaagttttgttgaagtgcacttaggttaatgattcatgggcagcctttcaaagctatcaggctgtgaaacagctttgaataagattgtcttgtccttctgctgattgtcttttccttcccacattagcagccatagcaggaggaggagaggtggcaagtggccacactactctgctcacattaagcagacaatttatggtcaatattcagtgaatttcttttttttatagtacagttaactgatatttatattagctttaaaattatagcaaaatcaggccaggcatggtgactcacacctgtaatcctagcactttgggaggtcgaggagggcagatcgttggaggtcagatgttcgagaccagcctggccaacgtggtgaaaccccatctctgctaaaaatacaaaaattagctgggcgtggtggtgtgtgcctgtagtcccaattactcagtaggctgaggcaggagaatcgctttaacccaggaggcggaggttgcagtgagctgagattgcaccactgtactccagcctgggcgacagagcaagagactctgtctcaaaaaaaaaaaaaaatagtgaaatcagccaaatagagaactaacaggcacactgcctaattccttgtgtaactgtcattggtgtgagtcactggggcagcgtgattaggtctgtgagctggatagcaaggctgtcattattctcaaggccttctgctgactgctgctcttggtaagacatacagaatctgtgggcacctcctcttaccgctctatgctagatgaggcgtctccacgttgagttgtagtagatacagctaagaaagtaaaagaaatgaaaatctcatcaaaaggattggggctagtctcattcttcatgcatacccaaaccgtggtaactttgatttttttattatccagaatggattgtttagaggagacagatggctttccagttcatcaaattttttcaattatctaaaaggaattcctacgcttggagcaagtcatttcaataaatctcattcatatttacctgctgcttccttttaaatggaaraaragaatgtttttcaagtacactygaaaaatagcatatgtgaattagaaacttcctctgtaaactagcagagtagaaataagaggccaggattcagcaccaggtaggctggattccttcttaggtggctcaagctggctmtggggctggtctcatcatatctaaagaactgcccagcttttacgcattttgaatgtggtggaaccagctgcatmtttttatatgagagcggcaaatagtcattgtgttccagtttgcttctcgggtcatctaaacatcagaggccatgccacaagcaccgtaactgagggatatagtgtgactgtggtccaggccagtgacctctggagctgaatcatgacttcccagatgactcccagagcctgagaggggactggtgcgtggctccaaatgattttcacctgggcctctttgaagtcgggagagatacgtgcagtatggtagatgtggagagggagaggcatggtgtgtccaaaaattagcaggacctgatccatatacgtggactctgaagcagtgcacttactagattaaaaaaaaaacaatgtacttactggatttaaaaagtgtgtatttttttgtgagatgcagtttgtaagatgcattggtaactaggccatatactttttccattggctctcagctctcaagaagctctttagtttttagcattggatcagtaaacacttattaaaatgttcccagcatttgtttgccatcttctctttcagctgggcccagctgtgccctcaaaccctgcctgtctcttccctgactgatcatgttctcccagcttctacagaggcttccatagcattgtgcttggtagcagacaccagacagaatctcagccagctcagtccaggcgcacgggctcctggtctcccggggtgtggttactcgtgtctcctcggggccttccgccctccacattccagtgccaggccctggacctttgtctctattcatgataaaacatttttaggaaatgctgacgctcagtgaagaaatggaaacactaactctttgttctcttcctaacagacacgagacgacttcctgggccaggtggacgtgccccttagtcaccttccggtaaggacagtctcatgtttgatgcttcgtgctgggggcgggggtttctaattgtktgtagtcagngtattttcagagtggcatttcttcaccacggtgnagaaggctgaaatgaagcacgtgtgctgtggccttagtcctttctggaaagtggtcctttcaaggggatggaggagaagctggctgtaagagtagtcaagggtgcctgagtcgtgcgcttgcgttcccatccaccagctccctctcttttctgcacttcagctgctccacctttgtgtatcacatcttacaaaacagacacctccttcactcaggcctcccttcttgtcacttactgtctctgcttcctaatgcatcctccgggtcccatcagatgtttgcactctttgtctggaaccgcacatgccatttctcttggattcctgtacacaaactataatagcatttcccagattttggtgtctggctttctcagtcagcatggtgacaaaagaagagcctgttcattctgagtgaacttgtcagctgggaacacccaccctcgctggaacacgcactgagttagcatgtgtggtgctgccatttctctctgctcaaagtagcggagcagtcgaggctgttgactagtgacgggcattagggctgacacccgaaacaggaggcagggcagacagaatgtgtaggtaggacctggaggccttgagaaaggtggatccccatctcctattccagcttcagttttccggcttgtcccagccttcctcctggccttcttccctgggcagcacaacgacgtgatagaagtagcagctgagagaggaaaggcgaatgtttctgccttacaagggcattgtgttatttttttaaatgctttgtgtgagcaaatagcataaatagtctataaagtaaagtgactttactttatttactttatttaaagctatttaaagctagcataagcttcctgctgtgtggaaattatggctgtttccatatgttaaataccaagtaagctttgaagatgtgttgtgaaggaaggtgatagcaagtaatttactcttactcactcaggggagctgttaaggaagaaagtcgcaaggttccaaaggactggaagtgaaagtgatattcttaaaatatcttgtttgtttctttttaaaactctgaagctccagggtgccacgggaggggcctgcccagggcttctgcgtgagamctactccatgagccatcagaaacctgactgctcttctcaggtcacgttgggaggatgtgactatttcaccttttgtgagcaaagacctcgcatccttctacgttgggaggtcttctgtgtatgttcttcagactgaagctgcgatcctctcacacttttagacagtgttggttgatgggccagctcttttatggacgtctccagccaccctttccctaatgtaaaaaccacatcttggccaggggaaattattttctgagaggcaaatattctaatatttggtaagaggcaaaagtgacatgtttaaaaaccttgctctgacaagctcttttttgagtgagtgagcagcacctggtcttgaaaggttgagtagggctcccagaaaatagaaaaaggttcctcctccgaggccaagtcagtataaagaatagtttagctttggattctgagtggaggcagggtcagtgagccttcaaagaaggaagcggtgcagaggcacagggcaggaatagaagccagccgattgcagagggtagagccgtgaacgcccagagaggaccgagtgcccctagttactcgtgtgcccagagggtaacttgcagtggcgtgcttcacctccatacttcaaactgactagctgttcrcagccaactayagtcagagagatggaccacaaagaaaacaaaaggagaggcgtgaaggtatattctttattcatgtggcagtagaacccaagttgcgtgttctgaatgcacgtggcttttgaatccaggatttcaggtgctttcgtgtgtatgtttggtcgtgtgtataggatgctcatggggaaattacagtggcattctgtttgtgtgatagcacacaggtatgagtgtggagagggcgggagcatatgcgtgtattttgtggatcgaattatggatgctgtgttcttgattagtatatgaccattgtcaaggtggattattaacagtctgtagattcaaaatttgtcaaaaccaccaagctttagataaaaggaaatagaccaggcacagtggctcatgcctgtaaccccagcacttttggaggccgaggcaggaggatcgcttgagtccaggagttaaagaccagccttggcaacatggcaagaccctgtctctatagagaaacttaaagattaacccagcatggtggcacatgcctgttgcctcaactgtttagaaggctgaggtgggaggatcgcttgagcatgggaggtcattactacgctgagccgtggttgtaccactgcgctccagccttggagacagagcaagctctccttttgcttttacattcagagaccaagagcaaacttagctgtaactgtaccatcattgacttttcaactgccgttttcacatttgtctgttaaattcagtgcatcgttgtctaaaaattcatatgatatttgataacttgaatctattaattatttagcgataaagagaactctgagatctgtattaacagagtgagatttctggcasgtgtctgcctgttgcaccttcctcttgacttgtcagctctgtctccccttyccctgkagccctcagtaacccacctttgcccagccacaaaatctcttcgtccctgggaaaggcagtggggcagagagagctattttaaaacattaagttttcctaaatcccagtcatgtgccacttaagacaaccatggctgactctggaatttaaattttcctagatgaggcattttcagggtggtggtattatttgatgccctgcctgtacttggaggtagctcagctgaccaacatccttttaccccttttgtgtttatggctgatggctggtagcaggtagcaggctgatggttccctctcatgagtgcagaattcaaaatcatggagtttggagggacttcagagacactgattcactcccagtattttccaggtgaaaaagcctgggcccasagagggaggggacttgcccagcaataagcaggtcattggtggtgctggatctgaccctggctctccagcatcattgtgagcctgtgatgtggtcaagggtgtgggcatggggtggattcgcccaaggcttaggtgcttgcagtggttgcatacaagtttcgagtctagggacccagcagggccctctccttccatttgcctgcagaatcctttatctcactctattccatagtgaatgcacctaggctgaaagcaactactctctttcaagatgaaagtactgagtatccagattttcttctgaatgcttttaccctggaacgggggcagcaktgtggctattgtggctaatagcactgtttgcagcagtgtgtttaagatggctttccaccaggagcaccctcaaagccatcctgggaggctccactcagctctgctccagggaacaggatcagattggaacctggatgaatgccaagaagaatcttgtagttatmtataagatcatcttctaattcaggmtagagaatttcaatgaacgtgaactttgattttaatgccctacctgttactgcttggcattgagttggcagtactgacaaatgatatgaacgtgtagaattggccaatgmacatggmtagtgtttgttgagtgtgccaggtgcccttgagaactttatagaaaccaactcagttgattggtttgatcctcacaacagccctgtaagttatggttactgccccattttatagatgaggacactgaggccaagagagataaggaacttgcccttagccacttggctstgtaagtaacaaagccaggatgcaaacmtaggagatctgccttttgacctgtgtgatatcagtcatttaagctgcatagggtatggacagactcaggttcagagtccctmtaagctccgtggttttccctcttcactctcttgcatgttctctgctgctcmtagattgctcatgcccactggtgatcctgtaggctttgtcatactgtttgatttcmtatgtttaaactgtcctttctccctgttctctacctctcamagccttcccatcaccctgtattgtattgaactccacatccaaaaccattttgatttccaagtcagagtccgtctgttccctgtaccccaagtctcacagaatgtaacctctctgtgtcagtgaatttgttctgccttagcttctagtggattgttgacatgatggctcttcccttgtaattgtaaccataaggactgctataccatgttgtatccacatgtcgttgacataatattgctctcaaattatttgttggttggcagggcatggtggcttatacctgtaatcccagcactttgggaggccaaggcaggaggacgtcttgagctcaggagtttgagaccagcctgggcaacataggaagacccccatgtctataaaaaataaaaatattagccaggcatagtggcacacacctgtggtcccagctacttgggaggctgaggtgggaggatcacttgagcccaggaagttgaggctgcagtgagctatgattgtgcccctatactccagcctggacagcagaagaccctgtctctaaattaaataaataaatgttggtttaataaatgaaaaaaggaaggaaaaccagcaatagttttcttaataaattatccatttatttccttatatatatttacaaaccttttggtagaaaatattttcaaaatgtatgtttattactgcctcataagaacagtctagaaaatataatttacttcattcaatgatagtgaattttgagagcctccatagtttactacagatcagatgaattgagtgcttacrtgagtacctacttggtgccaggcaatgttcttggcaccggtgatccaatggtgagcaaattcaagtctctgttctcatgggcttacattctggaagtgatggataataaactagtatgtcaacaaatgaacaggtactttcagaaagtgatatgaggaagatacagcaggacgataggatggggggtgataagggtggctgatggtgggaactctaaaggatgagacctgggatctcacacttggatggcaaagtggaaacagccatgccatccagagtcagctgtccagcagagggacctgcctgtgcatgggccctactgcagtacatataatctgcatccatggcagatgaggacaggatggttgggagtacaaggaaggaagagagagactggttcccaatgaggttaaagttgattcaaggccagattatagttggtcttctaagtcataggaaagaattttcagtttattatgagaggagtaggaacccattgagagtttaaagcagagaatgacataaacagataacatttcaaatagcagtgcatacgtacatacatgtgtgtgcatgcacgcgcacacaaacctgatacagtaaatcactggactggtttatctcttgctataaaagtatttgaaattgtgtttaattgaagggtctaggtatttgaggttttactgaatatatagtatttaaagattaatgaaatagtcacacttatttatccaatttcctgctttggtaggaacttcacaaygaacttcacacaatcaaatgaacactgatttctttaaaaatgaacaaatactccacttgtactcatagcttcatgaactgaacctcagcagaaggttgatcggtgctgcttcctggggtgatctctgtgcaggagatagtctttcaattctcttaggctgatgwtgtgagattttaatacaaaaaacaaagtttccctcaaagattaaatcttgtatattcttctgtttactccacccatatgtgtctcgagtcacaggcatatagcaaggcactggtgaccgctggttctccgaagtgaatcagctctgtgagactgaggccacaccctgcagttagaaattttacttggcaatgacagctgtaattttgtcatttgtctgtggctggggctggctccyaaaacccggtgtggatagtgacatctagtggatctctagtagatcagttccgtggactgtcaggtaccaagtgaagaaacacattcagcggtgccacattctaaaattcaaaatatattctctgtaatccagttgcctgtatctaaaacatgaaattattaggaatattaaaatttaatttactgttttttccccacagacagaagatccaaccatggagcgaccctatacatttaaggactttctcctcagaccaagaaggtgaggcttgtgggtatgggtgggtggggatgcctgccctgcatgctgtaggtataggtggggatgcctgccctgcgtgctgtggatatgggtgggtggggatgtctgccttgcttgctgtggtgtgggtgggtggggatgcctgccctgcatgctgtggggatgcctgccctgcrtgctgtrggtataggtggggatgcctgccytgcgtgctgtggatatgggtgggtggggatgcctgccttgcatgctgtgggtgtaggtggggatgcctgccttgcgtgctgtggatatgggtgggtggggaggcctgccttgcatgctgtgggtataggtggggatgcctgccttgcgtgctgtggatatgggtgggtggggatgcctgccctgcgtgccgtgggtgtgggtgggtggggatgcctgccctgcatgctgtgggtatgggtgggtggggatgcctgccctgcgtgccgtgggtrtgggtgggtggggatgcctgccctgcgtgctgtrggtataggtggggatgcctgccctgtgtgctgtgggtatgggtgggtggggatgyctgccctgtgtgctgtgggtatgggtgggtggggatgcctgccctgtgtgctgtgggtatgggtgggtggggatgcctgccctgcgtgstgtggtggttggcttttgctgaagamgattttaagtgtcctttgaagtcacaacccttctaaccaattttcttccattatgtgtgcagtcataagtctcgagttaagggatttttgcgattgaaaatggcctatatgccaaaaaatggaggtcaagatgaagaaaacagtgaccagagggatgacatggaggtacgtggagggcgtcaggcctctctccttgccttgagatcatattcatgttttgctttcaaactttataattgaaggaaataaaagtttagaaagcttaaatataaaaaaaagtacatatgtccgcaaattggtcattgatagtctaccagtgcagttatttgttttggttaaagatgaactttttatgttacaacaccaatcctcggagagatttctctttagacaatgccatgcctattccccaattttagccccacagctctgtgaaagtctcctcacacattgaatcctattattgctatggacttgcaactctttgtaaattctttttagccattgaggtcgcttcaaagtgggtggaggaatttagaaaatcacttttttttcaagtttcttactcatttggccacaggtgacagcctgcagtagaaaaaccctcctctagaaatgccattctgcaaygagctgaccagaggaatgtcccttttttccttcctgacagagccgcctgtatttaccttgtcacagactgatgctgtgggtcctatcgtaccttttcagcacacacctcggccagtgctgttttgttaggcaaattctcatattctcaaagtgtccattaaacgagacctctctagggcttattctcacatctgtttgcagctgttgcatatatgtgatatgtgaataatgtgtgtggagaagttacccgaacactcctccgcctgagagatcatatttccaggcattatttcatttacaagccttcatctctctatatacatgaagaggaataatgtgggtgatagaaatttatgaatgttaacatttcataagcatgtcaacagattttcatctcaaatccaaggaattttttacactcttcttgccttccaaccgcagtaaccagtgaattacttaattttccagtgattttagcagaggatgttaggaagggaatacgtaatgcctaaaatacgtgctgtaaaaatggaactcgaattttggtaccatgaaacccgttggtgtggacacagccagtgtagagggcctgagtagaaggcagcagcttccagactcctggctcctgcggttgtttgggatgcaaagaggaggcttctctctcaaagcccacctccctggggagcaacaggactctgggcctctggtcccctgtgccatgagttctgttagaacacaggtgcagcgcagctcatcttccctgctccctttacctcatagaggtgttgaaaagatggcagctgtactgtgacgcacatcattggcagggctttgtacagccttggaggccctccagtcaaaataacaaacatgacgtatggaaagagtatgatgtgacttaagtagtgtcaccgactgtgcagatccaaattgtgttgtcctgcaatgtagtcatcttagagggcagcacaattaattggccattactcagaagatttttgaggcctttctagaattgatatatatatatttttttggccttcatttgggaatttactcaaatgtggccccgaagccatggctagagccagagagccccagagcaaggagaagggcatgcagggcatgctgtgatgacctcttactcacagccgaagaaccaacctcataatcgtccctttaactttattccrcagcatggatgggaagttgttgactcaaatgactcggcttctcagcaccaagaggaacttcctcctcctcctctgcctcccgggtgggaagaaaaagtggacaatttaggccgaacttactatgtcaaccacaacaaccggaccactcagtggcacagaccaagcctgatgtgagtaccgtgtgatggtcaggaacacgtgcacgtgcactgcacagctagggacaaatatggcggccctttgggacaaggctgggaaataaatcatatgtctataagagcagatggtggtgtggtacgagattcctctccatttacgtaaagcatgcaagagcagtcagaacttgtatattgtaagcgattgcctttgagtcacatgctgctgttttcaatatgagctgatttattttctatgtcttcttttatgtcgattcctgaaatacaaagcagaggttgtttttcttagacttattttacatttgttgattatattgttttcttcttcacctttctctcccaactgacccagaacagaaccggcaagcaaattggctttgcaattttctgttttctctaagtttttggatgtttactctcttcaatgcattgatttggaaacctcaaaaatttttttttctttaaggaaatttgagccccttaatataatcagaaacacatgggagagttgcaaaatcagaattagtaattactgtgtattttaatccctcaccagcctcagggatgcagtaaaccaattcctgttttgttccctcagcaatttgtggtttgattgatagcaaataaacactggttaaaactcatggactttaaaaatggttttgtagcagcttgtttttaaatcattttatacagcaagatctaagtctattgataatacatcgaagggcaaaaagaaagtcttaaggaaaaggaattttatcctagaaattatgagctgcctagcagccaagacaaggaggaaattatcaatgaactatacaactttcagtatgtaataaaagcaagtctactgggtagtataattttcttgtctactcgaactctgaaagaaagtggctaatgatacattttagacaacaagcagtatgaggtatcatgttcttaaaaaccttttatctttagaaattgtaaagatactccacatatgactgtgggtggggagggtggccaagttttctggtctaggttttgtttaatttagagataaagcttgcagaatctggaacaacgaatagcctgtcttctctgagcccccaggtgggttctcgtgaatgtcagctgttcgtgatcagctttagactacccagcacgggcattagctcaggacagcaaaatggtctcaggacagcaaaaatatcagatcagctgggtaatgctgaactatcttttgttaaagttttttcccatggaaatagcttggttgattctttttgttttttatattattgcttactatttccttttgattaatgcccatagctattagaattattgtaatccattgtagctatttgtagtaaaaatgaatttggacccaccttgggcttggttacatgtagtgactagaagaatcttggtagcaatatcctaagcaaagcaccattacctacctttgctcaacagcatgagaaaggagtactgaaaaggtagatcctcatgcgacctctgcagaaaagtggccaggagcaactcacaaaggaaaaaatcctgatagctaatatgtatatggaaaaatattcaacttcataaataaggatcatgcagattagagtttgtattttggggacaaatagggataattgctactttctctgcctcacagagttgtgaaactaacgagggaattcttgagaaaacacttcatacattttaaaatatatactatttttttgatggctccacaggtgtagacatgtccccacactcatcaagaggtgtacrttaaacatgaacagctttttaatgtgttgattagacctcaataaagtgatttaaaagagaaaccatctttggtggcagtgtcccagaaactaaaacaaaaggtataacttgctggctcttcactagtctagagcaacaagggaaaaatgcagttctttttctgttgttgtttgagacagagtctcactctgtcacccacagtggcaccatctcggctcactgcaacctccgcctcccaggttcaagcgattctcctgccttggcctcctgagtagctgggattacaggcgcccgccgccatgcccagctaatgtttgtatttttgtgaagatggggtttcactggcttggtcaagctggtttcaaactcctgacctcaggtgatccgcccacctcagcctcccaaagtgctaggattacaggtatgacccaccacgcccggctgaaaaatgcagttcttaatccaagttcgggctcacatgtagttttgggagaaggcagaggcataactgccccatcaaggaggcagcaatgccaaagggagaggctgagccaggaaggacacagcagaacttggcagaacctgaggagcgcctccttccaatgggcataacttctagaaggcaagaggaaagttagttaaggaaaaagagtttccaccacaacctctgctagcaggccctttattgggatacagtataagttcatttcagaatgtgtgagaaaactttaaaatttgtgttttagaaagagtctataatgagtgttcttgataagtactatatttcagttagtctgaaatgacgatttcaacttttgagatactgacttgtgacataatttttgttaatgggatatgttatcttattgaaagtatctgtgagagttttccctgaaaaaatttttggcatttaaacttgtacactaaaagcctctgactagtatttcccccaaagtatgattgcctataatttactgcaaaaaaaaaagttttcttttttctttttttttttgttttgttttgttttgagatggagtctcactctgctgccctggctagagtacagtgacatgatctctcagctcactgcaacctctgcctcctgggctcaagtgattctcctgcctcagcctcctgagtagctgggactacaggcacgcatcaccacactcggctaatttttgtgtttttagtagaggcggggttttgccatgttggccaggtacgtcttgagctcctgacctcaagtgatccgcccgccttggcctcccaaagtgctgggattacaggcatgagccaccatgcccagcccaaaaaagtcttccaaattgaatcaaaacttttagatcctgaattgagaacatcacatgacaaaaaatagggtatgatgttttggtgttcttcagaccccggctgacttgagaggttatctcctgatgttattaggatttttaaagtagggtaaaggaggtaaatgcagtgtcacgattttgagattstgttaaaatgagmtagaaagcagctgaaaaaaattcatgttggatcaggtgtactttcctccagatgacagctttgaatttgtcccttttgtagtctttggtcaaattgctggtgaccagaagtagctgccttgtcattgctggacttctagaaggattgggactgcccagctgctgtgtgaacttgcctgtcacctctgcttccagaggtctgacttgtcactgtggcaaatgggcagaggactttgatttctgttttttattaaacactgaggtatattttgaaatgtatgcctgaaagatgctcaaaatggtgtgactaatgcattttaaaactgcatttatttgattgaaatgaaccttaacctatactttagccgtaatatggtgggagaattctcacattggatgaccagctagttgtcagtgtttgacgctgacactttagtggccatctggccctccgtgagcattgaactgtcatgaagggcccgatctcaaccacttctcttcttctctttccccctttcctgcatgctcagggacgtgtcctcggagtcggacaataacatcagacagatcaaccaggaggcagcacaccggcgcttccgctcccgcaggcacatcagcgaagacttggagcccgagccctcggagggcggggatgtccccgaggtacgatgtccccagaatggtgcaaagcccggcagctccttcttcccatgttctccagcttgattttatatcataatttcttctgtcagtaaacattgttgagaatgtaaagattacagtgacgcagggaattaattaccatctgaatattaatttgaaagtgcctataaaagccgtatttgacaagtataggtggctctatattatagaaaygggaataacattatttttatttttattttttttgaagacagtgtcttgctctgtcgcccaggctagagtgcagtggtgcagtcttggctcactgcaacctccgcctcctgggttcgagcaattctcctgcctcagcctcctgagtagctgggattacaggcacgcatcaccacacccggccagtttttgtatttttagtagaaatggggtttcaccatgttggctaggatggtctcaatctcctgacctcgagatccgcctgctgcctcagcctcctaaagtgctggggttataggtgcatgccatcacaatggctaattttttttttttttttttttcctagtagagacgggtttcaccatgttggccaggctggtcttgaactcytgacctcatgatccacctgccttggcctcccaaagtgcttagattacaggygtgagccactgtgtccagcccacattwtttttcagtatgaaaatcttaaratatttttagtttgtaatttatttttcacaggggtctaaccatgtctcattaaatgacagcttgtttttatcatagttgagctgtkgaatgagccctgtaacttgtttgggtatcatatgcatatttttattgagtcgctttgacacttggaagagatttattaccatgaaaatataaatttaggkgaacasaaatgtgtaattttccctttaaatagttatggtatgttacttaaaacgttatgaattaaacaacaaattagccataatcttccatgctatcttaccagctctgtttatgtactaaaaatccattcttcttagacattgtgttaggaagatcatttagaatgcggcgattcaacttggaaaagcaaaagtaatgattccataacacattcactctaagttattttataccattgtttaattacagcgtatagcttctatgctgctcccacggtgaatcctcagtggttaaaagtaaaagaaaatccatgacaattgtttataaactccagagaagtgtgtgtgtgtgtttgtttttttgcccacacatatagtaacaagtgctggaaatcagtcactgttcagagaggcattgttataaagtggttaagagcacagcctctgtctggaaccaggcctctttgattcacatcatggccctaccacttgctagatgttaccttgggcaggttattttctgtgcctcagtttcctcatctgttaattgggggagttatcttcctcgtgattattgtgaaggttgtgtgcctcatgagaggcacttagtaggtgttaattatagttatcaccggggctattgttgttacatggtttcattggggagctgggtggatccctacttctttctagtgtttaccccagtgtctccttctctgaaagccttgggagaccatttcagaggaagtgaatatcgctggagactctctcggtctggctctgcccccaccaccggcctccccaggatctcggaccagccctcaggagctgtcagaggaactaagcagaaggcttcagatcactccagactccaatggggaacagttcagctctttgattgtaagtagtggccttgtttgaaagaaaagctgagcaatgttttattgttttttgttgcttaaggagartctcttacgtaaatagtgaccaagggtcttccagctcccagctaactctgacattttccaaagttcctccttccctaggagaagcaggactgtrctaaaattagcccaagcaggtgagaatctttcttgatttggaaggcagctttgctcacccttataccactaacactttcttggtttataaagaactcaaagaagtaaaactccatgatgtctgtaattattagctttaaccttgtagaattcctttcccagccaaaaggctcatgaaaatagtacctttatcacaaaggtagtatttcacagtaacaattaaaagccatcaggcctaatcagtcctcttaagtcatattctgcaggatttatcattctcatttcgctgataagggcacaatgcttaagtggctcatccaagacaaggtttgagtgggagatagaagacgtctcctaagtcccagagtatgaacccttgagaaatgttgtgaaattgtgacactgtcatcaaggtagcattttaacttgggctctcamccatcagaaacatactttctagaagcttcagatgggcccaatgcctgagcccaatggaatcagtcacaaagacttccatgtttgacaatacaaaactgtgcagaaataacccatagaaaatccctgcttgtgcatagaattaagagcaaatgaagtctcagtgtttctcaagaaactgaacttaaaaatgtacaatagtaaatgatgatagtcactccactgaaaatggcatcctaaaaaaaaatagtcattactatgaccataacaaacataaatgatagcactgcatacaatgtaaaagcaagtaagtactcacaaaattgttactttttggttatggtgtttttattttaaaagacagtatacgcctctattacatgagttgcatttatcattcagttaatgtgatttcactttgaaattctgtgactttttcaaaaagagatgtgtcgccaagatgaaaatgtagtactaaatggacaggataaaagaaattgcatatatatgggatatttgaactgataaaactgttgttatagaaacaacataaacaatgaagccttgtatttaaaacctataaaagcaaggaggtaccacagaatccatggcagtaacacacctttagtaaaccaagtaaacactgtaatttttttcagcaataatcataagttagcaattctaattatttaaatgaggagctcctgaatttaattattctagatctgtgaaatatcattaagacccaaatacaatgttgtattatttcacatcgtgttcactgttaaatgagagtcaaatcggatatttgctcattgggattaccctgtattcaaggggaagaacatgagctttggctgggcacggtggctaatgcttataatcccagyactttgagaggctgaagcaggcggatcacctgaggtcaggagttcaagaccagcctggccaacatggtgaaaccccgtctctactaaaaatgcaaaacttagccgggtgtggtggggtgcacctgtagttccagttactcaggaggccaaggcccaaaaatttcttgaacccaggaggcagaggttgcagtgagccacgattgcgccactgcactccagcctgagcaacagagtgacacttttattaaagactgattctttcacagtaaccaatgtgggaagatgtgaattgtcccccatccctaccacagagtcttcttgtaccatttacttatcacaaaatattaaaaatgagtaaatactagaaactgatactatggatgaacttgccgataaggagactctggcttctgtgtgtgacctgctgctaatcttcattcatatcaattaggcttcatttaaccacatagactaatacaaacaagttagaggaatattaagacactacacagtagatctttttttttagcttgatctcactatttttaatcattcctgtctttactacttgaagtccacttagaagctaaaattggctgagcatggaggctcacacctgtaatcccagtactttgggaggccgaggtgggtgaatcatctgaggtcaggaggtcgagaccagcctgaccaatatggtgaaacccyatctctactaaaaatacaaaaaattagccaagtgtggtggkgggggcttgtagtcccagctactcaggaggctgagacaggagaatcactggaacctgggaggcagaggttgcagtgaactgagatcatgccactgcactccagcctgagcaatagaacaagactctatatttaaaaaaaaaaaaaaaaagcagctaaaattataaataccagatctttcagaagtaggccaagatgatgtctgagctcctctgaatataggatgcaactgactctttttcaattgtagtaatcaataaatgttgggtagccacatatcactatttcttccgtctattcacatcacattaaaatttaccctgagggtgcatcttagagcaaactacaagactgctagcttctttctgtttgtaaagcagcattagagtgttgcagagtcctgttgagtctcctttctgaaagttttggtctcctcttacttttgccactaattctaaggaccaatcaaaattccagtctgcttaactgaaaattaaagtgaaagataactttttcaaggatgactgtccttgctctgaaaagatgtttcatttaattaccttctaatatcgaagagcggtgaatatggttgagtgatatgtttgttaaaccaatgaaagttgcttttaagaatatatttcttgatgcttcctgtcttttcctctccttccagcaaagagaaccctcctcaaggttgaggtcatgcagtgtcaccgacgcagttgcagaacagggccatctaccaccggtaacccatgctaatttccagtcatcagttgactttttgggctttcatttacaatcatctgggctgctgcaaaaagagtttttcctgtgtaaatttatttacaatataaatgagatgtttttaaatttcctggccaattgccctaggaaagtggatttccaatacagagaattgttactgccacccatctctaaaatgctggaacctccattgctttagtttttcacccaaatttataccaattttgatttgctcacttaaacctcttggtacattagttagtaattccttttaccttattgagttactatagttatgctccagtgatctgtactttgaaaacacattgagtccctttaaccaggaagaactcttctgggcgaccgtccacatgttcctttcccttcctaatgacstgaagtctgaactctacagagcctctgtaccttctctttaaaggcagctctgctcaccaggaattggctataattctttccaactctctcatcattttaatagctatcagcaaatgtagaggtgtaggggattttgtaacatctgatgtatgtaaaaagaaatattcaagttggaaggcagactagaactgccctgagagatgtttgatgtacacattaaaaataagaaattttacataaatttgtttcttcttttggaggtgaaaatatgtggttttaatgtgttcaatttgatattttaccttgacagtttttgtctgttgctacaaaaccttgatcatttttaagactaataatgtattacgtatgaatttgaagggggaaaagtgcatttaaggtttttgaaatcacagtgtcttccctctcatgtatgttttttcttgacttcaaaggatattttggcctaggttttaattttttatgtttgagaaaaaattaatgagtatactagtcaaggaagcagtcaaaataatagagtcatttgtgacttacactggagagacttaataataagcttgataagagcgtcttttctgggatggtttcagtacagggctcccaaaaacaaaataatcaactgagatggactggtaggatccttctcaacctcatgatctgtgattttccttgaacgaatggcactttctctccttttcaaaatcaatgtcaattttatttcccaaagaactcactttcctggaaactggtgattcctccctctttctttgtactttctgatgctgtaaactcactgatcaccagtggcctcttgagttttgagtgtggggagatttcagaatctgctaattatttgacaatggcaggcaaaaccagaccagctttccatttttctctaaggcagctcactcttttgaggttgtcattgtttacccaggtcaaggatgagccaccttggggggcataggggtcacgcttcctttgtgctactggtcatcagcgactgctggctttgtctggatagggtgggtttcagggattctgatctcacgtcacctgccttacagcgctgccacagcagtgggccctgattcagacagcagggggtcatcccctaagtgcatttcactgatgtaaattatcattcacagcccagtgccccagctgggagagcgcgttcatcaactgtcacgggtggtgaggaaccaacggtaatgatccactttatcagacatcaatagcargaggccgtgaggcagttttaatatttcgtgtagtggtgaatatacgctgtttttaaaaataagattagctcctttgtgctacagagctgcacacgtttcttattttaagcttctcatttggggattgtttaaaggtactgggtaaaatagaatgatttttttagtcccacataattttattaggaatactatcaggctttggttaagtgcatttaacttgaccatttagaagatatttttgacttttagtgtttgtactcctgataagtttttccatttcattagaatgcttggttaaagtaatttggttggaagatcatcaaagaagccacaggaattgcatgagactgtgtgtgtgattcctggatgtgcccagggcccttctcttttctgtatctcccctaccacatttttcacagggggttagacttttcttgtccccagaatgcaccatgaccctttctctgccaccaggggctctcctcacacaatgaacaagtttccgtaattccaagggaacataattaggatatataagtgatctagaaaaatttatgtttctctaagccaaccattcttattcattattttaaagaatgtatggtattcctgtctgtgggtgacttagatttgtattttaattgcctgttttctacttgatccctaaagttaggctagcttatagtttatgcttcgcactgcaatagctgtttaaagaatttcctggccgggcacggtggctcacgcctgtaatcccagcaccttgggaggctgaggcaggtggatcatgaggtcaggagatcgagaccatcctggctaacacagtgaaaccccgtctctactaaaagtacaaaaaattagccgggcgtggtggtgagcacctgtagtcccagctactcgggaggctgaggcaggagaatggcgtgaacccgggaggcagaggttgtggtgagctgagatygcaccactgctctccaccctgggcgacagagcgagactccatctcaaaaaaaaaaaaagaatttccttattgtttcacctgtgttgtattttgctataactgctcattacttgtggataactttacgtatacaattgctgattttctaaagatgttgatgacttcaatttaatgctcagcattgtacagaggaaaatcaaactggcaacagtcagccccagaacactcagctcaggttaagatattgagctacagtggtttacatgagtcatrtgttgagtgaggcagcctccagtagaattcaagaaattctacatgaactattacccaccgtgcacttgtaatttctgtgggagtagtggagctttgagggggacaagatcgttttgtgagataatttyagttgaattcagtgctgatgaacatcatctgtatatcacctatttttgtattttgttggccttgcaacctgcgtgtagctttggagtgttgtggtagctgatgtagtaaatgaagtaggaatggaatcattgcagtaccaggctccatggcaagggtcacctggcaggacaaggtgacccctctgaatgagatcccgggtggcacgttagactgccattttcttgccttcttgcctgcactctcccctccccgtcactgagtttcagcatgggttgggtgttttctttccacaggcttggcaatattcattcctaagtgtttcatctactttggtagatgtagatagatctccctacctacttaggtttgaaaggatcacatccatttctcttctgctgtatcctgcatgtttctcttccacatcctttgtcgtgaatgcccttgacttcctgtcttgcaattctgtctcttcaccccgtgtttccctctttggcatcccctctgttcctctgcacatcactcacactgaagtgtattgtcctgggctggagccatcatggtattatatcatctcactgcccctgtgctctcacagacatacggctgtgtacacataggtacacattgtgccactttattttattttttttaaatgggatgtcatgtatacattacttagcaacttggtttttttttaacttatgttcattcttctgggacatgttaataattacataatattcactgacgtaaaggcactacagtgttaatttcccgacattcaaggactttctgctccccctaccctgccctttcaactccatacgctgtgctgaagtaaccgtcctgatatagctttctttctatgatagtgctttcattcctgtagtctaataaacaggccctgattctcagccaagaaaccacagccctttgatttatggcaaataaacgcacagtggtgtcactttctggcagactaagccagggccctccccatgagataaaaggagagggatagcacagtcytttcagtctttgttgtatatattctaaaaatacacgagccaccattactgggttggtgcaagtcttggcaaatctgtgatggtcagtgtcaaagtggttatttttaaaagcatattgaaacttctgcagtttacaatcgtgttctttattttaatgaaagaaacagagccactaggaagttctagctaatggcttttgggcatcacaaagcagtagtgtattcagtctatgatgaaaagctgtgaaatgttaaactaagtcgccatttctaactggtttgattacttttttgttaagctagggtggaacatgctcacaagcacagaacagcagaaggctggttttggcttcctggcgggcccttccatggcctgtctgtagaagctgagtcctgccccctcaactagccgtgcagggtgggaggcagtgtgagttacaaatggaatcatcagcacaagttgttctatgtggtcatttggagagaacactgtaaagaaacatttccaaattgccctctcacataaatgtaactaaattacaggttgccagttcagttctcaatagaagagagaatgagcattttaatcaaattcagcgttctgtactacactcctaattttccacaaactgattagtgctattcactgtggctgtatgaaagtaacctgtatggccrggtgcagtggctcacactggtaatcccagcactttgggaggctgaagcgggtggatcaattgaagtcagcagttcgagaccagcctgaccaacgtggtgaaaccctgcctctactaaaaatacaaaaattagctgggcatggtggcgcttgcstataatcccagctactcaggaggctaaggcaggagaatcacttgaacatgggaggcggaggttgcagtgagccaagattgtgccactgtactccagcctgggcgacagagcaatactctgtctcaaaaaggaaaaaacaaagtaacctggttgctagaattcatacagctttaggattcagttctgacatgatctatgacacatccatgtgctttcagttgatcagttgcctcccaagtgtcctttccagagattsagtaactgcaaaaatatccttaaggtttccagagctraggtttccggagctgagttttccaggggcggggccagggggagtggggagttatgggagggaaggggcctgggagagggggaagtggatcaccagaacggctgaaggggagggctctgggcggagggagctgagaatgtaacacattccatttagtatttcattgattgtataaacaatagtaggtcaaaacttgatagcacatactttgccagagatactaattgaccaggaacttaggttacaacttagctcagcaggggagtccattgaagtgcccggatccacgtagctctttgtgttggcatcgctgctagaggaggaggggaggaaggagcttcactcaggctgcatgctaattcatcgatgtttaatattcatgaaaggattaagtcagtgttgatgtttcttctgctcctgctgagtctccacacctggatccagaatgctccatgatccgagtctttgtgtctttataaactatctttagggagctttaggactttatctcgggaaatattaaggaaatggttttccttaatatcagcagaaagttttcttacacataatctaaaatcagctgcttcatgatcttacccaggtgatctttctctgaattgtgcttttaagcctgggaggttaacatactgcttctctgtggatggggttttcaaattacccggcagcatccttgttggtgctttctctaatttgagatcctggagtccaccagggaactccaggtgaccaccttcaccaagacacattgctggtagtgcagggaaaaggtggcataagcacaggaagaagttaggttcagaggaaatttgtatcctcagcctaatagcaagaaaacgacaactgctaaaatatctggaagtaaaagaagcagcttycttttgtaacctcacgtgagaggttattcctaargcatgggctcctcctatacctttagattcccctakgagccgtggtayakctgtggtcggcttctggtttctgagcttttccccacttakagctctttcacaggcacagatattacatgcatcgcctatgcattcaagccctcctgggacagccctgatctccagcatctgtcccagtgcctccatacatcatcaacacatccttgtttttcagtgtttctccatccacrctgcatttcttagactgcttctcagggatcttcttgtgatcaaatgtggactgtctaaatacagtcactmtatgcggggcaggtctctaaacccaaaaactgccaagctgtgttcaccttcaaagaaacacactcctatcagcagacttgggtgcacatagcctggggtgtgaggctgggtgctgggagacttcctgagctggggcacacagatgtcctgggtggtcctccagattatatgctactgtgtgaccatcagtatcctagagaaggggctctgtgttgggattttaaaattttgccccagaagctacagtgttagggtcctaagctgatggaggaatgtaggcctaagctagaagagcaccccatgggagctacatcgaggagaaactcagagcatccctctcatacacagtgacactggacagtttgaaatacctttaagctctacctggtttggcagtggaatttagtagctagaacagatgataatgtttttccctttccctgtgatcaccttggcagcaaccctttacgtttgagactacggggtcttagaaccaagttstgtaagaatttggactctgcaactgtatggggttcatttcacagtagatttgaagctgttggaaatctattgctgttttccagacacttgtaagtgttttctrtataaatagatctaattaactttgtctagagaaaataattatctgggtgtaccttactttattaaactgatcagaaaacaaatgcaaggtattaaataataatgatttcttgcacaaacagccatcagtggcctatgtacataccacgccgggtctgccttcaggctgggaagaaagaaaagatgctaaggggcgcacatactatgtcaatcataacaatcgaaccacaacttggactcgacctatcatgcaggtacgaagattgccatccaacttaaaaccgcaggccatagaagccgaaatgtacatgaccgaactcctttcctggtgtttatgtattgttctgaaagacccgtatttgtaaaagctttctcacaaagaaaatgcattactttaaatacaataatagcctaaggaagaatttgcttttcaaatcagtttatcactgaatatattttaaaaatgtgacgtgaaagatattttcaaagtaagagcctattgcagtgtgtagcttcttccctgcccagcccccactttaatccgaggctagtttttatgctgggctagtgattcatttttatttcccttgaatgtgtttccccatcctttcccccatcattatgtttaattatttcctccacgctttaaataggccagacctcttattattgctgtttgcgttgttgtttgggttcgcgctcctaatcacacacaccgggagatcctcctatgaagctaacttgtttttgcctccaaaatagcttgcagaagatggtgcgtccggatcagccacaaacagtaacaaccatctaatcgagcctcagatccrccggcctcgtagcctcagctcgccaacagtaactttatctgccccgctggaggtgagacggctacctcatctaactggactcactctgtcctgtgactcccattctttcttctctcttaactctgccttcartttcgcagccacctcctctctctgatcagtcgttgtgttggtagtgaagggtgttcttgtgcagcctttctacctgcttctctgtctcgcccagttaacattcctggactctctcacctgattctcattctcatttggctaaggccgtggtgacttgtgctggacgtgggcactctcttttcaggacttccaccgttcttgttgtgtttcgcttctttttgcctgttacctcattagaattgcgtaatccctctttcaaataccaagtgctgatattgagtttttaaacatagctattgctttgatcatttgtttttctttcgactgtagggtctttcattctatgggcatacatgtttctgatgcatatttgcatctctgcatcatggctgggcatctgcttgtgctctctgtcgtgtttgtgttgttttggtgccatcctttaacatcacaaatgtcagagttagagaagccaaagagcaaatgtttgaggtyctaagcttgactgtgtcttagagacagctgtgggcttctccacgccctgggtccagatgctgataagtgggaatggatgctgtctcttccacactctgatatgaatgtcatgggtaacaactgtgagattccagatcgttgtatttattgatgtagcttttttcctttktgtgctmtaaaacttgccaatctgttyttcattagactgtgagctcattaagagcaagggcacatttttctccactstgtaaaatctccatccataayrcttagtacagmacagtatttttggtacatactgagtagctaccaaaggatggtggttataagtacttaatattgttgtgtgtttatccaacagagaaaatgtaaagttagattgatttaaaagtaaatgaatgacagaaaacaggttttggggatcttccctcttgtccatctccaaagagaagccttctgcaatacccaggtacattttggcacattggaatcgcacatgctaaagagttctaatcctcattgttattctttagggtgccaaggactcacccgtacgtcgggctgtgaaagacaccctttccaacccacagtccccacagccatcaccttacaactcccccaaaccacaacacaaagtcacacagagcttcttgccacccggctgggaaatgaggatagcgccaaacggccggcccttcttcattgatcataacacaaagactacaacctgggtaaggctgctgcttttatttggctccattttcatcatgaagtctggcattaattccttgatttccttagtgtttgtagttcttgcagaggaattggattgactgtaaagggtgtctccagagggtctcctcagcctgcatctggcccctgcataaatgggcgggtgggagtgggtgggcacaggctggtagctgtctttggtattggtkctgggactgccttttctcctgggaagctctagtttagacagttcaccrtgctggatggaaaggtattgctctgtgctgttaagattttgttaattgatcccgtctcacaaagtaatctcaytaggagttataatcattttcaaataattttttcttttgtcagtttcttyttgcactttcattggcattacccaccttcttttgatttgtcgctttagtttttaccgttcacatcagatcagtattcacacrtctgaggtacattttcatgcccttgatcatggggtaggggatgtactgagtgactttggttgtagatctgatagctcctttttgtgatcattttgtcaaaattgatttttcttaccatgcaactctttcatgtactcctgaattgtacccaagaaagaatctgtacattgtattatcttgagcaaaatgagattaatcaaagrcaaatatgcatatctttgtatttctgtgtcagttctttatttctttagccgaatcggtggctttttcagtgtagtatatgattcttttaaaagtcagttggtattttcctgctrtataatctctatacctgtaattacactgaaacyggttcccgtatttctggctatttttgatgctgcagatggtttttcttccggttatgtccccatcgaattgtctagctagagttaactcagagtttaacttggtcctactattatctgtgctacttgctcaaaactgatgttatgggaatgctggttgagttttggtgattgttattggccctakctcttcggtcttggaccaacaataaacatacaccattaattcccatttctagtgatggacattaagtgtgtccatttgatagaccascagccttatattcaagaacaagccctgctcaaggggatttgggctgtcattttatgccttgcccattgtgtggtatcagttcagtccagcaggtctagagggcgtgctcctakaatcctttgaaccgtgggacattgtgtcttcaagggcattcttggcatttggggcagggacatttgtgccttcagttgcagactatttaacaaacttggcttctgctaccasgtgctaatggtcaccattacccccaccccaacataktgatgaccagaaatgccctacacatttcaaaacagccctaagtgagaaccactctaagagctctttctattttgaagtaagggaatggcctgccaagagaatttctcatttagatctggtaacattcatttggtaaactgataactgcttctaaggcatataataacatgtaggtttgactcccctactagtctgaagataatgttacagatttgcaagcaagccaagagtaagagacgggcagctcgtyggaaaatatagtaatggagttctttttttttatgtctttttacttattaccatggaacccctggctgtcctgccagtgttctcatttactatagcactgctgtaatttcaagtccttagccagaaacaggctccagaaataagggctaacgaatataaaagtagatggattagtgtaaggagccactgtggcttgccaacataagctatgattttagtaattttaactagcttggtaatcaaatcccctaaccttttcacagcctttcaagccacaacaacagtgtaattgcagctgggcagattgtattttaaattaaacagcactcgctttatttattgcttgcaacattgctgaatgaaacccatttttactttccagttgcgcctgtttacccagatacttgttattgactaatttactgatttaaaatcataatstgttagaacaacgttttgttgctgctgctagtgtgggaaatcctcaaggtaacaastggaaattccacaagctactccccttcttaagcgaattcagatgtgctgacacagctgcgctatcgcttctaaacaaaggcctaggcaggattttccctgcggaagacacactctaaattgcctgttcattttgacaaaagatgaagagccggagggaagcatgaagataatttgcaacttaaaaatctgttttgagttggttttagggtttgctttgttttttatttttgaaagaagaagagaacaaatgagagaacagcatagctattcttagatttgagcattagaatagaaaaaggaaaaaaactggtaggacaggttgaaaatgatgaaaataacactccttcccccatcggcctgggcactgttgattcttacaccaaccagaagcctgaaaagtatcaggacatttcccctctatacattgagaaattaaaaaatttattgaaatatgtcatgaaagatgaccttttacacacacacagatactgaaggcagtatgccatcagtatttggataaagtttggcctcattctcttttttttaattattattttttttgtttttgagacggagtctcactcttgcccaggctggagtgtaatggcacaatctcagctcagtgcaacctctgtctcccgggttcatgcgattctcttgcctcagcctcctgagtagctgggattacaggcacatgccaccacaccagctaatttttgttgttttttgttttttgttttttttagcacagacagggtttcaccatgttggctaggctggtctcgaactcctgacctcaagtgatcctgccgcttcggcctcccaaagtgctgggattatgggcatgagacaccctgccaggccaagtttagcttcattcaaagaaagaaagaaagattggctttgttccccgcctgggtcaggcctttcagggaatgcatgctggagaccaggggcttgggagggatgtaccaaggagggatgttccatcctcagcagctcagagcacgtgtatacgggttgagtatccctagyttaaagattcaaaatccaaaatgatccaaagtctgaaaccttgtaagcactgacatgacactcaagcaataaatgcttattggagcatttcagattctcagattagggatgctgaagtggtaagtataactgcaaatattttgaaattcaaagcccctctggtccccaagcattatgggtgagggatgttcaacgcatattagtatatttgtgcctttcacaggatgaagcatgggcttgcttttgtagcaagaaagattacaccctagttaagttgcaggtttgttttccatccaagttcaaactaatgaaacttattactctaggtgtggttgctggtctcttccaggatggaaaagataaagaaaaaaggcacttttttttaatccctgtgttttatatattttgaattaggaaagccctttttaaaaagatactgctctttgcatcctgtttaaaaacactttgaacttgatggagggaagcaattttatattacacatgaaagagttcccgttatgaaactgaagaaaggaagaaacaaccaggcacactttatgcgttggatcatttattttcattgcatcagagccctcgttagtattccactttctcatcagctctgaagttgtccataactaatagagagccttgaccgccacttcatgtgccctggcaactaaggagagatgcctgcctccttgagtggctcggtgggagtcagggcttgagggtgaccactagccttagccctcagagctgattcatggcagctgctgccattatttttattatttttgataaaataatattataagcctcaaggcctctggccctcacagtctatgaagtctaggtttccatgcaaggccactttagcagatctttgaaattcggttgactttatacttcatgctctgcccctcactgcctccctgacacttttctctaatttcagcttcttttcacgctacggccccccccgccccccmcccccctttaaatcaccagccttttaccaatagggctgattgtctttcacggtagcctacatgtgattccaaggtcaggctggccttgtgtgtagcattcagaagccctgccctctttcatgtaatagcagtcctcagctttctctaaatctggcatggtcataggctaggtggaagcccaagggtcccccgctggttgtggcgttacctggtccggatcagagttagcattgagtgggtagcttttgagaaattcagtgctttcagtttttcctctgtctgtagttaaccagtcatgaatgtttaccagattatcagcttcttggaccttctcaatcctaaatcagcttagcatatttctttatgttctgtgtatgtcagtgtactgcagaatactggattattttgtgcctctgcttagccttttaaaaaaatatattgggttcagggtcaatatgcatcacaaactgctaacaggatttctttcttcatttaaaagttcacctagctagcaagaagcaarggttgatttttgttgttcgtggtcttttttgattcttgccagttcccaagatctatgattatgattcagtgatactatgacttacacggttgacttgggaagcagaaaaatctagtaatttggcagcagcaaaggccctattataaaattgaatgaagctgatatcaaatgtcttcacagtttactttttttaatcttaagcttatttggttgatagtggttttttttttgagtataaagatatggattctcctttttatgtttttggaggcaagactcactgcatcacccaggctggagtacaatggcacaatcacagtttacggctcactgcagccttgacctcctaggctcaggtgatcctcccacctcagcctttcaggtagctaaggcaggcatgcaccaccacactcagctaactttttgtgttttttgcagagatatggttttgctttgttgcccaggatggtctcgaactcctgggctcaagcagtcctcccgccttggcctcccaaagtgctgagattacaagtgtgagccactgcatctggccttacactgcatttctttttyttttttttctttttttttttttttttttttttgagacggagtctcactctgttgcccagcctggagttcagtggcacaatctcggctcactgcaacctctactttccgggttcaagcaattctcctaactcagcctcccgagtagctgggactacaggcacacaccacacccgggaaatttttgtatttttagtaggaacggagtttcaccatgttggccaggctggtctcaaactcctgacctcctcagcctcccaaagtgctgggattacaggcatgagccatcgtgcccggcctacactgcattttaactgggtctacataagtgagagtcagctcctggactctgggtcataatctttgggcaacttcctgttctctctgaaactccatttcctcatctaaagaaacagaccatgtgcccaacctcctaccaagggtctgttgcaggattttacatctgaccatgcctcataaatcatgcagcctgacccaggttgtcagagtacatatttctcttttgttgattctctgtggtatcttatgaagcttatgctttaagaaaaaaattttgtaaacgtttaaatattaagacataaatgagaacttaatctgcagaacttggtcaagaatctcagtaaagttgtatcataactttgtgagtttgcctgatgaaagcgactctccctggagtagccacgtgacttcacagaccagattgacattctctgctgagttcagaaggagtggaggggagcacaagtgctggaggagggtgtggcagggaggcctattccctaacgtgttaggctggctcccctcaccgggagctcgggacccatggagagatttygaaaccgttgtccccactccctctttgtgccacattcactggcaccctccattctggtttccctagtaacatcactgctgggactctcttccccttccccttctcaaggtctcagggaaatggttaacctttcatgtaaatattcttactctcctctctccaccaagcacaagaaggaagagtacagtctgtctcgagagacagtcagccaggcttcctgtacaaaacagagatgggacccatctcacgctccaggcatggacagcctggttgccttgaaacaaacagctcaagaagaaaagcacccagtaactgcacacagatacttccacttagcatctactgtcttttacatttttcttgcaggaagatccacgtttgaaatttccagtacatatgcggtcaaagacatctttaaaccccaatgaccttggcccccttcctgtgagtacactggagacacatggaatggtctgaatatgtgtgttcctttatccgctcaatgttgatggagaggccctgtggaccttctctatctccaggctttgtggatctcattggtttgtgtttcttaacagaattgggtgtttagctgaattgtagtcatacattatagttcatgtgatatccagtacttatgaaagaggtttctgaattgctagcttctagcagaagatagaccttgtacacaggatgttcaagagacgttctctgcaggtgacaatttaagtggcactcattcattttgtaacttagcaaccactgagtttcagtcatattgctgattaagtcatcagaacaaaaataatgaaaatagtatgggagaagaaggcctaattaatcatagaaagtttctataagtcatttaacctgcagatttttaaagtttttttctcccttgttggtgacggctcagtaggagttgagctatatacttaaaattggattttgaatgaaaccttcacatacatcctcctcaacaactcactctcagtttgaaaaagccgtagggggtgacagggcagtggttggactccaaggctatttttaaatgggaatttttgttgttgttttccaagtgtaagaacctttttgttgcctggtatattagggcaacattggaggctgcgaaggttaaggttcaatcattattcattaggttatacaggtatcccacaccaaatctgtttggttcctgggttcaaatagaaagaaccagagagttagtttagaaaacaaaagaaagcatttttttctgaatctgttggattcctgaggttcagatagcaaatatggatagttcagataatgagggcataccagctttatcttgaaaaaattctccaaatctgtttagttcctgagcttgactagcaaaagttcatggtggataataccaatattagatcatcaactgcctggacaacacaaatacagttaaccatgtctaacatttttatattaaccccctcttcctttcctttagtactcagtatttatttaattaaatggtactcaacttcaaactccactgttccatggaatgctgcsgtttccctttgaagcttttgagctagcagcccatttccggttcttcatacagtcagcgcatctgagacctgagcatgtgataaagcgtgttgctagacatggtcaagagttaacttgaaatgttcatatttagttcacgctcaatgcataaatgtaccctagcagaaaagagtacagaggtgttctatagtttttaaatgttgcctttgatttcagaactcctagctaatgtttatattttctctctcccttccttccccggatactagcctggctgggaagaaagaattcacttggatggccgaacgttttatattgatcatagtaagtaggcgctgttatggacacacaggtgttgtgggttagagggaaggagtaattcaaacatcatagtgaaagctttgtcattttactctttatctaggcagccaggtgttatgtggagaaaatgataccagagaatcagtgccttcatacggtactgtgcattcaccccaagtttgcttaaagtagcccatcaaactttcacccaatctgatcttgtgacctattaacgtgtttttttttgttgttgaatttttaaaccacattttgattgttgatcccttgacttttgcacatttaataaatacactctggtaatagaaaataagattagaaatgatgatttagtcaaaaatctgtgaacagtgcttgaagcagcatgtaagttttttagacactgccttcaagggtcctatggcaggatgcccgctctgaccttattttctattcacggcatgtttccttgcacccacaacactaatatatatgtattttctggaaattgtagtatatttgctatagacatttgctccagcacctatgaaaaaatgtgtggtttctcattccaactaaaagttcaactaataaaagtttgctttttagccagtgggattttttttttctcattctytttggaggtgccatgttcttcatggaatcatatttctatgtcccttaaattttctgaaaaagtatattaaaaagaagccttcaaatagatgtaaagtttcaaccatgagtgcaatttggtagtatcttggtctttgctttcatttggttcatgaacagaaagttagggtttccctggcttcacaatttcataactaaacaaaagcacgttgatgagccacctgctgagaagtctggccacaagtaatcctcacacgtataggactggtcactatctcataggcatagtacgtttttcagatgttactaggaggcagagacattgtgaacagaatttcactttcaggccctgggggttgagggcttattataaatggaattaagcaaaagtaccagcagtttacaattcaactgaaagtagaagtcctaggtgtatttagaagagtgagctaccctttgtttaaaccagatatttcaaggtgcagagacttagtttttgtcttttatcaaaaaatgggcagatttgtcaactgtccagaatttcatagtaagcataaagtatttttcctgctttcatgtatgtgtatgccctacttttttccttaatatactatttatttattgttttaagagaatttactaaaatgagagagaggccacacctctttttcccatgaaaaacaaaataatagtttccggcttggtgcagtggctcacacctgtaatcccagcactttgggaggccgaggtgggaggatcagttgaggtcaggagttcgagattagcctggccaacgtgatgaaaccccgtctctactaaaaatacaagtaaaaactagctgggtgtggtggcgtgcacctgcaatcccagctacccggatggctgaggcaggagaatctcttgaacctgggaggtggaggttgcggtgagacaagatcataccactgcactccagcctgggcaacagagggaggctgtctcaaaaaaaaagaaaaaagtttcctttatagtattttttatacatcacaatcacagttttaagacaggtgtgaataatactgatcattttactaaaacaggtctttactggtaacacatcctggtctgtgacgcatggagagcattgcacacaatattgtgacagttttctggctggagatgtgatgcttaggtccccctaaaaagaatgttgtgaatgtgtttcgtataccgcaaggagccaaaaacagaaaaacacaattacaaagggctgtcgtagcatgcgttaaaatagtgaaaatcactgactatttcacttgtggtgtcatagacctagtatgatacatagcagatgcttgatacttggtgacttgaaatcaggttcatggaggatcagtggtgaagctcttaggaagttgttgtgcttgatcagaaagtgaagtgaactcacttgaggagcagtaggtgcccccactccggctttccacccccaccggcctgaggctagcgcaactccggcttactggaaggtggaagaaggtaactacctgctakatgcctgggcttttccttactcctgatcagttctgcagttactccagcactctgcccaaacatttcctcatttcacttgactagagcagcacccccgaggctccattatactctgtacagagcttgatgcaactaagctgtgccaatatatttgtggccattgacttggagattaaaatttattttgcccttgcacaaccatattgaaagattctgttaaagagatatagcataaattaagtgaccaaaaaccatttaagaaaaggatttgtttacgagtgcctccttagctgttcatgctacgtttctaccatcgctccataattcatcaaggtttactcaatggaaagctgtagagcagtacacgtcartgaaacagttcaagtcatttgcctttccacaaaattcagtctgtgaaaactgcagaatacctatcttttgaagaggctttatcaggctgacacatacattccaaatgggttgaattacctggaagataacatttaggaatgtcctttctgtcagaagaaagcctctttttctaaacaatcttatagcaaaactcagcatctgattttgctgtcataatgcctacaggacaggaaccaggttatgcccacgtatgccacaatgccgtgagtgccgtcatcttgtaaattgcttagagtcatcttgtcttccagcatacctggcacgtgggtccacctggaattacasatgagatgatgagatgcacttgtcttttcaataattaattatttctgctttgtaagtttttcctgagaagttagacattttcaagatgaacaatactcagccatcataaagatttaatttcaagagcaacgaatgatcgagactaacctctttagactcctcgattcctttgtttgctgtctatggaatggctcctggctcttgggcctcaggtgggaggttaaaggaaggtcttaaactgaatctctacatcttgtaggaatgatgtcattcttcttaaagaccagacaggcccagcagctgagtaattggccacaggtatcctatctacaacattagaagagaaaattgaattccagtgattttgtaaagtcctattttagtctttcctgtcaacagtcttactagacctgttcatcgtgactaaactgagtttctcatccttccacttccttcttgtccttttattggraatatatctcaaagaggaaaagcaagtttwaaagccmaagttctttaaaaaaaaaaaaaaaggataactggctaccccatactttcatacattgaccatacttcactgaagaattctttatcataaccatgtagaaacttgtgttgtyccaaaagcttaggctctttttaaagggactttgttttcaccatcagcttcattcagtcattaaaaaaataatgcactaagttcctgttacctgctgggactggtcttaagtggtagagaggggattgcaaagatgaataacacacagtccctgtccttggggaggttaggtccagtgggaagtagcaggggatatttcaggtgttagaggagtgaatcagttgttacacagaaacagaagaggcaaggactgcatctgcttgggaggtggttgggcacagggatggggccctgagagaatgggtcactttttagatggatgacaaacactgagtaggattgaggcagtcaaagccccaggaagagtgatcctaggatgcgtggaggtgtgtgaatatgtgcagatgctgccacgttccgagaaacgcagcattgctccaaacagctagtgtgccgcaggggcgcacaggccaagccaaagggtatctgcccggtgtggggactcgggctcaagccacaggcagtggggagctcccaggggatttcccagaggggagggatggggtcgaaatcgttmtttagagagatccttttggcagagctgtagaagatgtcttgaactggggttggggggtgagacaattcccagtgacgcccagagaacagttcagggaaaaaaaatgagccctctagcaagaagcttatcaggaatagagagggttggtccgggaccaccagagtgagtgacacggccaggttcctgattgggacagtgagtggattgtgatactgcacattggaatgtaaggtcacgttaccaattttggtgttgggtgatcagaggtttggttttggtagagttaagctgaagtacttacgggaaacccagatgcagatgtccaggatggagcttgaagttcaggtctggtctgaggacttgcgaatcccaatgagtcaggagttattcatttattttctgctttgatgacaatatccattgatacggttataatccaagttggtgttttaaggcgcaatttttactcagctgtactccgtttcctttatttggttttcttttctcttgttttccatcacaatagcaacttttactttccaaagtcttctgtgaaaggtaagggacccaaaaatgccttttgcttccatcaagattctctcaaacagttgagatttttcatgtaaattttctgccagcatgaaaacaaaagattctagaatcatcacttgctttggtagcttttttttttttttttagcttttcctctgcttctattaaaataataataagactttttaaaattcctaatatggtcattaaaacagaattcactaattattcttatcagctcacttacagtgtatacagaaaataaacagaatcaatattcttcccctgcactcccccgccccggtccccaagacaggtgcagatcgggctggagcatagtggcacagtcatagctcactgcagccttcccctgggctcaagcgatcttcccacctcagcctcccaagtagctaggactacaggcgtacaccaccacacctggctaatttttttttttaaccttttgtagagatgggtcctcactatgtttcccaggttgggcccgaactcctggcttcaagtgatcctcctgcctcagccccccaaagtattgggattacaggcatgagccactgctcctggccaccctttacttttcaaataattttcttcttctttttttttttttttgttttttactaacctagatatccaaaaactctggagaacctactctccctagtgtgccccaccccccgtacctttcatgtgagtccattgcactctctctccctccactccaccctagtacacacacaggaatccgtaaggtctttttaattatgcacagttacaaacaccaagtgatctaaggcagctgttgtgtattatcacctacacaagtaatggtatagatagcattgaacagtcttgtgcacattaactcacttggaagaaagcaaaccaccttttgccagtgtgaccaaacagaaaccatgctctgtaatcttcctctgctgtatctaattctcttttttggactgcctaagctgctttgatttttgtgtgcatatgagtgacgcatgtaatagattattcatttgttcaatgcaggattcttaattgaaagcagtttttcaacaccataagtaaagagaaaagtatttgaaatgagaaaaaaaatcgtgtgtgtgtttgttagccttttgggaaactaagactttttaaatgctttttttcaactaaatgaaaatcaagatcaagttataaatccttaaaagaacaggggtttataattcccattttagcaagttatttgcccaaaacagtatgaatagatggtttatctttagttgtgcatttttgattgagtgtttttaactaaacagtatgtgaggggggttgccatatagactgtagttacctgctaactctgaaatactaatttgtctttagaacacagggtgggggactggacagcttttgaagaatccagaaatacttccttccaaaactttctttacatagaatagatttgaactaatgttctgattttttttttttttttttaacattttcagatagcaaaattactcagtgggaagacccaagactgcagaacccagctattactggtccggtcagtattttcaaattctgcctcttcagtataagattttggttacgtgtttacgtgtttcttgtgtattactgataacggtgatgtcaagggacaacggtgattgagtagttgactagaaacagagcactttgctgccatctccttactgaagtttccaggtgaggtacagctgcatgtgccttttcagatggatttcattataaaggaaaacagcttgataacgacagcagaattaaacatttttcttctcctttataaaagggtggactataagtatagtcaaaattccctcccttcctttttatatgaagcaaaaccaagccctatcttcataaagtgttatcatttctttaggccaggagtagtaaatgtatgccaaaagtttaaatcttttacaactttcaaaaatctgtagaagtttgggtgagattatagctaagttcaggagctggcagagttaagagtttggaactctgccgacccacagtgttctcatggtcccctcatatatgccgggtggaaaaagaatcaattctgatgcaggcgtgatgacctcttaaaacaccgtagcacactgtgttcataaggcagtgtgagaaccccactccctgaagcatcaggagacatttggtatctcacacttgttaacaagtctgtagaatgggaccacactcatcagcagagagcacaccaccagcttttgtcagtggctatacgagtgcagggaggtaatttggaattacaggagttgtactgcgatcarcagaagattgcaaatttgggattcttagaccagaggagcaaaaggaactgaagtttgttatatcacatgctgagctaagaggccagtaggtagatttaaaattccaatttcatggctttaatctgattccattcaaattatgttttgaattagtaagatacatccatttgaaaacttaaaagatactacattgcaaatgtgccccggtaactgactcctgttagttacttgttggatttgtttagtcatttgggtactatttcctaggcaaagtgcccagtagtacctgggtaaaaacagtcaacttttttctctatgcggcttaaacactgccttactctgatgcttccttttgatatatatatattcgcagtcacagttgtttattggaatattattttctcttctacatcattagaacaaggtaaattcaagaaactattctttttaagtgacagaagacttttgacataactttgaagccttttcaaaatatttttatcacttatcaattaccggccgtcactcaaacactgctagtccttattaaatcttactgaaaattgctcagcatcataaagccaagtagatttgcccccaagaaagagctctctgctttctgttaataaaagacccttgtttattccttcatttttattattattattcattatattgctttcaatagaggagaatctgtatttaggtagttatcaacttagtgtagacatttggcctttgttgtcattcagttctaaatatttggcaattttcatttgatttttcttcttgacttatacattatttaaaatatgctttttagtttctaagagtatgggagggttgtgcctattcatttttttttattgatttctaattttattgcattatggtcagataatattgtctagagaatatttattattggatgtttatttaaaacttcattggaagcttgatcactttttgtaaatgttctttttctttttaaaaagaatgtgtattgtgtctttggttgaatatagagttctttttgtgtccattaggtcaagcctgtggtgttcaaattatctacattctcattgctattttgctattggatctaatcaagatagttctgtcagtctctgtggtgactgttgccctgtcgatgttgtctgaggtgtatataactacattctctttctctgttcgtatttgctgtttagcatatcttttctctctcgcgatattttatcttctttcttgccttttgttcaattgatagagtactctctattttattttctctatgtgcttgcaggctgtactttctatttgtattcttatagctctcacattaaactgtgtaacccacatacttgacttagggttaaaatgaatcactgtctactctccttaacatcaggacctcagggaacttgaatgccawtcttcccactcccatttgccacgtcattgttgggtggaattttaaaactaccttgctttaaactttcctaatagtcaaatagtcattaatatgttttatcttttttctccctactgtccatactgatttaattttaccaaatgtagacaaatttctttgcccaccattggtttgcccaccattggttcttccatccattttttttctggggtgagttttgatcttagtgaagcctagtccagtttatggttcttactgtgtggtctgctgaccagagtatcagtatcgcctgagagcttgttggaaatgcaagttttcaggtcctaccccagacctactgaatcagcacctctgggggtgggacaccagtctttgttttaactgctctcccagggattccagtgccccctcaggtttgagcacttctgcccagcagcactgccagtgacagtctgagagtggtaatatctcttagtctttgactcaaaaggtctcatttgacctctctgaagttcagctgatgatagaaatcttggttaaattattttccctcagtgctttggagattctcctgcatgtcttctggcctccataaatgatgataacaggtttgctgtcaatctcattgtcgtttctgtgtaggtaaatggctctgttctctagtgattttgaatttttatttgtgtcttagatgttttacaatttcgctatcatcatgtacctatgtgtggagttctcttcatttatcttgctttggactcaggcttcttcagtatggggattgtgtctttcctctgttctggaaaattctcagctattatttcttaacatactgcatttttccgattctctctaagtatctgtttctgtaactcctattggacatttacttctctttcacattgtctgctttatctcttaacttttgtgttttctgtctctcactgctgtattgtgagttattacttagctcttccagttaattctttaagctttttttgtaatctctttatcagttcattgtgtttattatttcagtgactaaatttaattgctcaaagttttatttggtcgtttaaaatttgcttttgtcttcatagttattttgtcctgttctctttatctctttatttatttttgatgctttcatctgcttattatttttaagatatttatttcttagcctctttgagattattctattatctctggtcctaggatcattaaatctcccactacgtctgtagactctccttaagagtgtagattattgcctagttcagtttataatttgtgtgtgtgtgtgtgtgtgtgtgtgtgtgtacatgcatgcaagagggagagagagagcatgagcaagctcatttttttttcctatgaggcttttgtaagtcctgacctgtatttactgttaacttcttagcttgggttcatgcacccccagtcagtataactgtggacctcatacccactttggcacaggcttggagtatggatttattacaggtctgtttctttttgtttytctcccatttatggtcctggacagaaggtaagcttccttgcaacttccctggtccggtgggtagagttttcttgtcccctttccagatgttaggttttaaacaatgactgttctttctccatcrtgtagaccaaaggccaagttctgtgtccccatgggagattaaaacccaagcccctatgtctaggtccagtgcccactgatttctctaattgtgagtctttctgcttacctagtacctagagtttctcttcccaagttttaaaaatatcagttctaagtaggcctagcgtttctacatatttttagggagaggggaccctttctgtggcagctcagtgttcagcattcctgtaagttagcatgctctgtgtatagcagatatcactagtaatagcatttagtaagtgatgktcacacatgctgctgtcatgaacactatctcatgttgtgtaacactttcatttttccaagaactttataatcagccgacttgaaactcacagtcgtcccctcagaaaggcagggcaaatgttgttatttccaatttgtcagaagctcagaaagcttattctgttgctgacagtccttgcaagggtcagaatcaggaccggagccccagatgcgctggtgtcactgatgtccccgtgcygggcatgagcccttctgtgcaaggagctccaatgtctcccggmcagtgatgatgtgaaaacatttagaaccgacctacacaataaggcagattttcattctgtacccaaaacaggaacacagatttaatgcagagcaaaagggctttaatcaacagatatgttcatttttcacgtagacctattttacaagctaacttgtaagccagaaaatgacattcgagattttcaagtgagaacaaatgatttggtccaataattaaaaaaaaaaaaatgtacgtgtaatctcttcagaagctgcactggaaggatgtttgtcctggtacgttgttggaaagttttcaggaagagaatgtaaaaacttgctcttcttattctatcatgagaactacctctggagagaaaagataatgaatgcaagaggaagacagtgatttttcagctttcacgcatcattccccagaaggagaaaggcttgaaatatctcaacatttccgcccacacctcctcagcccctgccaggagacagagcaggcaagggaacrggcatcataggctgggggccacatgttgaaatctgctccttggggaatttgtcatttaagacagtcgaacttgcatacacagtgatgactgtttaagctttttttccaacattttcaggagtagggggaactgtgatgtaacagtgatgtttggagaaccctcacgaatacaggaacaaacaaaaaatagttgctgggaatcacagactttcagaaatagaagagctgagtcacgtttgttcatccagtcaaattcttccacttaacagtgaagaaactccttagtagagaggatgtgatgcagagccagctgatgagagtctacccgagagtgcaggccttctaacgctggcaggagagagtggaaggaagtcacttttttagttcctatggggtcatttttttcctcatggcactaccacggtttattcattgatttcctattgcctgttgctctcaacagcttgtgagctccaggagggaactgggaaagctacctttggtttatgtactgttatttttctggcacctaaaatgccttgcacagagtaggtgctcaagaagtatcggttgaatggacgagaatgaacaccagaaagtgagaaataaactagagaggaaatcttagtttgtgacgggatgtactgttggtagagcagaaaacatgatctctttattggcttatgtcagaacattgtattctttttcttattttggtggttgtccaggtattaacaaatttataccttgcctagactcagaattgctatgtggtttcatcagactaaacactgcctaaaataaataggatgtgaggtcaaatctgttgttcagtggaaaatcaaagaagactggcttaaaaactaagaaaagaccataggcagtgtaaattgtctatagattgctcctaagctatataaagatgatgtattttttgctctggaattacagagcaaaacactgacrtgctcattttctggaagagtggttgtttgttttgtttcgggttttttatataaacatgtcttaaaactataaaagagggaagttcatgttcttcatttcttctgtttctggtcaagataagtatggtgaaagtgtaaggtttggagtctggagatactagactaaggatcagtatattttattaacttaggccgaaatgataacagcagaagtattctctgctgaaattcatactagtggctaaaaagcaatgagttgttttcgaggctgtcatagttaatgtctgtgtatatgcaaaacccaatcctttttgctcataaaaatatcgtaagctttttcagtagccaaaactcacggccctgactctaagatattgtaagctactttacaaggtagcaaataaagattatttaaatgactacattaacatgttactcctttgcctgaagagatatcacaacttttgaatgactatagttaactcaattcctgagccctcaactggggtactatcactctatttcatagataaagcatttgagatttaaagaaatccttgcccaagaccactaaatattaagggacaaaccttctgacttctaaattgaggattttttgagaatgccatctgcctgattttatattccttgataggagtgtcagttcacttccctttctgctcgttgtatttccccacaaaaattcgttaaaccgtaattagacttttcaaaatgccaacgtaggtcattctgggttgtatgttagaagtatttagccaataactcttacctaaaccacagcaaaaaagaaaaacagaaacaccctgactcatattctgacaaaagtcacttggaaagcatgtttagtttgtgtagcgtaccccaaatggtttctcaaatagcagtatagctgttttcaggggtgaaagctgcattcaaagctgattagccctcatcagttctaggactttcccctgtgctgtgtagacattatctaatttttccatggataatctgagaagtgagaatttacggtttatgactcatgaaattctcttgaatgttgcctcagtatacataaaatttcaggtgtattgtttgcattatctatatttataaatttatcttccaggctgtcccttactccagagaatttaagcagaaatatgactacttcaggaagaaattaaagaaacctgtgagtaatcatgccttccaaaaatgctttgtgttagtcatttgtaagttaccacagtcacttcagtgagaacaacttggttgttacttttatatgaatgctaaaaatattaccttccttttctctctgcactttgatcctcctggttctaaaatctgaattttctttttaacagaaatggtaagtgaaaattaactcagtgttacatatcaaatcacctgaagggtaatttcctatgtaatacataaaaagacaggaatgatttttatgggatataaaataattcagaaccctagtcacaaaatctgtggaagcctattcaattatgcgcagttatcatatttaattaacctggatcccggtaagaaaaatgttcaagtccttccttgtaaatgcaaaagcttagtttcaactacagtatttataatatagtgttatatttaattataataattggcagtattacgtccaaatgtaattttctacttataattatccctggcagtttaaaacctagaaactctaaaaatttttatgggcaacattttaaattataacattgcattttctaatgacacaccatccccaaattgttcaacattgcatcctctgttttactttccgattcctccttagcagttttctcttcaattttctccatcactrtggttacacctctagggaggggagagaagcggctgcagctcagaccccctctggtggcctgggctccattgccatctctccctgcctcctcccctcagctggttcctcctgcccgggaacatctctggatggggcacaatgtctgctctcatttaggggttttggtctctgttccaaagtcctgattcaagagcttgcgggtaactgctattgaaatgattctttgccttcaaaactcaaatgatcactgaaaattccacagttttctttgtgagtcatgtcccctggtaatgatgatgactgtggtcatcacccagtctcactctatggctctcacatagcagtgtctgctacccggaaaccatctctgcacattcattcttacagccagaccaagcctggaccgcctctttgcaggaggcagttgccacaaccttggtcaagtgttttgttattttcatgtcagcgaaccatgctttgggctgctttccccacacttggcataatcaggatcccactccccatggcaacaaaatggacttgaggcagcgtggattatatctaccacctggcggccctgccacagttgagcatggataggcccaacctggccaggtggggattattacaggttttgactacctgggctaaagtctcttgagtgaagcaacagatacagtcgactgcctttcggttgccctatgctggagaagtgcccacagttgtttattaaagggggcaaggaggatgttctccttcgcagcagagttctaactttcctgagcatcgctagtggatgccgtgtgtcccatcgtgacacagcaaggctttctgtctgcaagggaaaacccctaaaggagagaatctcagttggaaccatttgtcactgcctgtttctttgaggactgccaacttttctaccatttgctgttgtttttattagaaaacaaagtgtgtatttactgtatgattatgtgttttcttttgtcttttgtgtaggctgatatccccaataggtttgaaatgaaacttcacagaaataacatatttgaagagtcctatcggagaattatgtccgtgaaaagaccagatgtcctaaaagctagactgtggattgagtttgaatcagagaaaggtcttgactatgggggtgtggccagagaatggttcttcttactgtccaaagagatgttcaacccctactacggcctctttgagtactctgccacgtaagtatatggccacacccagtgtgtgtcccccactgagacagttgtatgaatttaaacagaatgaaaggataagcagctcatgagttcgagatgcattaactctgctgagtttgttctctcctcaccccacagccccttgcaagtctagaacaggttctgactctacgtggtgaaatagtgtactctgcgaacatctaacattgattttttttcttgtctattgggttcatggagttgaaattgaaaacgtggataattatgataaggaacaggaggcgattttcatttgcagtgttcaagaggaggacttgtcagtgttagaattcaaaaacaaaggaggtgttttttgaacaagagtcgtttctgaggtctcctgtgtaaaggcaaattgtaaggactttgaggacctaggaccatgccctgctcctgtaaggaaagaaccaggtttccycttgcattaggatttcatcattgccaggcttggaaactgaggcagactaaattgctttctgagcaattaaacatcagctacttccaggccagccattcctccttcagactctgaatcctccaagggttgggcagtacccaagcccccagtagaatagtcattgaccttgctgaagggcatttgtcatcactccagccctgggctctaaggggacgtgggttcccccacatctcccacctggtaccagtctcctgggggctcatttggaaggcmgcctcagtacattcttcctggttgctctagccaagaattgcccaattgatttgttgttactgagtcccatgagaaagcccactatgtacaatgtatccaactattgaaggtggagggcagggtggagagagacaagatctttacctcttctccacattttcaaagatacccccaccccggaggaatcagtctgtgatcccagtttgaaaactactgatccacatgattgtgaaccaagcaagatcatttggacaaatctaaaaatttgcaggtttgcatcattgagagagccatatcctgttcctaatcccctcgaggccttttcagagcagagtagtggtcagaagacagaccaagggttgggcccatagcaaacatcttatggccaagccaaaagcctctggaaggaattaaacttccttcatcacagagacgacctaaagtactcacatctttgggaatccctgcacagcccctttattatgtggcgtttctcatctccccaagatatttggctgaaccatatgaaatagacacttcgtaggtcaaaaacagtcaaacatcagcgtctcttatggtttaattgactttagagggcacatgcgtcagcctccatggtgggtcacggttgagcatgtggtaagtcaggtcctctagcccacacattttcccactaggtacagaatgctcgcagggacactgtaaaagttgagtgacaggtggcaaacaaatatgcaaaatcttgcatttgaaagtgtgattgggcttttcttctctttctcctcaaaagggacaactacacccttcagatcaaccctaattcaggcctctgtaatgaggatcatttgtcctacttcacttttattggaagagttgctggtctggccgtatttcatgggaagctcttagatggtaagtcttgaagtaataaaaataggtcagtgctgcttgcggtttgctagtaggtgtcttatctttcgcatcatgggtttttaagcaaaagcttcactggtttactcataaagtatttttatgttttgcccataatggatgtccttttctctggtagcttattttgggcactgaagacatagtgtctacacacagttaaaaacaaaagtttttttttaacttcagtgtaaaacacagaacattatgtatttatacatttgtatgttttctggaataactttagtgaaagcaagatttgataacagatggaaaaactaattgaaaagttaattaaaatgatctcatctatctaatatcctgtgattattgcgtttgtccccaaattattttttaatttgaagggactaaataatttcaaaataatgttactgcttagctaagacattaaccctgaaacaaataacacaaaataatttcawtcttatttaaagcatatagatcatggaagaatttcaaggtaccttgaaagttagaagtcaaaccctctacctggcggtatctataggcttagagrcttctaaaagatttggccaattcaaaatagtgtccttaagaaaacactacagaaatcatcagtgagaaaaaagcatcagaaatactttttaagagcctggaggtagagtggttgaggatgggaagagggagagtaggatttgagattgacattgcagtaacttataagaaagatatttccaagggaactgtgttcattgcatttatagagccttagctattctaataaataatttgtataccctctgtacttttcccatgaatatgtttttactgttaattggtagctgatattgatgctctgattttgttgctttatttggtagcagggcgacagtaaacactttttttcctctagaaggaaactaaaccacacactctttccatgtatgtatagtgtgaatatattttaatttccagctttggagtcatgccatagattgtttcagcctgctccaattcactccaactttctcagaaggtcagtttagtcaccgtatgcaagtgagaagatgctgttagttgctacagtgtctttaataccctctctaacagggggtaatagagaagcataagatatgatcctgaccttagtcagcttatattttagcggggggaaaagagatgagaacaaaaccagaagaatcacagtgatagtgtctgagcagaagggagtgcattgagtcctcagaggagaaagtgactyggctggaggctcrgggaatctttcccaggatgagctgcacctcggaggtggggtagcatttgagcgttcaaaggctggggtcatttcagatgagtgaggaccagcccagagtcaaggccttgtggaagaagatgggcggaagcaggaaccactcagggtctcaaggagctggctaaagtgaccccgacaagagtgatcacratataaacctggaattgcacatttaagagtccaagtgcacatagatgggcctagtcagcagtgtcttcaaatttcccacagatgggaatgtccctgtcggcagggctcattctgcacatctgtccgatgggaatgtccctgtcggcagggctcattctgcacatctgtccgctgctccccctggtcggcttcatgcttttacttccccagacactggagtctattggagcctgcatagggccacgctgagccggggagaattggcctgtactgcagagggtgggtgcctggtggggggatgaaggagcagaagcaggagcctggggtgccaggtctggtggggtcaggaccccctgtgaggaggtgcgtgatgcctttggatcaggtgaaatggaggcacctgcaggacgcctgaatggtgggaggccgacctcgctgctgttgcctccctgaggcctctgccgtccctccgcggggggttgcacaggccctctccggggccttccccatttccagcctgtccccttcctgtgctttctccccatcgctgcccaagcaatgataacagaagacagatggaatttcacctggcctttcactgactccccactgccctcagagagcaccccaactctccagcaccccatgtgggctctgcactgccggccccttctctggcctgtctacccrccctggcaaacggctggcaagtccccagccttgttcctctgcttagtgtgcccttttctcccccaattcctacgcctgatttgcactgcggactctgcttgaccttgaagctcatctgtcacctcccagaggcctttctggccccactctgctgcgccatctctcttagcacagctgccctcctcatgccactctccccctgatctcgcctcctcgctngtgcaatactgtagaaggcccttggttactccttcatggtttctcatttacattgaaagcaggttaatcttttctttcatgctctgatacatagcagtgtcaaagacctgaaactaaacccagtgtttaccgtgttttargtttcttcattagaccattttacaagatgatgttgggaaagcagataaccctgaatgacatggaatctgtggtaagtaaatgcacgtcacacactggccatcaccgggcactcgtgtcttatgagaaggtattggagagccatatttgtagtctcagccacttttatgggtgttgcattccatgtgaacaacaggagacatttaattgcttgaaaagttcnttgatctaattcttgtaataaatcattgttcacatttcstggaaccatggtacctagggtggatacatccaaatcccagttgcctctgcttacccggcataggacttgtgtgaacttactaaatccaagagacagctgaagatctatggtagcctgtgttttctataaaaactgctgctgctgaatgtttagagcttcatccgctctccctctgtttcctgacatcataaaaatggcagaggcaaaggtcaaaacaataggaagagtatcaggcagacgtcctagacatggatgagtgacgccacagctcaggcaagtgaacacttgagacgttctccaagtagtgatttgggttttcatgttgcatttaacattaattttacctagacagaccattttagagttggaaggattttattttttttttattttttttattttttgagatgatgtcttgctctttcacccaggctagagtgcagtggcgcgatcttggctcacttccgccttgcggattctagcaattcccctgcctcagcctctcagatagctgggattacaggcacacgccaccatgcctggctaattttttttttttttttttttttttgtattttagtagaaacgaggtttcgctatgttggccaggatggtctcgatctcctgacctcatgatcctcttgcctcatcctcccaaagtgctgggattacaggtgtgagccaccgcacccagcacggatttgctataaaacaaaaattgatgttctttttataatatacttctgcttctgtttttcttttaatgtacctataccccacatctacctccagagtgtatgggtgtttgcccacacgccagcacacacacagggccactgggaagcgcgtttgtccatttggggtatttgcagctcattcgtgtttgctcacttgagttaaaaagcccctgcatgatgtcacctgcctgtgataccaactgtattttgggcacggttgggtagatgagctgtgtcctcggccctgaccagcgctgactcagtgtttctgttgctcctcattgtatgaaaggagaggaagaggccagcagtgcccttgaacccactgctggtttgccagtcatggtgggttgggatgcacacctgtgattccggtctccactttgaccctgtgtttgtgctttctgctttcatcactgtatgatgaagcagctaggagcacaggaatttctcttaacgtctaactttataccacatgctgacagttagtgcctaaagtacagtgcgtgtattatttttaccctcttcacagcccgtcgtgtccccagcaggagagaccgtggagggaccagggacaggcgcttaggcctgtgactgatcctctggattctgaaaccagagcagccaccctttttgctgacattaacctggagagtgatcaaagcacaagaaaggggataacttaaaactattggtatttacttagttggaacattattttacttatttatttttttggcgatagaatcttattctgtttgccaggctggagtacagtggcacaaccatagttcactgcagcctctatcccctggcacaagtgatcctcctgtctcagcctcccaagtagctaggaccacaggcacacaccaccatgcctagctaatttctttttttttttttgtagtcatggcgtcttgctatgctgcttaggctggtcttgaacagcctcaagccctcctcctgcctcagcctcccaaagccgaggattacaggattataggcatgagccagcaagcccagtctagaacattctttatccttcctgttttcctcagatactttcactctttttttwaactttatttattttttatagagacagggtctcactatgttgcccaggctggtctctaactcctgggctcaagtgatcctcccaccttggcctcccaaagtgctggaattacagcgatgatattttcactctaaaaagatagaaagtatattgaccagcctggccaacatggcgaaaccccgtctctactaaaaatacaaaagtcagccaggtgtgatgtcacacgcccgtaatcctagctactcaggaggctgaggcgggagagtcactagaacccgggaggcaaagattgcagtgagccaaggtcatgccattgcactccagcctgggtgacaagagcgaaactccatctcaaaaacaaaaaaaaaaaaaaaaagagagagagaaaagaaagtatacttatgtctgtatgttaaattttgtagaccagtatggcagctccatccaccatccagagtaggtgccttccactgtgcatcactaaggacaggatttaactgcaagctcattacaactaaagcagtttgtttgtttatagtttaawgaggaaggtttggtttaggtggagcaggaaacattgcattagtaacatatttcttgagcattctgcacagaattacattagaatgtaattaaagaagtcaaatgagtttgtattttggggaaaaaatgctgaattttcactcctgtgtcattctgtaggatagtgaatattacaactctttgaaatggatcctggagaatgaccctactgagctggacctcatgttctgcatagacgaagaaaactttggacaggtacatgtgggtaaccctgggaactcttctttagctttcaaggggcatttttcttcttgacgggctgtaacacaactttgctggaccatcagaaacaaccagcaggagctgcaggtgttaattttcatctcattgtagcagcaccttyttgtcatgccaagacgccacactccaattacaaccatttctctcttccagcaaagttacagaaattccaagaggccttggggcatgaaccagcacctcttctaatccaaagcaaatgtgaatgtttcatttgtgcctcggttttagaatttaggtacttgaaaaaatagtgagattgttgacttagcgatgtaaatacatgaccaggagtgggtgatgttggaagggccattggtttttctctctgttttatggttctgttgtcatggcgacatttgtcttgtgaggctcagcatggcaggctccggtttttctaccattccctctgctttgcccccacgctgttattcaggctggaytaatcctcaaagtcagtttcagactggtcagcagggatttggatgggccactgaaagtggatttcaaaggtaaagttgcctgcttggaataattctcatcatgctaaggatctatgcgatgtatttgtctcaattctgaagcctttgcttcatctgccactcagtaataatgatgcagcttgggaggtgttctcaatgtattctctgaccctggtacctgtccttccgcaaaagcccagaggtatttcccatccttcagactaaatctccacggctatgaaattaattagaccatagaactcattgtaatggttgccctctgaaaaatgaaatagacrtgttctttattgctagatgtcaaagattgctagagaatctttgagaaaagaagctgatgccactagaggatttaatgacaactgagggtaaaaattgttggataagaaaataatcacattaatatcagaatcacttgttattcccatgtcctgtgtttgagccaggagagttcagtctctagtgtgagtcctggtgtgggtggaacctggggagtccatagggcccttcagtggctaggcaaggctcagagaaggacttcaggcaccagaggcaagagaccttgtggcttaatgtaaatgatcaagtcctktaaaaatctccttttgtgccccctccccactgcccccctttcccggcctcctccccaccccactgtgttgtgcttkatgcctgagaatccttacagacaggcggacactgttctcctgcacggggaccttgtgatggggcagggaggggtcttttcagctgctgcccctctggtctccagcagcctccccaggaccgagagtactggtgtctccagccctgtctacctccttcctctgctgcctttgacacaaatagctcactccccccagagacacctgcaaggcacagtgcctttcactcygggctctcacccctccccactggtctccagtcccctggaagtgcatgctcctctgctggccctgtggatgcaggtgtcaccctgccagctgtcctgcacccgctgcttttttgtctcacccttgctatctggatttcctcatcctacctgtggctccggctgcacccatctccgctcaccaccagcctcttatctcaggccggcgtctgccttccagcctccagaattcccaggtctaacggcctcctcaactgcttctcctgagaggctcacgggtcccagtgctaaagccactttttcctccccagcccccacatcggttatggtctcatcagtgccaccactgtcccctcccacctgacacttgggcatcccctcagaatctccctctctcctcatgccatctcccctcctcatgccatctccccgtgcccaggcttgctgtgccccgtgactccccgtccttggcacgtccctgtctgtgcactcccctagccctgctccgatcacttcttgactgctgttctcacagcctcctgtcggccgccccctttcctgctttgctgttctccagtgccctgttctctagtgcctaccctgttctccagtgccctgttctccagtgcccscctagctgtgagccccttatggactatttctgaaatgcagccctgaaaatgtccttcttctacttggccatcttgtgaccttcagcataaatgaaaactgttagcatggcatatgacccctcataatccagacctacccccctctggcattaccctctgacacctccttcctgtcaacctgtcaacaaacagtgtgccttcaagggtttccccagagatgcttcagtgccacattgctggctcgacactgcccactctgtaccgatgcattctcattctctctcccatcacctctttccctgccatcctcgaggtattgactgacgtgctgtgtgctgtatgccccctgaggtcttctgggtctctccagggctcagcatgtagttgatgcctgccagtgctcattgagcaaacgaatgaggagtgctaacctggcttattaaaaatatgaataaggtggtaagtaatagaaatcctaagtgtgagaaaacaaaatcagtcaagtcttggtggctttttttaaaaagccggacctattgaagggtcttaaactgccaattttcaaacgattagacatggttagtcaccctggaagtatcttcctttcatttttaacatatgaaggaaggagtggaagtaaagaaccaaggaagactgaaagtcagtcttgtgtgtcacatgcattaaaaaagtcttttcgtagattcattcatagaaaaccatatgaccaaattaacccaattcagaaaactattaagccacaatcagaagcaaatgatctgggaaaccttcctaattacatttaaatgtaattgtttccacctcataaatgaaagtcaaacacagggtgttggagtttttaagcaggcctctaataaatcttctgatgatcgttcaggccagattttcattaaaaacagttctcagacctcctcgtttaatgttgtgaattcttctgacttttgggtaggatcaagtagagtaatgcattaatcaaaacagacccatgagatgagtaagataagaattaggtgcccagtttgttgaattactgccttgcctttttgagagagctatcctgattaacagggaactcacgtatttattttgcactctgggaaggaatttagagcaagttaaatagctgcatatggatctcatctcccatatccagtccatcagcgagttgttcacacacctcccaaacctttctcatttctrtgcattctgccgatctcttctctcactcacacccaagtccaagctcccatcttccccactagacccccgacccgtctctacatccaatatggcttcttataatggcagagtggtctttttggaatataaaaatgagcatgtcattcctctgccagaaaccttcaggggtctcccctgcccttgagataaagaccccaaccttactttgtcccacaaggtcctgcgtggcctggctctccctgctcctcctccagactcactgtgaatcacaggccccactgggcttgtccaacacaagccccttcctgcctcaggccctctgctttctcttccatctgttgggagcatactccctcccagtctcagttcaggtgtcccttcatcagggaagccagcccttgacccagaccctatgcatcttccatgcctgccctgtggcatgtaccacagacgactttgcatttgtctgagtatgtttgtgtttagtgcctgtctctcctgctcagcttcctcccgatgatggcagccgcatgcctgccctgtgctcactcactgtcgtgtacttcccacaagcactttgcctggtgcatggtgggtacttgtagttgttgatgtggaaatctaggtgttagcatgatgcccrgacaagcctctcacctctttggccctctgcaaaactgttgactctgacccagaagaaagcccattcctccccaatgccaaacagtcaagtcacttccacagtggggcaaagcaagtgcagttgtcatggggtgaaacagacatgcagtcagccttccacggtgtttcaaccttctttttttttaatttcacagttagaaatatcagaccatgaagtttggtagctgttccttcatgtaatgaagctgcagctgttgccattattttgcaatttgttttctttctgattggtaagaatctggggctgctggtttctagggcctaatatgaaagtttccactgaagaaatgtcagtgtttgaactatgatcctgtgccaagcaggaagaataagccgtacccccattcactgctgtgcacacatacctgcccccaccgggaggaggggcccttttagggctgtaacaagtgaaaattctttattgcaagttcagcagagcaacgtctaatttggttatgggtttgtttgtttgtttgttttttgagacagagtctcgctctgtcacccaggctggagtgcagtggcagaatatcggctcactgcaacctctgcctcctactttcaagcaattctcaatgcctcagcctgctgagtagctgagactacaggtgcaagccaccatgcccagctaatttttgtatttttagtggagacaggacttcatcatattgcccaggctggtctcgaactcctggcctcaagtgatctgcccacctcagcctcccgaagtgctgggcttacaggtgtgagccaccgtgcttggcctgatttgattgttttgaagagctgccagaagtttcaagaggctgtgcagtagttggagggagaccatgggcagcagccatataggaaggttctttaggatcgggtcgagccagtctccataggaatgattacccaaagggaacaaggaggacatcatctcagacattgaagtggttagtggccctcccagaagccacagcacattccacaggtgtactgtggatctctctgttaagatttcatggagagaggtgggccactggcagaaagaatctaaaaaggctctttagggggtgataatgaattaaaaggtagagaaacacttgggggaaggcagtgagtgaaaaggcagaaatggtcaatgagggagagggcagagcatgtcctggcggaagccaggagccagacgaagagcccggagctggaggtggctcccaggagcgctgaggccccggccccttcaggccagtcagggacacagaggggtggcacctggggagacgggaagtgggaaggctggcatggacttgctgcctccctgctgtcggtagttgcgctgctggagaggctggggaggatgaggaaggcctggttggtggagtgatgggggtgcagggtgctgactgcccccgaggccgtgccctgcaggatttgtgagcacccatcagtgggcgtttgcccagcagtgctccgtttccaagaatggagtctgacaagcagataagccttgctccacccaagtccagcatattccatatgagccaagctgtttctcagcagcttcccaggcagcgcaaagcatttatggagggtcagggagatgtgtgggaatcgggttgttaactggccaaggcagggagtcccccagaagttcctctgatctctgtgaggaagagagccaagtttatgctggggccagtagacttaaagaggaatttttctactgcagtgttctcccacgagctcttgctgagcgcctgctgtggctgggcattgtgttccttgtgtggggtcctccaggagcccaggcacaggagggygatggcccagaaagccctgggagggcggggtgtgcgtttcgtggctgaaggtggcaagaatccaccccacagagcaggctctgcagactgctcaccagggagcagggcccctgggtgccagcaccagctccatctgcagttcgctgtttctccttggtcactttgctggatttctgcctccgggatgctgtccaccctcatgacgggggccagggcgctgccgcagcacctataggagatgcgcagggcagagagcagcccctgtgtgacgctgccccgatttctcccacttagggttgacactgtcacggtaccacccggtgttcagtgctgaggacatacagtccctcccctcctgtggtggcaacagctgatgttaagaagggacaaatttgggcgaaaggagaacacaggctgtagttagagtgatggtgagacaggaatgaaggcccgcagggaatctgtgtgcctggaggcgagcattagagtcagatagccgcctctccaacccccatggagcctcgtgcccaaccagcaaggactctggggcatcggccagtggcagtaagccagtgtggtgggctggacaatatgcctgcactgcaggagacggtstcaygatcagcccccgacagccggtctcaaaagtggaatttgaagagtggtcattgcttctcatgaaagtgtygccgtaactcatgaaagtgtcrcctgtaacgaatcctagagggatgcatttctgtaccacggagggctcgagccgagacaccgagatctgggggcgtgacccctaacctagtagcttagggagcagaattacaaacccctcatcctgtgcccatccttgggccctctcctcactcccccacagagaaacccagggtcagaatcaaccatgagacttgacggctgcccacaggatgatttactgctgtgacctcatttagcatgggttagtgtgggcccattttttcttttctttcaaaaattatttatttatctaattataaaatattaacctccataataaaaataaagccagtataataaaaatatgtaaaataaataaatgtcacttattcccagtatctcaagaaaactcaggattaaaatttttatttacattttccagaattattctctgtaagcacaaaacagatttttttttttacagaagtggaattgtactctgcatactgttttcttttttattttatttatttatttatttatttatttatttatttattttgagatggagtctcgctctgttgcccaggctggagtgcaatggcatgatctcggctcagtgcaacctcwgccccctgggttcaagcgattctcctgcccaagcctcctgagtagctgggattacaggcgtgagccaccactcccagctaatttttgtatttttagtagagatgggttttaccatgttggccaggctggtctcgaactcctgacctcgtgatctgcccacctcggcctcccaaattttttttattatactttaagttctgggatacatgtgcagaatgtgcaggtttgttacataggtatacacatgccatcgtggtttgctgcacccatcaacccatcatctacattaggtatttttcttaatgctatccctcccctagccctccaccccatgacaggccccggtgtgtgatgttcccctccctgtgtccatgagttctcatcgtttaactcccacttatgagtgaagctggaaaccatcattttcagcaaactaacacagaaacagaaaacagttttcaaattaatatatcacacataccttttcatgtcactgaatatcagtctataacattctaatgactgtgctgaattttactttgtagacgtgccatatatttttaaccatgccctgttggtagacgtttaggctattttagtattttctatataaacatataattctgtataaccctggaatactcacatatatacataatatatatagcatacaaatgtataatctggaatatacattttgtgtacttgactaatttttttccattgctataaactccaaaagagaaattactgtgagaagggatatataattttaaaattgtgatgcctattgccaaattataatatcttcagaaaaagattgaaccaattagactcccacccacagtgaaggggagaaccagttctctgcactcagcaacactggcttattttctctctcatccctgggcgctgcttttggaggaagcagagtgttttcctccttagccctcccctccccactttgtctgtggccgacccgctcattcagtagctctctggaaattacaactttcaggcaacaccaaagaaggctctgtgatcaaagagagagggctggatgaatgctggaaggagtgtattacagggattgtggatgcttatctacttgacctccttccccttccctgtgcgaggggaaagggtgggaggaaagattcggcttgagtgtagccgagctgtaccgaaagccttctcgataccaatgcctgggctgggatttattaacttgtcattgacgtggatctgataagaaaactcttaccgaaggaacaacaaggcagtctggggaggaataaatggggaaaagaagaaaagccaacctgggtttattaacacatagaacaaaaggtatggatgagcactgtccacgcacctctgagaaccagccacgaactggcagagtttcactgtagaaacatccccaccccacccccaagtggaagctgtttggcatcctccatccccaacacggcctgtacggggcaggagcagatgacccctgggagaaaatgggatgcactgggaagatggcagctagaaagggaaatggagaaatgaaggatgtcagcaaaaccggaaacgcagcaaagggattaaaattcacattgggcacagtgaagagttcagttgactttgcagaaatggaaagcatagtggaaaaatgagattccttcctgaataaagagaaaaagagaatgtcgagggaccggatggatgatgaatgtgttttacgttgaaaagccatctcagtgtgaatgggaacaagagccagtgcgtggagaagccgcatgagagacccaggtgtgagtgctcgggtcagaggggctcaggatctcctgggtgcaggtggcaggaccaaggaacccctggagrtggcctctgccagggcatagagttcatcacaacatggaacctccatccctcctgggtaccaccctaacacttactttggaaaaccctctcccctggcttggtttactctataatgcaaccagcaggcagaggaaaaaagatttagagggaaccccaccaaaatagtggcatggctttctttcagtaggagaggtgtaggtgctatatttttccaccttttttccccaaaatttctacaatgagaaaaaaacattttattttaaaatagtaggcctctctcccttccctcacgctggttactgtgctatgtggccttatggtaagctaggtctgggtcagggcataggagaaagggctgccctgattgcagctgcttttttcatgatcatgggtggtgctaagggaggaagcttcagggcagatgagtgaggagaaggcgtccaatgcaaataaatgccttcaaaaaccagataaatctgtctcttcagcctggatccttaagcttctttcttgtctttaagtttctgtttgcatttttgaaagaaataccatgcatcctttttttatgactagaaaatataattttcagaaacagaatgcattagaatttggatttctggagtcttgatgggtgtaccctgttcttttctctgttaaacataattagtttcctgataaatgaatagcagaggaaaaaatgttgctcttcattattgctaatatatgaagaataattaaaagtcataaataaccataaaacaatttgcctttaatgatagcatctttaactgtgtaacatcctagcaaaaaagcctcattggacattctcttgtgcacagagcccatttgccgggaaatatttctgaatacatgttgtcttccctttatagtaagacattgtcactcaataataatatgcaagataacttcgtgatagtaattgttgttttgtctttgtaattacagacatatcaagtggatttgaagcccaatgggtcagaaataatggtcacaaatgaaaacaaaagggaatatatcgagtatgtatacacatatttactgccttttctttgaataattgaaatgcatgtttggtcactgtcccttgctgaaacagctcatgcatttattatgsgcatgagtttattggtcagttttcaacaaggtaagttcttttctggcttgggctaatgggaagttgaatatgggatggaaagtctgtcttgtatcatgactccattgagctgccctataaaggagcagaggagggagaaaaggtctatrttattgagtaatacggcaaatactcttttggaatatgtggatatcaactaagatttagaattgcaacggagaaccacggtgtcagtgaccagcagggcaaaattaggaaccaacaaagaaaaaatattttgtctctctcccaacttcttttccataatagaaatgtatagaaatagttaaaatggataggaagaattcagcatgtgcaaccctaaggaattctttctggtatttgtaatattcttaactcaacttcagcctcagtggaacaaaatgttgagtctttttggaagtctagctgttaagtgattctaagacatttgtaccaggcagaagtttytctctgttgggcacgttacgttttcttttttagtgtatatgtgtgcttcaaatgcataactctgggatcttccaaggagatcccctggtgcaggggtgaggtgagcactgcagtgtgtggttcctggcacctggtttctgctctcttgtgggtcgccacagtggccctgagttcctcgtttgcattcagtgcttcgtttcaacaggctaggctccctsctttcttctcatttggaattggtcagaggtcttgaaatcagacagctcttgcattgactgtgggtcttagcacctttcagtgtgatctgcaaagaaaaacctactgtccttcctaattaggaagaaacggagcgtgttagagtctctactcagagatcctggcaaggagtggaactattacatggcrgactcttttcactctcaagttgaaagcttgttatgctgaatacatagactagaaataaggtacctcggttcttacctggccacattaattggcactctcgttctgaatatgaacaatcttagctgatgacatcctggcagacaccattgtcttccttcagaaagtacagactgtgagtggggtttaaaaaatattctagctcagggtgacccaggtctcaagtctgaggactctgacatgcgtggtatgtgtcttgcatcattctttgcagttaattcttttagggttcaaacgtggtgggagtcagggccaggcagggttccagctagctttacttttaaaagtataattgaaatcaccaactgctccctgatacctctgctcccctggtgccagaagaatgctgttgagctgttcattgtagcccaggaggtgccacctgagaggccgcacagtggttgtgctgcaggctggtcctcagggccattaccatggttacagtgtaccaccccgaaggtgagaacccttcagaatgatggaatgcctgagatgacatccagagtacatttgccttgcgatcagttttgctgtgcattaaacactgtcgcagggaacttggttttggtgaacttcagttgcataaggaggtcttaccattcatcctctaaattttggcattaaattatgagtgcaaatcattttgctgataaagcttatatgttattgttgaatattagcacattggatactagaatgaaatrttagataactaaatgcattgtcctgagtacactttacaaatatgtatacatatatgtgggtgtgtatacgggtgtgtgcatcttatacatgtatacctgtgtgttcataccccatgaacttttcccttttctccatgttgtcacattttaaagcagttaaagcatttaaagcattttaaagcagttaagcatttaaagcagtttaggtcagccaaaccttgatgtgggggaagttaattactcttttgaaatctccagtgagattttaggtttttcacgggtgttccagggagtcttgaaagaagccatgaataaactaaacagtgggggcacagaggagaccctcccctctgctctgctgtcgtggatggaggagaagcactccctgttgcggagaaagcagtgagcactagtgatgatggagktggttcaatattgtcctcttttctcctgcagcttagtcatccagtggagatttgtgaacagggtccagaagcagatgaacgccttcttggaggtaagccatgctggccagggttctctgccatgtgcctctggtcccgggtcgatgggggatcgcgcttctcctttagctagtgtggtggagctgatcagagacagaggcgaggctggggaccctgcaggaagaccgggatcgcacagctcacaccgctggccagtctccagcacaagagtgttcagccaccgtgccgccacctccttttccttttcacgggttctcctgcttgacttctcttatttttacatttgtcctgtttttaaagaggacgttttacagacttgatctagaaccmttgtcttggagtttcaggcggtacccaagagaaggctgccttttgctgcagtgacaggttccaagaagcccgagggctcagagctgaatgatgaagcgcagtccccaaagtgcctggccacccctccctccctggatcactgctgcctgggcttgattgattgattgattgattgattgattgattttgagagagattctcactgtcacccaggctggagtacagtggtgcgatctcggctcactgcagcctctgcctcccgggttcaagcaattctcctgcctcagcctcccaagtagctgggactacaggcacgcgccaccacacccagctaatttttgtatttttagtagagacggggtttcaccatgttggccaggatggtcttgatctcctgacctcatgatccacccgccccggcctcccaaagtgctgggattacaggcatgagccgccgcgcccagccatggacatttttttttaatcccctgccctttttctttgtggcataattcattgcaggttctcttctatacagatacatggaaaacacattttcttaagctgagtttttatttattttatacmcagccacctcatgacagcttttaccctgttacagagcaaagtgggcactgcccagatcgaacttttaatatcagggatgctcccaggcccctagcagtgggtgagggattcatcattttaaacagtattccacttggaccaaaagcaaaattctttcttaaatatgatatagtattagttacctcaaagatcacacaggaaacagcctcgtgtccacgtgactgattttctctgcactgaggcagagctctcgtggggtgatgctttcccttcactcaggtacctacacaggatgcgtgaaagcccgggcagcacactcagaaacagctcggggccttagggacttaaaatgggaggacagaatggcaggtttcactctttatttagataagaaatcccaggaagcagattcctgggccccaccgcaggcggtccacaccttcagaaacgcggcgttcgcagcgcgcagggcccagcagagctgagctcatcctagatcacgccacagttagtggtacctgggaactggagcatggttttctgtacgcacagtgtctgcacccatcacctgcctccctctgtgtttcttctccctgcctccagcacgttatttttaagcgtgtctcttacacatctgtagcctgtgcatcttaggacgcactgactcacagcagtgttataaatggcttttggaatccaccctgcctacagtatcccatattttcatcaggtttcagaaattactccactacttgaatcttctagattctatgctttttcraaactgttatattgtgactgtgctgtttttactggaactatagttacttgatactgtcactgacataggratcatcaggagagattatatttttttctggctaaccagaaaagtttgtttttcctgtgaaatttttttttttgaaggcaataggtgtttaagatgttttttttttttctttcagggattcacagaactacttcctattgatttgattaaaatttttgatgaaaatgagctggaggtttgtattataaacattattttatgtaaagtggattttttaaagtatctctcattactttacaagtaatattttaatattcttggatccataatgtcctagagagtaactttagatgaattatattacatgtctcttatagggcttatttgccaatgtggttctattacatgtctcttatggggcttgtttgccaatgtaggagtaaggaacagcaaaaataatcagctgtagttgccttgtccatcagagggcagttctggaacatgcctagtaagtagaggccactgagcagagctgggatcatggccctatgcaccaggcgaggcaaattgccacaacaagtagaaacaaggtttgcagtagccctctggacagcagaaacctgcttacactaccagactggccaagtatcctctgctgcatccccatccacccccaccgtggcagccaaatgggggtcttggccacaaggtggccgtaagcatctacttgggcctgtagaacgacgtctcattgaacttgaagtggtttatgttgagtgaggaaaaatgtcagaaggcaacagggttgtagcaaaaggtagtttagtgattgtstagttcagcttcttggtgttgacatagttgagtaacagccattttaaaaacaaaggaatatctcgccctttgttgtgtcgagagaaacaggggaaagactgtctgttgagaagccgttggtgggactcggccatttgccccgtccatagccagtgagtgtttcccatacactggccttctatacttttatctcaaaacagaaagttcaagatcgatgatgtctatagaaatcatatacctcaagcctttcctctgataggtgggaaactgaggcagagagcagctgggtttacccagcaaggttttggcacggtcaggcctaggaactttatttccaggcttctggcttagttctgtttccatttcattctggtacctttgcataaatatcttccatttgtccacaggaaacctcccctgatggagagttgcataataggaayggcaaaccttagactaaatgctaagtcgaagacccagttgtgccttagcgtatgtctgccattcttaggcctctgggcagatgaggtgatttgtcatcactggaattgatcaacctggaggagagtcataagcactaattcttttgtgggtagggagatgcttttagatattcagaggaataacctctcaggaggagaagcagccagggtaatgcacagatgctgctggagcgtgagagaatccacaggtcccatgcgtaagactagaggggtagggaggacgactgtggcatttttatatccgatacgacatgccgtggcttgcgcaaggttcgaattgagctgccctcgtgactgctgcctctgtgatctgctatggcaggtggagcctggaacaggtgtctgccttcctctgttgttatgatttgctagcttaccttcgcggcacagtgaccacatgctggcactgagggtggtcatttctcagtgtgtgatctcgcacctttcacatcctgcttttacatctggtaaattttcttcctagttgctcatgtgcggcctcggtgatgtggatgtgaatgactggagacagcattctatttacaagaacggctactgcccaaaccaccccgtcattcagtggttctggaaggtaactccrgggcccagccccagccggtgtcctccacctgaggcaggattgagggctgtgtggcgccctccattgtgrtctgacttcaggactgatgctggctttggggtctgttagagcttggactgctgggggagggaagaggcaaactgagccagcagccccgtggtggctcctctgtaactgtagcagacagctagacttgaatgaagttggtccctacaaaagcacactggccttccttgaccacctcgtgaaagtgacttttatttgagggactggtcctccaatgcgtaaatagaaatggggggcttctcagggcagaaacaggcttcagggatggctttgcaagatgccactttctgttaagaagtcgttttctcaatttttaaaatatattccaacaaatattttgatctgtgtatctttcaaccaaagataacacaacatttgatttattatcttagggccactgtttgtatcctgttcagcttaggagggaagtaaaataggaatgggttagtccaaaggagatatagtaaacaaacttaaaaaaaaaaaaacagttatcccccaaaaaggctgattatttacttcaccccaaaaaggaatcatttaactttttcaaatttatttttatttatttatttattttaaagatggggtctcactgtgttgcccaggctggattcaaattcttgggcttaagcaatcctcctacctcggcccctcaaagtgctgggattacaggcatgagccaccatgcccggcctttttcacatttctaaatgccttttattactatttcaaatgccagcaggaatacagagataaaaaagcaaaatcttcaaagcctagtccaggtctcacttggcttgttttagatgtttgcctacagcagtccaagtggcattaccagtaaagccacctggattcccataataatgcagatatgtaagatacacagattattttagaaccccatctttgcctttgttgttttgtttttgttttgttttgttttgtttcattttataaaatgatgtcttctagggaacgtgtctacaatctgaaatcccatctcataacctggcttccccttgtgatgacaaatcttaaatactgtatatttataattggcttagggggaactggtaagcctcgaacacagaaacatgagcttggtgccatcagagagtttgctttttatatcatttattttggcctattggcagaagaagaaagagacggacattgtgatcactcagtctcttagattagagaggccagctagtattgtggccataaaaaacctactcagttttcagagtcaactgtctaggtcttacattgcaatataaataagattaagttctgcctgcctgcatgacagcagcatgtgccatgggtcacgtggggggtataatgaccttctgcctctgttcataggctgtgctactcatggacgccgaaaagcgtatccggttactgcagtttgtcacagggacatcgcgagtacctatgaatggatttgccgaactttatggtgagyaggataccattggattcagttgtcctcctgggaatttccagccaggcatgaactctggcccaagaaccctgccgccaggcctctgcagaaggctaagtttcaggacagtgtgccatgcataggttccatgaaagttcaatgaaagtactgttatctatactttatatagataacatggtgcttctacttcgagggattggggggcagtttgtgaagaggtccataaggctgctcttttttttttttcctagtttagttttttagtaaatcgttaaaaactaggttttgtagggtcatttatatggtcgtaaactgaggtataaagtcacctccagtaggcagaatttttcagtgtttaccatagatttaaaaatcactctgtactttgcatactgaaagtcacatttcattcaccctcccacccacaaaactagtttgaagtttaaatttccagggcccagctgagaggctgtagctgcctgcctttccacgtaactgttgtgtttgttaatcttggtgcagttccattctggagactaagcagagtctttctgtgaggttgtgcagacctctggcttccctcaacattaaatatcaatgttgcagcagaagagagtgtcttgggcctcacccctgggggcaaaccctgccctgacagtagctggactgcagaccacaccatagcttcattcttctgccccaagcaatcttaacatttctttttcttttcttgtctaggttccaatggtcctcagctgtttacaatagagcaatggggcagtcctgagaaactgcccagagctcacacatggtgagtgacaaaaacacatgcatgtcaatgcaatatctgaactgcttagctgggtatggtgctgggctcaaggctattgaatgctctgtttcctgtctgtaagtagcttagagaattaaaggacagtgatgtggatgaaaatagaaattgtacagtagtgctaatragacataatgcactcagtatgtttggcacataaagggctcaggcctccctgctgtggggaatttctcctctgagcccagtccttccctcattattctaggtagtggagctttcactgttcagcatacatagataaggcagctctcaacctgtataataaacacgttgggtttttactccaaccttaaattggttgagaagttaggacaaaataccctgtagaaacatcctttttcaaaggccttctatgcccatgaataacctgtaattccctggaattgagcagtaacatgactgtggtcggaggagggtaagagggctgacacgtggccagggatgcccaagcgtggagcgtggctgccctcagaaggccctctcaggaggcacagtgacgcagaagggtcccagttgttttctgaacagttgcatgaaacccagcacaaatgcagactggatgggatcagtttcttgaagccgggttcagggagctcttgctaactcaaactcccatgtccctcgtgttggtttttctgcaaaggcctttatttcttgctcctgaggaagcagcagaagtgggccttctggaaaacggtgagcagcgtagccctgtgtttctcatgcagcgggggctgcaaagcctgctctggccatagtgagctaacataagcaaccaaacactccctgcaggaaacgccctcccttacactagaagtgctggccaggagagaattctcatgaacatgtgtttgcgaaaaattggctgtgaaaggtttttcacttctgtcggattcccttgcctcaccagaaaggtgttttttttttctattcgtaccattcacgtgactctccagatggaaacaatgtggtcattgcctgtcagagccttgaaagcaagctgactccagcctaaaattcatgaatattcagagcagtcattgtccgtggttctctggctttattctaagggaagaatgtttgagtagttcagagcttttatccaaatggtgtccaagtcatatgtggttttctgggttctactggcctccatatgaaggcaccagcgttgagccaagccccaggactgtgggtggtgatgcgaaactcaagctcataatactaaccaggatgaagattaggaaaagcgaaattattgggcacagtcatcatctgtggtcaggcactgcttaatctttatggcagccttatgagatatgttattcccttgggctgtcagaaggctggcccagggctcaccagagtcacagattcccagatcacaggatttgaactcagagctaccagaattagagcctgcaccctttaccactacaccagatacactgcctctgttgatatacccactttctttttagacttttccaaggaaaccaaattagtgaaccaatttcatgttcattcagcccatgtttctctgtgacttcagggacacatatcttactattgaactgtcttttttatttcggagcccacatgattctgccacaagtagaacttcccagataagacctctgaactcagtggttctcaacctcagctgcatgttggaaccatctagagagccttaaagaaatcactgatgcctggaatttggacttcattggtctggtgtgtgacccaggcagtgggattttcaaagctccccagatgatttttataggctggcagggttgaaaattcacagctcttccctaggaagggcaaagatccacctacaggaagggaacaacccagctggctcttaccagaacttattttcctctttatgtgtcacggaaataaagcaactgtgtagttttcctaatgatgttctccccagactaacttgacccggatggagaggactggcagttgcaagcaacactggctagcatgagtgggactgttctgctgtttcttctaaatggctttcctccctacctgaccctgactgtattttgacataggaaacagaaacttcactggctgtttcgtggcaacagttctgccataaaattttgccatacataggtttaatttcttccacgttttatgatacacaattaaagttcagaataaaaatctgatttcctagaagagcagaagctgaaggatctggttctctgtgatgagggtacctttcattaagctttccaatggtgattattgagtgtctgacattcaaaggacttcatttcattgttctataaaaggtcactactcagacatttaaaattactcttcattaagaatcacaggcccacctgcccttttaggtagactctaaagcaaacaaaaatcatctcgttcagcccatgcatcttccacgtgaggacgctgaagccctgtgaggacaatgagctccttaargtcacccagctcattagtgcagagcaaagccaggtccgtgtgtcctgacctctgaaatgataggaactcacactcaccaagcactctgttcattccggggatggtgctcagcacttgatgcgattgactcataccatcatcacagtggccctaagaggtgggtgatgttatgacccacttttttacagataacactgggatgcaaagcggtgaagcattaagcagcatgattcagaacctcagatcttgacatcccgtctttgcctctctcttcatcatgccagtgtttctcaaacctgaataatctgtgcaccttttttaaagggaaaaaatggtcacagattctcaagaatgggcctgagacccccatagggattgcaggcccgggactgtgaaaccccagctgaaaagcctgaagccactttcggtgaaaggctcttttaaatgccatctgtagatgtgaagtcctgtctttattaatatgataatagaaagttaaaagcctgtattagtacttgctcttttaggattcctgggttcctgagaaccccagtttgagaagcacagtgttattctctgtcttttagtgtttagtggctgttagagaatccaagtggaactcagtgggacttattcaatatttagtggttgttaaacggccctctacggtatgtgtttcttttctgttgctgtgacaacggttagcttttagtatatgtgcaagtgctgccaaagcgagcacgtgaatggttagcttttaaaacccaagaagttactttgctcattcttggaatcacacatcaatacctggagggggcggttttaaacacagtttgagcactcgcggcagaggcagcacaagtgcacttcaagagctgggctttggagcaccccagggctgtacctggccccgtgtgaccttgggcaagttacctaaccttgctgtgtctcaagctcctcctctgtgaaataggggtgaagcattagctgccttacaaagtgattgccagggttcataacattgagacaaggctgatggggcatggtgagcactccatgaacatgagctcttacgtcataatgagctgtggcaagtgtgcatgccattttcatgacagatacacatcagcaatcaccccccaacacatacacacacacacagaggtgcaggttctgtggctaaaggctctggtcttgagccccatgtagacatacagtaaatgttgaaaggtgttaacactgataccatctcttgagtaattgagcccttgctgtatgccgggcccactgatccgatccacttggcactcataygtgcagtttccccatgtcacagaagcacagaggccatccatttgtctgaaaaccctcactattgccagggcgatttgcagcccccgcccccacctgaagcctccagatatgtagggactttttctaaatgcaactttacatagcaaatgtcaattttgcctgactttgatcagaggaggtagcttagcactggtgttcccgagccccggacagcctgggttctgtttgtgggtctgccgtttgacaaagactgtgacctcaggaaccttgccctatgtctctgctccaggagctcctgtgcagaatggagataacatgacctgcttcatagggttgtgatgaaaatgaagtgagttaatagggagaaaagcacttggcttgaggcctagtgtggaataagtaatagtattagagatagacacagtcttaattcgtgggtaactccraaagcatcagctctgtgttccaagggtttggaaatcttgccggttactcccttcccaccaggattcctcygagatctgcatctgactatagcaaaggtttcatggaccatttgaaaatgttctttctctgtaaattacaagagcttatttagtgtggatgtttcatagctagaggtttttggggtttttttctccaggtaatcaaaattgttggttaaggcttttttattytcttactcaaacctcatgccctattaaccagatcgaggaagtgctgttgtggcttttcacctacactttttgttccttttgcagctttaatcgccttgacttacctccatatgaaacctttgaagatttacgagagaaacttctcatggccgtggaaaatgctcaaggatttgaaggggtggattaagcaccctgtgcctcgggggtggttgttcttcaagcaagttctgcttgcacttttgcatttgcctaacagacttttgcagaggcgatggcagagagcagctgcaggcatggtccctggagccgagccttcaccacgcactcgtccaagttcggatgcgggaacctggtcccagcttgagttcctgcctttcccaccacaaattatcaactggttgatgtgtacactaattacatttcaggaggacttaatgctatttatgttgtgcctctgcaggcaaagcccttaataaatattttacatcctttctaatgacaatgaatggaattaatcactcaacaggtatagtattacgactcatgtttactttttaaaatgatttagaccgattttcagattttatttcgttatgattaaagatgtctcatgtacttggaaaagtgagcatttttttttttttttgtatttcactttcataccaggcttaatgtcaatgacatttttatttttgaagtactctgacacctccaccctctactttattagaattggaaggcaaatttttgtccaaaaacctacagacaagtactttgagagaatttccaatataatattagacataatgataattttttccatactcagaatgaaaaactggatattacgtttttkttttggggtttttttgtacaaatttagctaatagctacaggctgagagaattgtaacatagcatgacaaattttgtgttgacttgaaaggaatcacaccattattccttagaagtaattacatgtgttctaacacatttgagacagggttggactcccatttctcatccgagaaattacttaacccttcctggcgctgtacagtcatcttttattctatttcctctttgctgtttgtagtagagacattttgaatgaaacttggcactgcttgattcaaaactgtggaaaccagatctgtttagtctcctgtttgtatgcgtttgctaatggtagctaaataaccagtttttgttgtaaatgcaccaattctgaaggcactttatgtactacatggaggtcatatctggttttgtttttatttttttatcatgaacattaaatgtgatgatgatttcttttccctgcacacatctttccggtgcaatatctatcaattgtgaatctggctgctggtgtataaaaacctggatgtaaagctgagcctacagacctgtcctcaccaactgttttgtgatttctactcaactacaaagatttatttaatgtactcttaatctaactgagttttgttaccaatgacctgttgcatgcttcaataccgtgtactgcctgagttgtgcctcttgtgtgctagattaaaagtgagacagagacttgacttgatcctctgagctcaagctattgagctggtagtggcagaggactgagggtacctgcacagtttgattcttttccacgtgtaagtctccattgcagaattgtcgtgctttgagaaaacacctgaggcagtgtgggagttgaacgaccctgctgtcctttttaacctgtgttgtcctagaccctgtcggggcagtcaggggacactagagatttgatctcatgcgagtcatcaataggacaaaaaagttgtggtttggggaggtctgtttgttacataaaaaggacctttcggtgtaagaaattgccgtttttaccctgccctggctggcatgtgagaagccatggaaggttgtggttgtaaatgagttgtctaaaggggtgcagaggcctgaggtttytaaaagaaggtagatttctacagagctgagtgttggttcctttttcttattggttgaaaattacctggtagtgatcagaaaacttagatgctatgtaactaaaaaaaaaaaaaaaaaaaaaaaaaaaaaaaaaaaaattcccgctcatgagttttgactattggtgagatgttttccgctacagttaacatgacaaatgtctcagtggcaaaaatcccctttttgtaagcccccatagtctagaggcagttttctttttaagaatcatgccagagcctgagtcgagcagtatgctttcttggtttttgagagtaattgtgtaattgtagagggagaaatccaattctaacctaagaactgggattcttctgtcatcttgtaaaccgtatattgaaaaaaacagaatgtcactaaatgcatattaagtcaagtattggaaagtataaaagaaaaatcattctgacaatttctaagccagaagcaaacaagaattactgaaatctaccccatgaatacttggaaggcagtaattgtgagtgacacctcagttcatcaaccccttaataatatcagcttaattttaatgacaactaaatatgctgaagtgaggatttagtattttttaaaaaagcaaaacaaggttcagtagtcctcagcaattctccaagtttctctctttgcctaaaatggtcatagatcttgatttctctgaatcgtgatgaccacacccagtcatcttcacagcataattgcaggtggcagtaaagagagtgtgctgggtaaggagcagttgctgggtcattccttgggccccgacctgcccggggagtagccctgggggagagagggcagtgttgcctatcccagaggtcccagcagtcacactgctctgcaggccgggctctctttatagccagagaaatcaccttaatgcagtctctttagttgtctgctgaagctgtagttattatgggccacttacatgaggctgagaagtacgtgccggagctcacacactgcctgttgcggttctcttaacatcagttatcacagctgcctgtgggtcccgggtatttccattcctgccccttgttggcccgaggaaggatgtggaaagagcacctggygggatgaaggtccaacagcctgtgcctctccactgctggccctggagccggcagcagtgaggcattcattgtctgtgttgcggtgtattcccagcttcagtgctcttttcctttttgcctgaaatgtttatgcttctctgcagccagtcctctaacaaatctcaagaacaaaggtaagacacttggtttttgtttccaggacccttcagaaggtgacatcagatattccctaaattcagacaatgagggatacagagcgacttggcatgtattatttctcccatgtaaggacaaagggacagattattattgttatttctgagacagagtcttgctctgtagctcaggctggagtgcagtggctcaatctcagctcaccacaacctctgcctcctggcttcaagcgattcttctgcctcagcctccccgaatagttgggattacaggcacccaccaccacgcctggctaatttttgtatttttagtagagatggtttcaccatgctggccaggctggtcttgaactcctgacctcaggtgatcctcccgcctcagccttccaaagtgctgggattacaagcatgagccaccgcacccggcctcacagtgacagattctgagaaacagcrtgcaaaacatttgaaccattttctacatctcccattgttgcatagagagtgtgcaccgctgctatcttgccagatccacactggtcctcccgaaagccaggttcatacacagcaactttttaattattctaacagttacccattaacagtcgactcctgtatttctgagagtcttgtactcacctctgaaatttaaaaacgtataaagagagcctgggttaatcagttctgcagcccctacgtgacactgtgctagttctccttcttctgtctcctccttaccctggccctgcacccctgtacttaagagggagaggtgggaggtgctgtctggtatcatttgctgcctcgccagtagagggtgccgctgtgcagggtaactgcccgcctgctcccttcctgacctcccctgaccccgaagatcactacctctgtcattcaggcattggggtacatcctgataagtcgtgtcagaactgccaatttcaggactgagatgtgtttttaaaaaacaaatccttataaactccactttgtactttagattttaaaactggggaaaaatgtgatattctttggaccacttttttaatttatataagccttaatgaacagtgtctatacatttgcatacacacacccccaccccagagtgttctcagtatgtcagagaaagtgccacagcattaggacgggagcttggagaacgttttctagaaaagggttagcttcctgttggcatgaaattttccaagcaaacctcattaaacatctgttgtttgttaaagatgttccactgaaagcaacgcatgtttcaaaggcacgtctttcygttcgttggttttctgtgtgtaaggagtagcattgctgttggcgcctaacctcgcgtgcactgcattctcaaccccgtaccagtgcatcatcrgaagccttcctcgtgaccataactctgtgtctgcagatatgtgttcccgtgtaagccagttttccccttttactcagactgatttcacctagattgtcacggtttccttcatgttaactttgcgtgactttgttcttcctttactactctgtatgtaatatatatacatatatacgtacatatgctgtccaaatatatttgtatatatttgtatagcatttttacacctttattgagtaatctggtttcgaaaggaggtgagagtttagtcccttctgcagttttctccaagctgtgtcctgtgaatttcaacccttggagcctaagaaaaccctaggaagatgatgttaatttgctgtcatttcctaattcaggatctatcatcaaatgaaacatgaaaaaaacagtgacttttaaggtgaaaagagtttcaagcattccaaataaattatcaatgtttcataactttttattataaacccacctcctaataggaagccaagtactatttgatacagtggtaaaaaccaaactaccttgaatttttttaaggcaacttatgaataatgctcattttcacagtcagaatagctttaaaatatggttgaatttgatacacacaggaagttttcttgaagaacaatcctttcgcttttcttttttcttgagagatctaaagagaaactgtagattgttttcctgacagcaaaagactaatgtgacaaaatgaagtcattgtaaagaagcgatgcaacttgtcaaatatttaataaagaattatggaagctggaacattttctacatcaagtgttatgggttgtttgatttaaagcttctttgtgaatgcaccatcttaattgttgtcagaggggtttaaatgcctgcagatttatagtatgttcatttccttcatctccctaaaagcgccgcacttttaaaaacattaaagtctggcagggcacagtggctcacgcctgtaatcccagcactttgggaggctgaggtgggcagatcactgaggttaggcattcaagaccagcctgaccaacatggtgaaaccccatctctactaaaaatacaaaaaatatatatatatattagccagacgtggtggcgcatgcctgtaatgccagctactcaggaggctgaggcaggagaatcgcttgaacccgggaggcagaggtttcagtgagctgagattgtgccattgcatgcactccagcctgggtgacagagcgagattccgtttcaaaaaaaaaaaaaaagtctgcccaaaacacatggcttaagcctactaaaaggatgcacatttattcttatccgtctgctgttttgttcttttattaaacttgagaattactgattttacgtaacatttgtataatccatgttagtctgttcctcaaaaggcatccttgtatacctagccctcaacttgtgtgagagttaataagactcaataatgaatccccaagttgcttctcagaaaggtgctgtcagaatcccgaccgtgtgtcactgccctgtgcaaagccggtggcatttttcctcatgccatttcattccgctcagatcatctcagactcctggagaattttccctttttctttagtactgagcttcctcttgatgtgcttaacccatcccctcggggcagaggagatagctagcggggaagcaggacatcatttagtctttggtttcttgcggcttgtctttttccattaacagtagatggcatcttgccagaaagctgtccgcagcacttggaattcctgccgcctcctccagggttatgagtacacatgagaggcacaattggacagagtcactgtgaatatttatatgttctttcttaaaaccacacatggtggaacgaattacatcaatgacacagttgctagattaatacgcttttaacctgctctgaagtccaagactcattaggcacttgtgagatggtgaagcccctggtaaaagtgtttgcggtgagcatgggtatcctgaattctgacactagctttctcggggttggctctcagagccatgttcaaaggggttcctgaggtaagaacgcagaagcctctttctgggagagaacacttctcaaaacagcttccagagagctcaggctgtagaatctctgaggaatcatttataggacttgaactgggctggaaaaaatttgagcatgagtttacttaagacccaagacacagtccttggtaagtaggccgcagtgcccagatgtgacccagtggggactcaagagggcaagaagggagagtccctgttgggaaccttttagggctgaccttaggccagactgggaaaaaggtcagtctccccaattagcctgttgctgtgttccttcctgcccagcccacttcacagtgccccgtgctgctcatgtgcctcctcccctttcctctgcaaagttcccagctgggctgcaagtctcgggtacctgcagtgttgacagcgcagagccctcccgtcacctccaggcagagtggccctcacttcacaggggcctcctggggacaaggcgtcctgagccctccgtgcttccgggtgaaggtcagagactgtccctgtgtcacgttctcccaggcccactcaaagcacaaagttccacaaggggttgtggctcttccaggtcctctgctggtcttactgccttggtgtttgaaatgacgactgcaacaacttcatccttttcttggccaggtgcccccagaaactaccttttcagatatgcccttttaccagggctccaggccccctccctcacagctctgcagccttgctgcacagttccccatcggaattgtgaggggagaccgtgtttcctccacatgcttttgcccactccccacatcagttcttggagtaagccttttttcctctccaaggaaagggcttacttgcagacgaattagtttggaagtacagtactagagcaagcacaaccccaaactgagcagactgaaactgaatagggcccagaggatgggtgagagccacattcctgtgattaaaggcagatttgggtggtgtctaagcaatacccttcctagggagttttaaatactgttgctagaatcagggagtcgagttctcaatcctgtttggccttatccagactgagtaccaaggctaaaggcagaaggttctgcgctgcagagtgcccaggtgtcagcggctcgaatcacgtgatcgcagaatatgtggccctgcagggccggccttgctttgtctaaacgctctcctttttcatgtgagtcccggggttcttgcccttgatcaatccagatatgaccagtactgtgggcctggagggccaggttttgttgtcatttgtggccttggactctgctggggcagccttgcctcccctgtacagacccagaacagctgcccctgtgggcgcttctcccagctagaaacctgagggctgatgggcgaaggtggttggcttccgactgcccccgtgggccgcggaagcgggcaggacctcattcaccccaccacctccaccgaggggcttgtctgcagcagaggggctactcaacattgagctcaggaagggaggccaggaggctgcatgaacggcccagcctgggcagttgggggcagcggggaatggacagaccaccttggcctggaggtaaccccagcagagacacggccagcagagttccatccttccgcttcccagttcgggcagaaaacccaggttttcccaggaaatctgcaagcacattaagctggtctctcctttaaaaaggtgcaaggatggagacagtcctacctgtcctgagcaggatgggccctgtgccaaggggccaggcagtagcaggctggcactctaggtagggaaggggccaaggatccccaagaggagttgacagcaagataatttaaagagcgtaagtaggccaggcgcagtggctcacacctgtaatgccagcactttgggaggccgaggtgggtggatcacctgagaggtcaggagttcgagaccagcctggccaacatggtgaaaccccgtctctactaaaaatacaaaaattagccaggcgtggtggcatgcgcctgtaatctcagccactcgggaggccgaggcaggagaatcgcttaaacccgggaggccgaggttgcagtgagccaagatcgcatcactgcactccagcctgggtgacagaacaagagactatctcaaaaagaaaaataataaagagcgtaatctacctcctgtaacacatcatcccggcatgggagtatatcttggcaaacatccgcaagaaattttgtctttcaggacagggacaagagcccaccatgccctctgggttatgccttgtcttcctcaaaattgaggagaagcccttgagctggagcaagatccaaaaagctggagcaaaaaaagcagtaggtgggaattagggccctcgtaccccggggcctgctatactctccagtcctcaatcttcgaacagtgaaccccgagatgtggagctgggggagctggccctgaaggccgagacaagcctgcagtccacaggcacgggcccgggactgcccacacctgttagatgggcacaaacggggccttcgctgcccggcaccaatctcctcttgcactggggccctgtttccatgcagtgccaggggcctcaatcattagctctttcagtgtaatttgcctcttttggtttaaaatagtctttgggggataaatattcaatttctagattaaactccttgttgaggctctttcctccggaggtccctggtggatcctcatgggacaggctgaggcgggctctctcctcgggcctagggtgtcatgctctttgtcccctgaatggggtcgcaagtactccagggccatcctccagggacatcttgctggcctctgtgatgctcaccygagccccagctggtcggtcagccctgaggctctcagccatggggtcaccctgccctcaccacagcctccctttgtggcactccagcagggccctcagccctttctgcctctctgagctgctcacctgcacctgagtgagcagcctccaagccacctgccagagcctcccacggggctgggaaatacctagtggcactcaaaagaaaagggaaggaaatgggaacaataagccaagctgccgtggagagtttatcttcagccttaagcatctttttacagagtgaatttcccctggggacagtggtcttcctgccatctgccaagcttctggggtcttcagtttaccctcttataatatttccacaccagcctaaagaggtagatattattagcaccaatgtacatacaaggaaacagactaggaggttaggagactcgcagagtggtactctgaacccaggttgtctggctcaaaggcatcatttaaccaccaactctactgcccattcactgcccctccatcaaaacctcctgtctgagaaaccagagtgtcaagacagaagaaatcatcaataacactgaaggcagcacactaaaggggagaaagaagactgggaagtggtcgttagatgtgaccacctggagatctgccatcctactgcccacacatcctgaagaacaataaactcattcgtactaagatgtgaatgactgataggctaaacacatgacccttccagaagaatttttattttaacaaataccaaaggtgatgcttggtttatatcaaaaggaataaagatcaaaattatggcatttatgtcccagcaaattggggagggtttttttttgtttttttgtttgttttttgttttatttttgttttttgttttttgtttttttgagacagggtctggctctgtcgcccaggctggaggtcagtggcgcgatctcggctcactgcaagctccacctcccgggttcacgccattctcctgcctcagcctcccgagtagctgggaccacaggcgcccgccactatgcccagctaattttctgcatttttagtagagagggggtttcaccgtgttagccaggatggtcttgatctcctgacctcaagatccacccgcctcggcctcccaaagtgttgggattacaggcgtgagccaccgcgcccagctggggaggtttttgagggtagggggcatacttaagtttacaaaatccactgacgccagtggaatacgggatgccagcacagtgggaaaagacagcctgatctctgggacagccccagtttcagcacttaaaagacactgcactgcctttctggctgccacaggacagaaccccccgcctccctccagcctttcccacaccacaaaacaagcatctaatattttccagggaccttccagggacaacacaaacttccctttgtccaacagaattgaagggtgaagggaccagagactgaggactggattttctactcccaggaactccttgatggagctctgagatgctgaattttttaaagagtttctgttattaaaggattttagatattaagttgtaacatacagtcatgcaccacatagacatctcagtcagcaatggactcccatagacgatggtggacccgtgagatgataatggagctgaaaaattcctgttgcctactcatgttgcctagtgacatcatagcctttgcaacccatcaccctttctatgtttagctacgcttagatgcacaaacccttatcattgtgttacaattgcctgaacagaacagtcacatgctgtacaggcttgtagcctcggagcaataggctggaccatatagcctaggtgtgtagcaggctatg

SEQ ID NO: 95113 - DNA, 37700 bp, Homo sapiens
  misc_feature (1)...(37700): n = A,T,C or G
attgttttatttcgtgtgtgtgtgtgtgtgtgtgtttgtgtatgtgtggtagggaagtttaaactttccctctgaagtgagactgctgaaataaactgacaatagagtagcagaagaaaaagcatacaaatgtattaaagtgcacatggtcacaagacccccacaaatatgagactcaaagaaaggccaaattgttgaaacttatatatcttcttcatagggaagagggcgatggcggaaacttaggcaattttgagggattgtaaataattttcaggaaaattgaataggcccaaagagcagacagtagtttttgaattattcttttcggaagaagaatgggacccacagttatgggaaggtgaggggcagaactgtactgtgaacaaaggttgtcctattatgcatttaatttttatttaaatagtaaatatttaaataatcttaaataaatcttaaataataaagtaatctctcagaggtgccatcagaagaacagataaaaagtgtttcagggcatagtgatgacttttagtctttcctcttctccagtagttaatctttcctggttatctgataagattcctagtaaagagatcttaagacaactgcacttcttttggaagactcagtgggagaaagcccttctcttcacttgtggggaagaaataaaaagttagaaagtcgttgtttctgaggcagcttctaaagctttccaatttcatttaattcaaaaatgctcagcataccagagcaccatacttggggggtattgtactctgagctctgacatgatacacatatccacatactacttttaactcaaaaaataattcttttgaagtgaattattcatctaagccttagacgccaaggttacttcccctgtattgatagtcactttcccacaaaaaatatactgaataattttatatccccttgtttctaataggttaaatatgtattaatttctggaacctcttatctctctggactattttttggttattatttcaatcagaacactgttttcatatctactcttccttgataagcacttttaacatgtgagaggctacttctccaatattatctttaacataaaagtctatttttatccacatttatttcagttgttattttttcaattcctgtaaagtaatccattgggattataagtgacatagcttaaatctataagttgaatgtattttaaccttcgtaatttcagctctttggtcagcaagtgtatctttccatttttcaccacccgtcatataattacagactgaagagagttgagatataatttgagttctagttctaggccaccctcccctgtattcgtgtcattttccagataatcaaaccaaggcccagagactggtttgtccaaaacatctgtatctgcttaggagaacacctagaaattgaacccagagcttatcccatgctatttttttctatcgaaccatttatttaagtcttcattcactgcctttagagctttaaaactatattttatatatattagatgttccagttggttagtttctaggaattctctagattgaggtaaaacaaaaatgagtatcgacattgaactttgggcagatggaagcagataaagtattttcagtgcagattaattgtgtaaagcttattccagtccctcattctttcccaaatggtttttggtagggaaaagcaaattggcttttgcacttatctcccattttttggtcattctatcctatcttttagggattttattatcaaatttatagtttgcagagaagtgtgttggatatacaaagagtcaaagttatagaattttgcctttcctgaagattctcacaatcaaattcaggacatcagatatacactgtgtcaacttcatgaaacagaaaatcccagtaacagtgatttaaacaaaatatagatttattggtctctcatgtaattggaaatctgaaggcaggcaatccaagactagcatattgactccacactgtcttcagaatcctgggctccttcatgtcttctacttctttaaaatcaagatgtgggtctcatcttcatgtataccagaagattgccagtgctccagccatcatgactaatttccaagcagaaacaaaagacagagcaaaagtccagtgctgagccagctcctctttaactagttttcctggtagctcccagtgatgtctgctcctatcattgcccataacagcatcatatgattgccaccaactacaagggagctgacagatgtaacattttagctaggcatattgctactcttaataaaatcaaagatctgtttgtaagtagagagagtggatatcggccaggcaaatgatagtctctaccactcagtgtacaaagtaaaagggaaaacataaagtagagttttgttcaggctaagaccatgtgtccaagaatgtgaggttaatgcatggccttgatggttaagttggattcagataaatggtggtgagaagaggggacattttaagaccagtaagggcttgatcacagatgaggtaaaggtcctcctagcaggtgtaaaggagaatggtggtagggagggagggacttcctctgtgcttagaatgtctttctgggagtgtgaggatatgtagaaatgcaaggatagattggttatcagctctgtttaccaattaccgttgtcctcattaaatcttcaataacaactaacgtttattaaaaccaagtatgtaccaaagggtttgctaggtgttttaacgtatgttgtatctaatccttacaataaccccattttggggataagaaaactgatctgtcacaggttgaatacttgatcaagctcatgcgtcttttaaatttaagatattctgacttgaatgtgttttacaccagactccatgatttttttcccacaatgtcacaatgttaagttaatttattaactttgcttgggattgggggtgaaggtgggtgagttaaaccggtattccttgatattttctaaattctaaactttaggggaactttacaaactcttcaactaactagcagtgtgatcatagacaaggtacttatcctctctggatttgaatttgtttacttattactcagatacaaaaccagacagatactataagagaggaagctttcagtccaacatccttcatcaacacagacacaaaaattctaaaaaaatgtaatccatgatacatagaacataatccaacaatacatgaaacaaataataaaactgacaaagcaggctttattgaagaaatactaagttggtttaacgtttgaaaatcaagtaacaaactacaaaaagaaaataggaaaaaggtatgattatatcagtagctgcagaaaagcatttgacaaaaatccaacatcccttcctgataaaaactctcagtagactacaaatagaaatttccttaatctgatagaaaatttatgaaaaacttatagctaatatcatacttaatggtaaaaggctgaatacttttcctctaagatcaggaacaagacaaggatgttcactctcaacatttctattcaacactgcgcaggctctaaccagtgcaataaggcaagaaaaagaaatcaaagacatctgtattaaaaagaaagagtaaaactctttctacacagatgacatgatttttctatgtagaaaatctgataaaatccataaaatgttactagaactaagaaatgagtttagaaagattacagaatacaagatcaatatacaaaatctacatactagcaatcagaaattgaaattgataaaacaataccacagcatcaaaaatatgaaatgctttaggatgaatctatcaaaagatgtgcaaaacctatacagtgaaaactacaaaacactactagtaggtgttaaggaagacctaaataaatagataggcatatctttattcatgggtcaaaagattcaatattgttatgatattaatttcccccaaacttatggatagaatcaatgcaatcccaatcaaaacttaagtaagatcatgtgtagaaattgacagactgaatctaaaatttatgttgaaatacaaaagacctaaaatagcccaaacaaccttaaaaaagaacagaggtacagtaccaatgctagctggttgcaagtccagtcatcaggatattgtaatattgatgtaaaaatagacaaattaattaatgggacaaaataggaagtccagaaatagacacaacacattgataggaaactgatttttgacagattcaaaaacagttcagtggagaaagagtagtcttttaaaaattggtgctaggagccaggcctggtggctcacgcctgtaatcccagcactttgggaggccgaggcaggcagattacctgagatcaggagttcaagaccagactggccaacatggtgaaaccccgtctctactaaaaatacaaaaattagccagacgtggtggcacacgcctgtaatcccagctactcaggaggctgaggcagaagaattgcttgagcctggaagatggaagttgcagtgagccaagatcgtgccactgcactccagcctggccgacagagactctgtctcaatcaatcaatcaatcaatcaataaaaatggtgctggaacaactggatatagatatgcaaaaaacaaaacagataaacaaaacaaaacaaaaattttggccatatataaaaattctaaatcggtcagagacctaaatgtaaaacctagaactataaaaattttagaacaaaacataggagagaatctttgtgatcttggattaggcaaagatttcttaaatatgataccaaaaaaagaacaatccattaacaaattgataaattgggcttcatcaaaattaaaaactgctcttcccaagacaatattaggagacagaaaagacaaacaagagactgggaaaaaaaatctttgtaaagcatatgtttgataaaagatttgcatccaaaatatataaagtgttctaagctcaataatgaaacaactcaacattaaatgggcaaaagatctgaacggacacttcaccaaggaaaatacactcgctgcaaatacgcacatgaaaagatgcttaacatcattaacgattagagaatgcataataaagccacaatgagctaccactacacagaaccggaacatctacagttaaaatctctggactttcaagtgttggcaaggatgaagaacaactggaactcgcatagactgctagtgggaaggtaaagaaaaaaaccacttgggaaaacagtatagtagtttcttaaatggttacacctaccttacgacctgggcattccacttccaggtatttaccccagagaggaaaaaccgtatatgtctgtacaaagatttgcacagggatgttcctagcagctgtagttctaatcaggaaaaattgaaagcaggctaaatcaagtgctgactaaacacacggtggtatatccataaatggaatactgctcaggaagcaatgaatgattgttccatgcaaaaacacgcaggcatgtcaaagtaactatgttgagtgaaagaagccagacaaaatcaagtacatatgggatgattccatttatggacgactctagaaaatgcaaactaaaacagatcagtgtttgggctgcggatgagtggagttgggataggtggaggggggcagggcgagggaggagcaggagtgggaggagctgggagatgcagagatgggttggggagggtctcatggaagggaagggagagaggaagggggagaggaagggggaggaaaggcaaggggaaaaggagaggaagagggagggggagagagaggcagagtgggaggaaagaggggcggggacctgggagggcccagggcacatagtgggaggagcaggtgggaaggagggaaggagggaggggcaggggagggagaagagggggagggagacgaggggactggcggtgtgggcggagcgtggggagggaggccgactagcgcaggcggacgggagagaatgggggaggggtgggatgggagcaggggcagagacgggcagagggcagagggcggagcggcgccggagcgggcgtcatggcgcggctcctctggttgctccggggcctgaccctcggaactgcgcctcggcgggcggtgcggggccaagcgggcggcggcgggcccggcaccgggccgggactgggggaggcaggtaggacgcgggtcccgcaggccccgccgccgcctacggctttcggcttcatttcaccggctgcacccgggagcctagggccggtccaggccgggcgctgccctcctactaagccctcctcggcgcgcccctccccccccccagcccgaggatctgggacagtggattgtaaacttggtggcggcagggtggggactgacccctgtgagaatccgaggaaatgaacaaatgatccccctaaatgtgcgcataattttttttttcttggctcggggagtgggggcataagtggggctcgggggccyctgacccctatcggggactccaggcgaaggcccggggcctgggctgtagcagcccggcccgcgcgcccctgcgaaggcccctagtattttgcattgcagccctcttcgtagttccgcgggcttccttccagcatctgagaagcaggcagttcagacttggggttcctgtgagtgtttcctgccctgctgacttcccataaatgtgtctaagagccagggagactgggttgatcatttgttccttctttaaggtgacagccattgttaatgactgagacagagaccagggcgagcctgtgtgtgtgtgtctctctctctctctgtgtgtgtgtgtgtgtgtgtttctgctaaatacttttggatcctctcttggatctgggtacctgcacatttcaccaagcaggaaggagtcacctcgggagacctgtgccagctacccctgtatttcagttctatttcagggtaacttagtgccccaggggattggcttcctgggcggttgccagactgacccactctgaatccaattttatatgtgttcattgaagacattcagagatacccaactgatgaaaatgtaccaactcattctgagctctttttagcccctgaagttttcgaaatgcaatattgaaagaatacgtaactaaataaaagcgttggcgttgtggaatgttagctcatccaacwtgacttccagctatggcctttctaatcactggtgtctctagtcagtctgatgacatttgytgtgagcctactgtgtgccaagcattgtattgctgagaaccacaggtgatagaaacaggtcacagttaccgacgagctctctataaccccttgaaaaaggatggwggttttagcggtaactacttcatggctgtaattgctgctgtcagaagcagcctaatgmattgccctgggatctgaagttctccagcaacaataaaatttggccagccaccagtaggtaacaggagctgtgtaccttatcagacacccctcctgggaatctattcgaaggaaatagttcaaaagaagaacaaagagatatatgcaaagatgctttaagcactagtctcttacaaaatggaaactggctgtaacccaaatcagttaagaaatacttacgtaaatcatgaaaattcaatccaacaaactgttaggcagccattaaaaatgataaacggagtakttctgtggtgaagggcttgggtatgaatagatgcagattttgagtcttggctctcggttacttcctggctctgtgtctgagctcaggctgctattgcaaaacaccgtggactgggtggcttcaacaacattttctcacagttctggaggctgggaagtccaagatcaaggtgggaacagatttggttcctgatgcagacctgcttcctggcttgcagttgactgccttctcactctgccttcaggtgactgtctcaggaaggaccactaatccctcaagagagcctcacctttatgatctaatctaaaactaataacctcccaagccccacctccacattccatctcattgggagttagggctttagcatatgggagtggggagaggagcagggagaacatataatattcagtttgtaacaatgtctttggacatgtttcttgaatttggaaagtttaaacttcagattttttttccttctgtcaaataaggataatgataatggtagggttgttgtaaagaataactttttaattaaatattttgttacaatgcttgacacttaggcacacaataaatgttagttatgattacataaataagtggaaaggacaaaaatgtagctacatttaacttacatcatgggcttcgggagtgttgagagagagggagacattgggaggggggaaatgagaagatattgaaatgacagtatttttttccagtgctgcaatttctcatatgcttagagtgattttttttaatccagattgacaaagagcaaactgaaaaaggaaagtaagaaatattctggagcaaaaaatctgttgcttcaggaaaatattctttctagagatgactatgctaggaaactgtcctgggcatagggttaaaatagtccaggcactggtgggagagactagttctgcagatcagaatgggctggggattcttttaataccagtttctaaagagttccattagattcaacacattatttatcaaaatggagtgggcttatgtgtgacaattggcagtatagcaactgtggccaggaaggttagcaaaacccgaaggaggcacccagtaggtgaccataggaccaagagtggatttccttagggatgaaaaaatcgargcccaccccgtagaacttctgaccaacaaratatatggcctgtgcaaatcacagcacacagagagaagggaactccaaggaatttgagtttattaaggcataattcaaagtaaagctgtgtagttatctcatgcaatagcagcaaccgataaatgttttcatagtgaagatagcaagagaatgtagagggaatctggaaaatgtgtagcccccaaaggatgagcacgtggtgcagaggacagaaaatacctgcacacacacagaaaaggacacagccagtgttgaaacctctctctagccacggtagccagaagacttgactcattcccaagtgagagaccttgtcgtgtatctaatttacacgtgcctaaattgctgtttgataaaactgctcagaatttactcatactgtaatttttatttaaactttggttgttttctaaagccccagtgtgttcatttgctagggatcccataacaaaatatcacaggctgggcagcttaaacgatggaattcattttcatacggttctggaggctggaagtccaaggccaagacttgtcctgagatttgtcctgagacctctttccttaacttggggatagctgccttcttgctgtgtccccaggcggccttttctctgctgtcccttcctcttatgaggacaccagtcttattggaccagggccccctcttaatggcctcattttgacatgattgcctctttaaaggccctgtctctaaatgcagtcacattttaaagtactggggattaggacttcaacatatgaatttggaagttggcgggcagggagtgtcacaattcagctcataacatccaggtcaaagaaacctcttaaagtgatacagcccacatataacctgacctgggtgtacccaactgagcgttcatcattttgctatcaaagcaaagtctgtctgcccttgactgagccttctaggctggcaaattctgcagctaaatgttgcataattggtgcttgaacaagaactagtctaaacattattgcctacccactaaagttttcgcacacattaaaaatagtgtaaaaggtccacattgataaggattaaaagaaccattaaaaatgtcctttccatattgtacttagatgaaggcttaattcttttggttagcaatttaaatactagttatatattttaaacttaaaaagaaaatattatggcgtggcactgtgtcacgcacctgtagtctcagctacttgggaggctgaggaaggaaaatcgcttgagtccaggcattcaaggctgtagtgtrctttgatcatgcgtatgaatagccattgtgctccattctgggcaacacagtgagactcggtctcttaaaaaaattagggcagagggagaaggtggtgtctgaagaacagatagtcactctctaatacgtgtaacaaaatatagaggtgtgggagagggagctgggaacccagaccaactcaagccttaggttcaaagcgaaagaagtacatgttttaaagctcaattcatgagagtcccactgacttttagctcttctctaattcccactttccagtgtcagctactatagtgtactgcctgttgagtcacactaasgacagtgcttccaggagacaatagggtttttttctaagcccattccacttcctgcctgaaaggagacaggaagataaagccagcttcacagactgtaaattccaacctttgtacctgaagttggtcctcttacctatctacaggaataatgcaagatctttgccaaagctaagaggagggtgttttatcatgatgcgtttagtcctttccttgacaaatgtcaatgatagccagagattaggtctcacaaattcccccacgggaccagagtttagatctgggaggaggaacccaggacatacactctttctagcaaagcctgttcttgctctttttagtgcctctggctaaagcattctctttttaaatcatttgaggtggccaagaagagacaggatcctgaacagaagtggcaaaaaaacagacaggaagaggcttgtattagtttgttttcacagtgctataaagaaataccagagactgggtaatttaggaaggaaagaggtttaattggcttacggttccacaggctgtacaggaagcatggctggggaggcctcgggaaacttacaatcatgatgtaaggtgaagaggaagcaagcacataagcaagcacatcttacatggtcagagcaggaggaagagagagagggggaggtgaacttttaaacaaccagatctctcgataactcactatcacgagaacagcaccaaaggggaaatatgtccccatgatttaatcacctcccaccaggccccacctccaacactgaggattacaatgtcacatgagatttgggtagggacacagagccaaaccatatcagaggcagtcactcgttccactgtgacaagatggaaaaagggtagatgtaggtattagtaagtgtgatggtttggtagccagaaggtttgtggcttttgattttgcaaaagtgaaatctgttgagaggaaggggagacgtagtagatagataccatggtttgaggagagtggaaaaggttttttgttttgttttgttttgttttgtttaatttcaatagcttttgggcgaacaggtgttttgttacatgaataagttctttctttaatggtgatttatcagattttggtgtactcatcacccgagcagtgtacatggtacccaatgtgtagtcttttattcctcatccccctcacaccctttcttctctgagtccccaaagtctattgtatcattcttatgcctttgcatcctcatagctcagctcccacttatgaatgagaacatacgatgtttggtttttcattcctgacttacttcacttagaataatagtctccaattccatccaagttgctgtgaatgccattattttgttcctttttatggctgagtagtattccatagtctatatatataccatcatttctttatccactagttgattgatgggcatttgtgttggctccatatttttgcaattgcaaattgtgctactataaacgtgtgtgcaggtatctttttcatgtaatgacttctttgcctctgggtagatacccagtagtgggattgctggattaaatggtattctacttttagttctttaaagaatctccacactgttttccatagtggttgtactagtttacattcctgagagtggaaaaggtttaaaacactcattgcagagaaatgggaagagagctgactggggaaaratggttccatggttcactgaaaccccagtgagatgagtaactttgagtttataaggacaaccctctccccaggtgggggattttctccagtagtgcttgatggtacacgggtagccatggagaagatagttttttaaataagcttttttattttggaataattttagatttatagacaagttataaagacagtacagagttctcaagacccctcatccggatccccctggtaatcttctgacatcatcatagtacatttgtcaaaactgtctctgtctttcatgacctttacagttttggggaggactggtyaggttccttgtagaatgtccctcagtctgggattgtttgatgtttctcctcacaattaaactgggattatgggctattaggaawaatctcatagagatgcagttcctttctagattcatgtgctcttccccatctctctccccaacactgagacacacacgcgcaaacgtacactcacacactcacacttacttatttatatttctcttgctaaaccatttgagagttgcagacatcatgacactttactgctaaatatttcggcatgtttcctaagaccaaagatgttttcctacaaaactgcaagacagttttcctctcaggaaattgagcacccttgtctaatacacagttgatattcaaatttcccaccatataccaacaatgtcttttatagctcttgtttttttttctgggatctagaatttaataaagggtcacacattggttttagttgtggacagtccttcttttgaataatttccctcaattttcacttatgtgattttttcttcatgagacactgattgaatgttttcagcaggaaaactttactggtgatgttgtgtcctttccagagcatcacatcaggaagacaggatgtcacttgtcccactgttggtgatgctaacttagcctacttggttaaagtagtggcattttcttttttgtaattaataaactttggggttgtattttgagaagatgtgactatctgttccccagtagtctttcacccaggggttttagaatcctctgatgatttttacaaaatggtgattttaaaaattctatacttccttcttcatttattacttgacattctgcgtgataactctgaaggccattgagcaatagtaattatcacataaatacattttgttttgttcccaaagtgtcgaataccccaaaaatcatgtgttaactgaggtatattccataggaatttcagagatctattttcatagcaaaaagaaacccctgtagtcttataaagattgtatttaataaaagatacctcctaggggagcccttgtgtaaaaataataacagtaataaaaagaaagaagaaaacttttaatatattaaatagcctaaaaaccttttagcaaaatgtaagcaatcaactatatgtatcactggaaatgcagtattgttcagtattataaactggagaggagataagtcttttcttgccgaaggataatttaggactttttttgtaacctaaaatgaatttcaactgtaacttctgacgtgtttgatatataggtgctggcatcacgggcattcaacgtttcatcttcagtgccatagtcagattactaaccctttgggcctctgtttctcatctgcaaactgaagagttggacacattataaaatcctttcagattcttaatgttggatgattaaaaacatttattataggagttgggcttcctactccctttggctaaagagagtattgctctagttacttggtttacactcacgtgaataaatgtagtaatatagatgccaaggtgagtaggaaagaagaaaacaaaatatggacaaaaaccatgaagcatcataatagattatggtaggtctgtttctctttcaggactatatgctatgggagtttcttcttttgttccatgcaagaagatttttaaaatagagacctcccttgacaaagaaaatcagagatatccttataaactagcaagggagaagagtttaataaccgactagctcacagttcttttctgcccaatgcctcaactacttctggctagattctgacagcaactgctcctctaaaagtcatcagagaagagaggatcagtttctacccttaggtacccgaagggaatgtattccgcattctttcatatttcagctgcctctttcacttctgtgccccaggaagactagaaaactggctctctacttcttgttaatttcttattaaattaaatagtcaatgaaggcattttgtgcctgagccttctggtccccatgaagaataaactcgtgggagagagaggaagggactggattattctgctgggtgacagtacacttagggaaaaaggtcaaggaagaaaagtccatcaggcatttttgttttaatttttaaaattcctgtttaacratacagggtctcttgcaacgtgtgrgctkcctcttgccaagagtgagtggcaaaagaaactaaccccggagcagttctacgtcacaagagaaaagggaacggaaccggtaagctaagctggtttacagttttctgattgcatgtgttggcagtgaggggscagttggaataggtccagctatgaaacccagctgcccagcawcactccacaggcctggtcttcctcttccattgtgcccttctcggggtgttgatatccatcgagttgtagaaacctgaaacttttctctggacacagcatctctattctgactcctaaataaccttcctgtcatttcacttccatgcaccgctgtcacctccccgtggggccaagtcaccatcaccttctctgtgcatggccattcttgctccagccaacccattctccacactgcagccaaagagttctttggaaaacacagatctgaccatatcactccccagctcaaaacctttggtggctgcccagtgctttcaaggaaaaagaaaagtatgagatggctaataaggtcctaacggcccctggctcccacccctatcctcaaatccagccatcttccctcttgacacggtactttggccacaccacccttgagctctcacatgccctgggctcccttctcttttaaggcctttgcacccagctttccttcttctctcccgtcatccctccccacactctccacccattcattcagacctaccttgtagctctcggcccaaatctcactttctctggcaaaccttctcctagcccccagctagggttgcttctagcagaactcttccttcatagcatttgccatcactgctgtaacccctggcacctaacgtggtggctggcctagtaggcatccgaaaaatcaacttttgtgaatgttgaatgactgccgggtaagaggtrgaaacattatttaaactgcatttggcaatctcagctttcattcattttctgagagaacaaccctcagtggttcttcattataacaccactttttacagtgctacatttatctctctctctctgtgtgtctgtgtgtgtgtgtgtgtgtgtgtgtgtgtgtatacaagtttctggggtacttgagaaaatttgttacacatatataatgcatagtaatcgagtcagggtatttagggtgtctgtcacccgaatacaatacatttttgttaagtgtcatcctcctactctgccatcaaacactgagtgtattccttttctcttactgtatgtttgtggactttaagccactcctcttcatcctccccctaccccctgctttccagggtaggaaaccccctttccaggctctgttatccatttttccactctctacctccatgtgttcaaattctttagctctcacatataaatgagaacatagtgccgcgttgcttaacaagtggtctgtcttagacccaaatatagctactggaatgtagcttttttgaattgaactttgttattagatatttttactagtgaagcagatcccacagagtggaccccagccctgtggcttcaaacatagtagagtatgaatgttttttcctttgtcagcacctgcaaaactcatgtcactacccacatgcactgccattgtaatcatggtctcaccctcagtttttccaatgctaaagtcatcagaagggccagcacatyccaataaagtcccctgaaatgctggtatttttgaaaacttcctgtaggcgggattttactaaagcccttgttgggaaagagactacattagccatttgtgtagaytgcacaagggaaccacatgatactctgtgagcagttgtatgtattcccagagtattctaagccaaccctaattctcaggtacagagccaggcagggcttggtacatagacagaccctagagatgagctgccagatgtttaggaaaataaatctgtgggcttctcaaacagatggtgcaatatactctctgcatttggccatttgacaaaatgagcatcattcattattttaactaatgttataaatccctttccatggatccatttccacgtttaactttttagagtattgcagaaatgtaagccttcattagctttgttcacctaagagaagagaaataaaacatcgaaggcttctctttggtgactctaaattaaaattcmctcccgcatgttttttcttgggcaacggtaatgtgctagcactctgctagaccaacgaataaatttacaggatggctgagcaataactgaaagtcaagtatcaatagaagggaggttttgtgcaggtcattctctgtctactctccagatccactctccgcgggctcccctgctctgagctctaggaagagtgagcagctccctttcccccagctattgattcagtttagccagtgggagacaacagtgagatcaaaaggtgggatggagaaatcgctagagcccagcgttctctctgtggggctgcaggatggcagtggctgtgttcctgtactgcaggtggcccctcttgtaggcagccctcccctgcaggtgcagcctcaccaggttctggccactccctcttcctttgtcccacaggcctagtggaggccatggcttctcagagtcattagcccagggatgcgttgccctcacttgtggatttccattggccccgtctgcacctttgtaaacagtcctgtgtgaggttatctgcagtcatccctcttgagtgtgtcatctgtttccagcaggtgcgttgtattgacaagatggaatggtgaactgccattggtccagcagaccttgcaatcccaggggaatcttgaacatcattctctctctgaccctggcccctccctgtgcagccaggcatttcaattctctcttctaagtattcttgaatctcttctctttcttttatttccactgctctgcctgagcaggagcacactccaggcctgcatgtgtgatggaggtcggattgccctctgcctctggtggcatcttgccccattccagctcattctttacctgaatgtcaagcgatctttctaaaaaccaactccaatcaggcgtacacccagttcacaagtttccagtagcttcamatttccagtaggacacagtttaagctgtttgtcgtgatctaaccaaccccatctggcctggtctcacctgccttccggcatcatctctctccatcctcctctttgccctcttctttcatgtgggccttgaccaaggtattctgcctgccagaaatactcttccatttcctcattcaattaactcttactcttcaaaagtcagcttagtgttggcatttttctataataaacaaccatcagttgtgcaatttagaataataataaaaggttaagaaataaaaagacttcctcccatctcagataatatctgatacagwcagcctttgtggaaactccccccttcgtagtgaagggtacagcgctacccgaactccatgccatctctatcatagctgtcaccacatggtataaattgtcagctcacgtgtgtcttcctcccacttagggagcaaattctttgagtgcagaaactgttttgctgcccacctctgcaacactagcacccagctcagcctgggtttatattagattatcatgtcaatactagaaatgagatagaagctgagtttaaccctaaataagttacaggacttgtataaaattggagagggagggaaacatcaggaagctaggcaaggagagagtgggtagatgtcatttcagaaactatgttggctgagtattccttttcattgattttttttttttttttcttgagatggggttttgctcttgttgcccaggctagagtgcaatggtgcaatcttgacccactgcaacctctacctcctgggttcaagcgattctgcctcagcctcccgagtagctgggattacaggtgcctgccactacacccggytaatattttgatttttagtagagatggggtttcaccatgttggccaggctggtcttgaattcctgacctcaggtgatccacccgccttggcctcccaaagtgctgggattacaggcatgagccaccgcacctggccttcactgatgttttaatttttattttgcttactgtgatagcagttatctatcacttcctctgtccagctgcccccctgcaataatgaaattatgttttgagtctttccaggctgtctggatcctatgaaaaggcttttctagatcagccttaggactggcagtcctgttttgcatgcattcatcttcagcccaggtgggaaggatgggaaacttcctcttttttttttttttttttgagatggagtctggctctgtcgcccaggctggagtgcagtggcacaatctcggctcactgcaacctctgcctcccaggttcaagcaattcttctgcctcagcctcctgaatagctgggattacaggcgtgctccaccatgcctggcatttttttgcatttttagtagagatggggtttcatcatgttggccaggctggtcttgaactcctgacttcaggtaatccacctgtctcggccycccaaagtgctgggattacaggcatgagccaccacacctggccaacttcctcttcttcacagctgctaactagtgccagtgttggaagcaggcatttgaggggaccggccataaaggaccagctcactactgtttggatttctgcagctaagtttagggttttaaagaaggaaaacatccaagtgtacccagatggtaggctcagtaggttaatttgaaattgtcttttatacagctcactgcaaatgtgctgttaatactaccacagggaatttggatgtttaaactgtgaattttttgagttgggaagcctggagggatctgaagatttcctgagtcagctttgtcacttggtgagctgttctgtgctctggctttcctctggcccataggaggggacagtgcctgccgccaggccctgtgatagcggatcttcatggtcagcttgtgcaagggttgttttttatttaattttctttgacaggggagatgacaaaagaaattgggcaaaaatggtctttaaaaaaaagtcatcagccgggtgcagtggctcatgcctgtagtcccagcattttgagaggccaagacatgcagatcacttgaggtcaggagttcgagaccagcctggctaacacggtgaaaccccgtaaaagtacaaaaattagccaggcgtggtggcgtgcacctgtagtcccagctattcgggaggctgagacaggagaatcacttgaacctgggaggcagaggttgcagtgagctgagatcgtgtcattgcactccagcctgggtgacagtgagacttcatctcaaaaaaaaaaaaaaaatcaagtttgagaaataacattttaaaaaatattgacttggctaattcattgacttgtctccttgttctcctctcagaatacctctgaaaacttgcaaaccctgtaacccacaatgaacgcagtaatttcatctaagtagtaacctgggcactgagggggtggggaatctagctcattatttaacatttattaagtatgctgtgtcctaaacattatgtgaagcatattaaaggcaaaatgcctgatctcactgaactatgctttttatgtatttatattctgtctttaattggagatttcaaagtatgttagacagtggactagattcctgttgtattaactcttttaaaagggagaccgaaatctcacacagtcacagaggacaagactctgttttcttgctttttcaccgactttgatgctcttggatgaaaagtcctgtatgaatacaaagattatcaaagtcataatttgaatattgggtgcaataaagcccaggctgtaaatacatctgcaggctgcttcattgggtacattataattttctctctggcrttatttgcacttygtcaaattagtacagaaattccttgatttggggacttacccaggatttaaatctgctgtttcaactcctgccagtagtatgagaaatctgaacatgacatatctaatttactttcagcctttcagtgggatctacctgaataacaaggaagcaggaatgtatcattgcgtgtgctgcgacagtccactcttcaggtaagataaagaattgagagccacggaaggagaccaaacctccaggttcttactgctttgtttcatttgagatcttggataaataaatacccataatacccattttgttttttaaattgctcttctcattttgcattgttgctgtaaggagagctattcatataagatacttgcctgtcttgacttttttttctagcatttagagccattaacaagacttcttagcttatattcttcctttctctatcctcaagaaatagcaaggaaataaaactcagtgggccccttatgataaagctattagagttttttttttttagagggaaagtatttaaagaaatctaaaccgtgattatatttgctgggccatgtgattaaaactctctcccagggaaaatgggtttataatttaatttaggaaatgtagaattttatgaggatagattccccacaatgcttgacagtagcgaataccataccctcttctatatagctaaaagtaaacttatttgtcccttgatttcaaagcctcttttaagtcaatcaggatctgaaatctctcaacaaaggcttttttgtttagacatgcaggaaacagtcttaaaaaaaagtagattcgatggagaagaaaggaaaacatctttgaagtcctatttttcagaacttcaaagatgttttcctttcttttgcatcaaccctaaattggtttagaataaaatataaatcaagccagctctgtgcatygcccattaggcagtgcttccttctgtcctctgggctttgagcagtctgggccttcctgcccggctggctgctaatgtgggctgccttaggaagccggacccgcctgcaaggatgaggagcgattagcatcgattttcctccgtgctcacagatgggcaggcctttgcccggatgcattcacgttggcatgggggaaactagaaggaggttaatttttgcacagtaaaatgtgggactcaggtttctgagacaatagttatttcttgacctttggttgtgttaaagaggagaggtaggattttgagatggcccatgagctttcagccatagaaccatgctgccagcgtgtcaagggctcccttgttaccgcaggcaccaggcagtgctctgtctccctcttygcactgtgaatacagaagataaatcatcctcgcaagagcattctcttaaatcacagtcttcactcttccccttccttgatgttccggtttctgcatctgaaaaagggggggacttcttcccttcctttcaccttgcaggcttagttgtggtgtcagaatactggagccaggagggtcctgagtccagagcagaaagctctgtccagtagaacttcctgtggtgatggagatgtctgtatctggccatgtggtagctgctcatcacataagcttgttaagcactcaaggtgtggctagcatggctgagaagctgactttttcaatttaattttaattaatttaaacttaaatttaattttaattaatttaaacttaaatttaattttaattaatttaaactttaattttaattaatttaaacttaaatgtaattttaattaatttaaacttaaaaggccacatgtggccagaggctactatattagcacaatgctagttcaaattaaggaagttaagtgaccaactccaggtcctggaggttgtgaagcagccaagactaataggaaaaccagccgattctccaaaagcccattgaccaagtggccagtttatgagactgccaattcaccaactttatttgtttttgtgtaaccatttagtttgagctgaaaagtttccattttgcattcttaaagacttctgagtttgtttctcttsccctttcctgttgctgctactgcagctgaaggaaataatatattcctgaagattatttatgttccagaatatactattcttaaagatgcactcatttatgggagaggcagtagaatggttaagattgccaaggtgtatatcctggctccattgctgtgtgaccttgagcaaatttcttaacctttctgtgtctgatttcctcacctgtaaaatgaagataatagtacctaattcataaggttgttgggaggataatctgagtcatgaattaatacatggaaaagcatagagcaatgcctgacatgactgactcaggccaggcacttgatgcaagttagtaatgatgtttttgttgttttgttttgttttttgagatggagtctcgctctgtcgcccaggctggagtgcagtggcgcgatctcggctcactgcaacctctgccttccaggttgaagcgattctcctgcctcctgagtagctgggattacaggcgtgtgccaccatgcctggctaattttttgtattattagtagagacggggtttcaccatgttagccaggatggtcttgatctcctgacctcaggtgatccacccgctttggcctcccaaagtgctgggattacaggcgtgagccagtgcacccgggcgtaatgatgtgttcttaagcaatagatccctcttagggctgtatacatgaatgcgcttttgatcctgaggaattctggaggatatattctaattaatgagaacatacaaatgcagactatattcctgagacttcttcctgttcaagaggagttttagaaatatattctggttttgcctctcattttccttctctttctgtctctggtctccagtctctatagtaggaagcagaggtacagaaaaaataattccttcaaatgcttgtgtggagtgaaagtgaagggaaagttggtcaaccaaaactaagtagttcttttaacaagtaaatgcagggctcactcctttgagctccctgctccagcttggctgcttcctgcctgggacttcccttcatgctgagctggcctcctgggatctgctcagccccactaatactaattgaaattccacttatttttggatcccagatttctcctgaaaccttctctgatagcacacaccrtgggtttttttttaatctgcttcaaattcctattaatttatcagtatcacacaatttaggacctaattattctcctattggatcaagtattttatttagttaaggagataaacttgattagctttcgagtcccttggccatcttatgcttcttggacaaggctcatggaagttgttatgggatgaattgtgtctcccaaaaagacatgttgaagtcttaatccctgtaagctgggaatgtgaccttatttggaaatagggtggctgcaggtataattagtttagataagatcatattggagtagggtcagccctaaytccaaaatcactgctgtccttataagaagaagagaagcccagacagagaggagacagccatgtgaaaacggaagcagagattggtgatccgcagctacaaaccgaagactgcctaccttagaaggtaggaagaggcaaggagggattccctagatgcttcagagccctgtggacaccttgactttggacttctatcttcaagattgtgagagagtaccacccattttgtggtactttgttacagccaccttggaaactaatacttagatgctccataagtacgtattgattggttgattaataatatccatcctgctgcttagacatcatagcaatgttgggactatcagaagctgtggttacgggctgaacgtggtgactcatgcctgtaatcccagcactttgggaggccaaggcgggtggatcactgcaggtcaggagttcgagaccagcctgaccagtatagcaaaatcctgtctctactaaaaatacaaaaactagytgggcgtggtagcacatgcctgtaatcccagctactaaggaggctgaggtaggagaattgcttgaacccaggaggtagaggtttcattgagctgagattgagccactgcactccagcctgagtgacagagtgagactccatctcaaaaaaaaaaaaaaaaaaagctgtgattatgaaatcactgtgaaaatgtgagggaagtggctgcaacttcttgagcacttacatgccagacactgggctctagtactttgcaaacaatcctcacyctccaataaggagctattaagaccctcacttaacagatgtgaaaactgaggcttaaagaatttaactaacttgttccaggtcacttgtctagtaagtgatagtgcagggatttgggctccactgcactcttcttgagagtgggaagcaccccagcaatgaaggagccctctgggcacgcggcaggtgccatgcccaggctcttcatgtgcatcgtttcgtcagacctctcggcagctccccgtastgttattatcattctcatttcacgtgaggaaactgagagctaggaagatgaaatawcttgtccagggttctgcagcttacaggtagccagccaaaatatgaacccacagttttggactccagagcccacattcttcactagctgagcttccattaagccacacgggcagctccgttgacataggtgccatcgccttttggtgcctgctttccttattacaggtgtaagtttcccagaagacataaccagcctctgagagtgatcccagmcagtgtaactcatgagttccctttccagagccttgttcccagcctcatccaccagacttagcgtcattctcctcatcatcctataattgttggaatgagtttggtgcacagttttggagagcttctgcctctccaaatcagacacctttaatcaaaggtgtctgggtcaagaacactttccagaatgtgttgtcacactcctagggactccagactctctttccttaactcggaatgaagtgacattgcccatcactgccacttcctctcctccttctccctttcttcttctacatgagcctatttggaatgtgtttattaaaatctattgtgggatcacatatttcatgatcacaaatcttcttaaaataagaggaaacagagcctgatactagttcaccttttacgtaatatcctgatgtcgtatgtaccatgagtaactaagtaatattgttaaaaaccttctgtatgccccattccctcaaaggaatagaaattcttctaagaggttagggttgtcagttatcaccaagtgcctgtgctgttggtttgggacctgtagaacttccagaaatcaaggaaaaccaaagcaaataaaacgaaacaaagtaaaaatcccttagagtatatgattcagaatggttttagttcttcaagggcaaaccttacaatctgctaatcacttaaatatgtatattggaatttctgattggctttaatattttggttcccagtcttaacttatatatgttaggcctctcatattacttggtaaaaatctcccgattctgctaattgcatcaataaaggtttattgtttcccataaaatgctttartgagtttttattagccttagtttcatttatttaaaaaattttattgtattcataattctcaatcaaaatacctttaatgatcactagttgatatataatgttgaggrtggaaagactgggattaaaagatacttaatgatgtttttccctgagcagagtggccagatgaatgtttttgaacccctggaggagggttgcaaagaatccgacctgaatatgcagacatttctagttggacccacaactgctcacattccatagatttctggtattaataataaaaaaatattaaaaaatagctaccaactcaagtgccatgtgtcaggtactatgctaagcacacacacagaaagtgaggtgataatgccattgctattgttagcttaaaacaatcatacaatctataaatttagaaaaggagactttatttcttctaaagggttacagccttcaaggtggccatcctacaggctgggaagcgagctcccagccaagagcagatgcaggcacttggaagggggagcagctggggtaggagctttatgctgagagggttggctaaatatacctatttaacagatcacagaaggggctatgaaaatttgtgaagatggtcctgacatacacatattgaacaaacatgcatgtaacatatgacctatgtttatttgggggtagaaacttaacatttaaatgtattataattagatcctatacatcaaaaggtctttcaggatatgaaggcccacaagtgcacagcctctgtaaaccatccagaaccacttcatggtcttttaatcaggagaaagttactaaaatcagtctcttgtgcaatcaaagctgtagttacggctggtggaacagagggtctcagctagtcagtgtctgatggtagatgagctgcaattgcttcaacactgcttatctcaaggccagtgattgtttagctgctagagaagaagaaaacccctgtggcagttagagttgattctttaagtgtaggggtgcatgacttcaccctcgcctggcatggccttaggtcctgtttataatttggtatattattgccacaaagaggctgttctgccagtcttatgatctctatttaaacattaatgctggtcatttgttgtgtctaaaccacaaaagggagrgggtataatgaggtgtgtctgacctcctgtcccatcatgaccggaaactygatttaaaggtttttctggagtcctcttggccaagaagggctctattcagtcagtgggtggcttagaactttatttttagtttatacttatctatagactaggatgctgaggcttcaaaaaattaaatgacttgccaaggtgatacagatgtaacagacagatcccagattcacacacaaatctttcagaagtcaaagcccttcctctaatggctatacctgtggttcttaaagcctggtctgaggaccccagagattcctgggggggamctttctaggggcttttccaaccacacttgagaccacttgaggccacatcctcttatactccaatcaaaacaacatagcaacagactgaattcagaggcacatatgaagattcagttgtcttttttttaagccggatgttaaagagccttgcaaaattgtaaaacagtgcaactcttctcatgaaatgtttgtttcattttgaaaagtataattatttgccttaaatatatgttatgttaacatataataaatttatttcaggttgagcatctctactctgaaaattcgaaatctgaaatgcacccaaatctgaaacttttttattttttgagacagagtctcgctctgttgactgatctccactcactgcaaccactgcttcctggggtcaagttattctcctgcctcagcctcccaagtagctaggactacaggcatgcaccaccatgcccagctagtttttctatttttagtagagagggggtttcaccatgttggccaggctggtctcgaactcctgagctcaagtgatccacccgcttccacctcctaaaaagctgggattataggcgtgggccaccacgccagcaaaattcgaaactttttgagaaccaacatgctagtcaaaggaaatgctcactggagtattgcagattaaggatgcttagccatcaagtaaaatgcaaaattcaaaaagatctgaaatccgaaacacttctggtcctaagcatttcagataaggggcactcaacctatattaaaaaaaaattaatgcacacatatttttaaattctcatttataatgtataatttgttaaatgttgacatacgtaactcacagacaaaagctctcagcaatccctattaattttggggacacagaggggacatgaggggtgccgagaccaaaatgtttgagaattgctgcattacacaattgtttctgtgggagtttgtgctgtcagctaggcttccttctgtgttcatagtctagggatttgattctttgctactttttcttcttagattagttttttgtttttttttttttttttttggctgggtctaacattcagttcttctctttcttccttagatagagagagccatttccttgccacagcaatttttgaagtctattttcccagtgccatttaagggagcttatccatgagagcacttagagggtgggtctttggtgagtggatttgcctgctgtccttctccttgtgccagcatcatgagtccctgggagacttctggagggttaggtttcactgcagtgattgatgccaggtacccaggcgtattaattaatactaatcatcaccatcacagcaagcattcagggaacttaccatgtgcccagcaccgtgctaagctttatgtcacacttcagtttcccctcaaatcctcaaaacagccctgtagggtagatattattcccatttgctaggtgagcaaactgaggcttcaagagctgtggtttcacacagctaagaagtggccagaggcagcttttgaatccctggtcaggcgtctgtgttgagataacctgaaattcctgttgccaagcatgactttctcatcagaccttacacttctgcgctgctctaagatgatgatgacttcctccgagcattagtatttcgttttgatttctccccttttgacattttcaacacatgggtttgatctgtgttacctaatatgcaacacagttcacaaaacaccatgtgtttttagatccttgttggatatccagaaagaagtctttagcatcaaaggatcaagaagtccttccacttcgagaggcaatggcttcgatagtgaaggtgcagtgaggacgattccggggggactgactgtcgaataactgggcatgggatctggcagaggagagtgggaacngatcctgctgcctggaacaacacatcggggcacctcttggcatgttaatgacagtgtcattagcagctgtagtatcgtttatgtcttccacagttctgagaaaaagtactgctctggcactgggtggccttcgttttcygaggctcatggtacgtctggctctgatgaaagccacacagggatcctgagacgtctggatacctcgttaggatcagctcgcacagaggttgtctgcaagcaggtgaggtttctcattttgttttactttccctgatgctgcccccaatgccacaaagagctctcttgttcttggcaaatctggtgtccttttataggggtactttcttttgtcttcagaacacatggggtttcttttttgttttgctttgttttgttttgttttgttttgttttgagacagtctcgctctgttttgcaggctggagtgcagtggcatgatctcagctcactgcagcctccacctcctgagttcaagtgcctcagcctcccgagtagttgggattacaggtgcctgccaccacacccagtgaatttttgtatttttagtagagatgaggtttcgccatgttggccaggctggtctcaaactcctgaccgcaagtgatccacctgcctcggcctcccaaagtgctgggattacaggcgtgggccaccacacccagcccagaacacatggggtttctacacatgccaataacgatcactctctcccttcaatctgggcactgcaaaaaagagaaaagtcttctccagcctctctctaatgtggcctttcctggttctaaccttccacagagatgagaacagaggtaggatcttcaccttcttttgagcagggataaggagcaggaagtccttatcctgtcagagtgactggcatctcatctttgacttacccagtgtgactggcacctccatctctccaccctccttttgcaccctgcagcgtgtcactggcctgcagagcaatgctgcgggtgacgtcagcacctctgccttctgtgagccccgtaggagagagtggcttaaatccagatcacaaattcattttgatatccttagctgctcacattttctgactcatgggttttgtaaaacattagaggcaagctgattaagatagcgtggttttgccttaagtaataaataataataatacactgggtactacaatattattcagtacttacccaggaattatgttaatgctttacatgtaatatatcaattaattgtccccacagctctcttatgtaggtatgataattatccccatttttagatgagtaactgtaaaggcccaaatttaataacttgctcacatcctattgataaagtaaaactatttaccatgactgtgttctgctttctttcatttcttaattgaattcggatgcaatagactttttctcctaacacagatgtcagactccggagtggagtgattttgggggggttcgtctgtctggttttacataaagagctttgtttgcatttggagatgacagaggcttctgtcctttgcagtgtgaagctcatctaggtcacgtgtttcctgatggacctgggcccaatggtcagaggttttgcatcaacagtgtggctttgaagttcaaaccaaggaaacactgaccatcttcaagagtcccrttcccttgccaccccttcacgtgcaccctcaatttccacaattcacttgaatgacttgttttatttgcaataaaactgggctgaatttgctgctgtctccagcgagtcattgcttctcttaatttatttacctggaatcaacttaatcctgtgtgttaggctgttcttgtgttgctataaagaagtacctgatcaggatctgggagaatttgaaaaaaaaagaaaaactagaaaaataaacaaaattaaaaagaaaaaaaaatacctgagactgagtaacttataaagaaaagaggtttaattgactcacagttctgcagggtgtacagaaagcatggtgccagcatttgctcggattctggggagacctgagggagcttttactcatggcagaaggtgaagggggagccggcgtctcacatggcaaagcaggagcaagagagagtggtagggaggtgccacatacttttaaacagccagatctctcaagaactcactcactgtcaccaggacagcaccaagccatgagggatccaccctcatgacccagttacctcccggcagggcccacctccggcactaggaattatacttcaacataagatttggagagggaaaacatccaaaccatatcacccaactcccacttggagtagaacttcacaaaacgacagagggacagctgtttccatcaaacacttccacagcttcacctgagacgagggcatgactctgggaacatcaggaggctgatggactattaagccaaacaattcctacaaaaattccctgcaccttccactgcgtttcagtccttgacagacataagtaagggatcaagtgagaagaggaaggaaaatacaggatccaaggaatcaacaatgctagcactgaagagcaggattacggaggagctgtgctctgggagcatatatggtgatcaatcagatgcatgacttttttttcaaaattttaaatgtcttgagcatgctacttccaaccattctacccacaaataaactgcaataggacttggttagatttcaatgattatgaataaatgttcaccttcataccttctggttacaaagctaaactttaaaatgtccaaataaaatattcactaaaatttatgtttgctttttggctaagtcaatgaacatgctcttttataaaaaaaactctagccaggcgtggtggctcacacctgcaatcccagcactttgggaggccaaggcaggcggatcacctgaggtcaggagtttgagaccagcctgacaaacatggagaaactccatctctactaaaaataccaagttagccgggcatggtggcacatgcctgtaatcccagctacttgggaggctgaggcaggagaattgcttgaacccaggaggtggaggttgcagtgagccaagatcacaccattgcactccagcctgggcaacaagagcaaaactccatctcaaaaaaaaaaaaaaaaaacaaaaacaaaaaccaaaaaacaaaaaacctctaaattaaaaatgacaaataagaattggctcacatggtagcaggcatttggttataccaagactaatagcaactcaagtatttcacaaatcaagagtcttgaataatttgttactgaaagtatataaatcattctctttgtgactttatgggcaaaaaggaaacttgtttatactttttttctctttatgaacttgttatatattattttacatttcttttagtagcaaccatggaaattacaacatgcttccttacttgttaccatcatatgtaaattattactcattttgagttctccaggaatgttagccttagaacactttattaacatcccctcacattttgttttactattctcatgtatttcatttcacacacactttaaagcccccaaaccattataataatatactaaaatatgtacgaatatatactaataattagtatataatgaatcagtataaaatatataatatacactaatatgtatactaataaatatacactaatatataacatactaatatataatatatgtttttagtatatgtggttgatactcatttatatttacctacatatttgcctcttttgttgctcttttatttcttcctgcaattctgtgtttccctgtgtgattatttttcttctgcctgaagaacttctttttgtttttctttttttgtttttttttgtgagatggagtctcactctgtcgtccaggctggagtgcagtggtgcgatctcggctcactgcaacttctgccacccccgagttcaaaagattctcctgcctcagcctcctgagaagctgggattacaggcgcctgccaccgcattcggctaatttttgtatttttagtagagacggggtttcaccatcttggccaggctggtcttgaactcctgagcctgtgatccacccgccttgaactcccaaagtgctgggattacaggcgtgagtcaccgtgcctggccgaacttcttttatttttcccattagttcatatttcctagtgatgattttttttcagtttttgttggtgaggaaacgtatttattctcctttcattctgaggaatattttccctgagtatagagttctaatttggggaattagaattttttcctctacagatagccaattatcccagcactgtttactgaagacttccttgaatttccttgacatttttcaaaaaaattaatttccatattagcatgggtctatttctggactctctattctgttccattgatatatctattcctatggcatttataccacactgtattgattattataggtttatagcaagtcttgacattattataggtttatagcaagtcttgaaaatcttatggcatttataccacactgtattgaaattataggtttatagcaagtcttggctagttgttttatgctaaaacaattttgaaaaaagaacacaattggaaaaacataaccaaaacatgtgcatttccatataaattttagaatttgcttggaaatttctacaaaaagtcttgctggaattttgattggtattgcattgatatatcaatctggggagaactggcatcttaaaaatattgagtgtcccagtccaccagcctggtatgtttctctgtttatttaagtatgctttagtttttctttaaatattttgttgtttttactatgtgggtcttgcacatattttgttaaattaatgccaaaatattttaattttcttaatactgtcataaattgaattgttatttacatttttattttctattctttcactatatatagaaatacaattaatttttgtgttttgaacatgtatcctgcaactttactaaattgacttatattaatccttgtaacttttttctggatttcttagagctttgtacatacaaaatcatgtctgcaaataggacagttttacttcttctttccaatttgcctttttctttttcttgccttattcactatctgggtcttacaatacaaatttaaatgcaaatagtgagagtggatatgcctgctttgctttgtttgtgattttaggtagaaaacattaaatcttcaccattgagtttgatgttagctgtagattttttttataaccttaattggatgaggaagacttctattcctagttgttgagagatttagtgatgaaagagtgttgatttttatcaaatgttttttctgcatccatttaaataattatatggttctttttctgttttctattcatagagtagattatattgattgattttctgatgttaagccaaccttgcattctgagataaaccccacttggatatgatagatagtattctttttacatgttattggttcttatttgctatattttgttaggaactttttgtttctatgctcatgagtaatattgctctgcagttctattatcttgtgatgtatttgattttctaataaaggtaatgttagccccataaaacgatctgggaaatgctccctcctcttttatattttgaaaacgttggtgtaagattggcgtcatttcttccttaaataactggtggaattccccagtgaagtgatctagatctggagttttctatgtgggaaagtttttattattaatttaaatagggctgccaaattttcttgaggcagttttggtaaatttgctttttaagccgggcaaggtggctcacgcctgtaatcccatcactttgggaggccaaggcaggcggatcacgaggtcaggagatcgagaccatcctggctaacacagtgaaaacccgtctctactaaaaatacaaaaaaattagccgggcgtggtggcgggtgcctgtaatcctagctactcgggaggctgaggcaggagaatggcatgaacccgggtggcggagcttgtggtgagccgagatcgcaccactacactccagcctgagcgacaagagcaagactccgtctcaaaaaaaaaaaaaaaaaaaaaaaaatttgctttttaagtagtattttatctagatcgtcaagcttatcagcatggaattgttcacagtatgcccttcttattcttttcatgtctgaaggacgtgtagaaaaaccccttctttcattcctaatggggatttgtctcctctgttttcttcactagtctggctacagctggtcggttttattgaatttatttcaaaaacgtggcttttggttttattgatttttctctacttctttttttttttttttttttttgagatggagactcactctgtcgcccaggctggagtgcagtggcacgatctcggctcactgcaagctacgcctcccgggttcacgccatttatcttttctattttattgatttttaccctttatcctttccttccttttgtttactttgagcataacttggacttatttttataatttcttaaggtggaagcttagatcactgagctttatttttagactttgcttcttttcccatgtaggcattaaagctacatatttccctatatgttctgttttaccctacatcccacaaattttgatatgctttcattatcataggtatatgatatattatcaacatattttctaatattacttgtgactcttctttgatctagtgattattcagaagtatgttgaagtccagatatttgaaattttcctggttatctcattattattgaattccagtttaatcctttgtggacagagaacatagcctgcgtgattttaaactattcaaatttattgagttgtgttttgtggcccaaaatatggcctatcttgacaaacacaccaggtgcacttgaaaataatgtgtattctgccatttttggtgaagtgttctataaatatcaagtcaagttggttgataatattgttcaaaacttctatgtctttactcattttctggtctaattgttctagtagctgctaggtagagatgttaatatttgcagtgatgtttgtggaactatctcttctgcactttcattctgtcagttacttgcttcatgtatttttgcttcatatattggatgcatacaaatttcgactgttgtgttgtccttgacaataagacttttatcattatggagtaatgaaattatatgataatacatttcttattgtgatataattgacagaacataaaatttcatataatataaaattctccacttaaaaatatgcagtgtacattttggcttaagtatattttgtctgatatcagtctagccagtctagccttttgatgtctactgtttgcatggtgtatttttccacccattttctttcaacatatttgtcaatatatttgctggttcttctctaataaacatatagttgggtcttgttttttttttggtccattttgacaatctctgccttttaattgcattgtttagttcatcaacacttgctgcaaccattcacatgcttgcatttgggatctgtcttattttttatttttgtctcttctgttgttttgcctttgttccttcttttgtgatttttctttttgaattctttgaatatttttcagaattcctttttaattttcctgttttcatttagctagacttcttaattttttttagtggttgtggaaggaatacacacaccacacacacacacacacacacacacttaacttttcactgggtgcttataatgattacttcactacttcacataaaatatagaaatcttgcaatcctatcagtccatgttcctttctattttatggtttttatatgtagtcatctataacattacaaaccccaaaagaccatgttataattttttaaatgtggtttattaaaataattaagaggtaaaaggcaaa

SEQ ID NO: 95114 - DNA, 191694 bp, Homo sapiens
ttggctagatttgacagcttatgcactttaagaatggtcttccaacataataattttgcatggcaaagctcaaggtgacattgtagaaggatgaatggaattgtctcacatcttgctctgatcttttcataaagcaaggaaaagcacaaagcttccaaatagcactaagtcaaaaaagctaccacttcccttttctcaaggaagaattggaattattcgattgatagtatttttttattaaaaagggtaatataaaaaatcagagcatctaccctattcgacctctacttctggtcttgtataccttaggcaacataatatttacaccatgtagttttatactaaataaagttatttatactaaataaagatactaaataaagttgattatagtaaatgtaagcaaaaacaaaaccacaacaacaagaagcataaacaagtcagtattgggggctgggcacagtggttcacgcctataatcccatcacttcgggaggcgaaggacggggatcacttgaggccaagagttccagaccagcctgggcaacacagtgagaccttgtctctacaaaaaaatacaaaaattagctgggcatggtggtgtgcacctgtagtcccagctattagggaggtgggaggcaagaggatcacttgagcccaggaggttgaggttgccatgagccatgattatgccactgcactccagcctggggcacagagtgagaccctatctcagaaataaataaataaataaataaataaataaataaataaataaaaccaagtcagtattgggaacgttttaaatcttcttgacatgtccttctttcttcttagtgaacttggctgctggagcctttcttccatttgtgatggctttgccatctggatgtgtaacatcccaccaggccaaatgcaaaaggatgtggctgttgaggagggcatggcattcttcttgactgacacaaccacatgctcttcttgaagtcacactcccttgatcttcctcctagagaaggaagatctatgcctctcttccagacctttggcgaatgttgatggtttggcagcttgacaaggtaagcagcttgaaccaggtgggctgaaccaagaacaagcaggacatacactttgtctcattagcatgcaaaccccaaaggaaaacagcgatcaaattgctaggtggctaagtccgcatgtagtatctagccctcgagtttaaatattatgtctagcctaatttcctaacaaagtatttctgaatggaaccttgcacaaaacattttctggctacgcaaactttacatgtaactttgttatgagagataaaatattccttttttctttattcaccaaaatttcaccacgggtgctatgggaaagggagtattcagggttcactgagacgccctagaagtgggtacaccatggtccttgccttcaaagtttcttattgcccaagaaattacttattacatttctctagatatcaattgtctatcgaatgcatacaatttgagaattggattacacattttgaggtcactttgttcttctttccttttctttcttatttttagagacggtctcactctgttgcccaggctggagtgcagtggcacaatcagagctcactgtaacctcaaactcctgggctcaagcgatcctcctgccttggcctgccaaagctctgggatgacaggcgtgagctaaggtcatttctgtgactctagaactcttgcatcacacataccctccacagagcacaaagctaatgtgaaaggttattggcaaaatcatttaataaggcaggagatggcttgaggtcaggagttcaaggctgcagtgagctgtgttcttgccactgcactccagcctgggtgtcagagtgagaccctgtctcaaaaaaaataaataataaaataaataaataaataatttaatgatgtatttgtgaatggtattgtgttagatggctttcaaaacatgttaaatcaccagaaattctgtcctttgaaacctgcaagtctcctcataactacctaaaaataccacactatgcccctatctgtccctcacatggtgctattggcctctgcacccacccacagattgctgctttcctaaggcggagcctctcctaacaacaggtatccatcccctcttcctctagggtcattcagcactctgtcatcactaaattcagttttttggcagttgcagcaagcctattgtcttgcattattaatataaaatkaagtataatatagctattatgaaacaaataaatgctatggaagcacygaggtggaakgatgaatttgaattaggaggatcaggaaagcatcagggaagagaggatttttgagtctaattgttttcaagggcaggatccaataaaggagtttaggttgggtggtggtgaaaggcaataattgatgatgatggtaagccttcaagcctggccaatgaaaatttgttaaataaaagaacttccagctggggtaaccgagtgatatgaatgccatttccaatataatacaagaaataaagtaacttgtggatggggaaagatgtcaaacttggctttagatatctttttttttttttttgagatagggtcttgctctgttgcccaggctggagtgcagtggtgcagtcatagctcactgcagcctcagtgatcctcctgcctcagcctcccaagtaactgagaccacaggatgcataccaccatgtgcagctaatttaaatttttttttttttttttggtagaaatgagatctcgctattatatccaggctacccttgaactcctgggctcaagtgattctcccatcttggcgtcccaaaagtgctgggattacaggcatcagccagcatgcccagatggttttagacacttttaaaagatgcctgtggaaaaatgatgtacaaatgtgcaaccaggcatttctctggggtcggggaagagtttatgagttacttgcaagcactctacattttctattgtgttgtctggtttacaaagggttttcattgccattatctactattgattttgattctaacaaacatcctataatgtaggtaggggaggattatattactaggttcaaaatagttcctaaagtgacatttgtgtctgatgatagttactgttaacataaagaacccgaggctgggagaggttaagtgatttgctcaagtaagtgggagagctacagctcagtccccgtgatgtctcactaaaaatttaggttttgggcttttttaaaccactaagagcagtgatggttgatgctggagaagcagatatcattttggatgaaagcaagcaggaaattacgacgaggggacttaaaaaacagtcaaagaaagaataggagcaaatgaaggtgaccacatgacctcccctcaacccctgaggagactcaagatcctaaagggataatggcctgtcatccttcatctccctgacaggaccaagcagtctgccaagggcacagaaggtatctactatatttgagtggagtaataatgacaacagacaacttacagcgggtcctcaaatactgtcattttgttcaatgttgttttgttataatgttgatgagaaaaaaatggatttctagccgggaccactgtttgtatttgcaggttctcctcgtgcctgcaagagttttctttgggtaccttggtttcctctcacatcttaaagacatgcacgttcagttcataggcttgtctacatgataccagtagtttttcttttctttttttttttttgttttaagagacggggtctccatctattacccaagctagagtgtagtggcattatcacagctcactgcagcctccaactcctgggctcaagcaatccgcctactgcagcctccagaatagctgagactacaggtgtgtaccaccatgcctggttaatttttgtatttatggtagagatggggtttcaccatattgctcaggctggtctccaactcctgggctcaagcagtccacctgcctcatgcctcccaaagtgctgggactacaggcatgaatcactgcccccttcctaaatggtcccagtttaagtgagtgtaggggtgtgtgtgtgtgtgtgtggtgtgtgtgtgtgtgtgtgtgtgtgtgtgtgtgtcttgcaacagaatggcatcctatccagggatggttcccaccttttgcccaagctgagcagctgggataaggctcccactatctgtgaccttgaactggaataaatgagttggaaaaatgaataaatccgtgaaacaaatgactgtaaaataaaaatatgtaagtgtacattaatcataaaaatgcacgacaataaatgagataggagtgcactcagctaccatatttgtgattgtttttgaatttcatggtagcagcaggtcctacaggcaacttttgctttgcaaacacttattccttgacttaacccagcaccacagcaaccatcgctcacttaatcactagaaatttggcaaaccattatcttgtttttatcaatctttaaaaaatgtaggtaggccaggtgcagtggctggtgcctgtattcccagcactttaggaggccaaggtgggcagattccttaagcccaggagttcgagaccaacctgggcagcatggtgaaaccccatctctaccaaaaatacaagaagtttatccaggcttggtggtgcgcgcctgtagtctcaactactggggagtctgaagtgggagaatcacctgagtctggggaagtagagcctgcagtgagctgtgattgcaccactgcacccccagcctggttgacacagcgagaccctatctcaagggaaaaaataaaaataaaaaagaggtatagctcacatttattttaatgtttaatattagaagtgttttgaatttttactttgaagttcggtgatgtttttgtaaccggaaataatgctgtaggaacttaactctttttttatatgtcagcctatggcaaatttggttttgttatatgttgttttgcttaaggtgacagtttccaagaacctactccgtgaggactggtgagctgggtcagagtaaatagcacaggatgacgactgcaaggacgatatgggggcagcagggttttagacatacttggaatggcagcttcctgaggtaggccaagtattctcagcataataagggctacatttaggtgtatctggaggaagacggtgaacagatttccacggacggtgagtgcactggaaaacaggcagggatggcaagtaccatagtgatggattggaagaaggtgcactttggggcatgattctactggttaagccaagggctctcgatgaggtccgaggttcctgccccgggcacggagtgggttggcagtgacagcccagcctattacgtgggagtctccctcttgaatggctccaggaggcccatatcgagggtctgaaaggccagacggttatccgcacaaaagtattaagttcatttcagggactgacccggcaatgtgcccgggtccttcccctcggtgctgggaagccctggtctccctgcagcatttcacacctggctgggtctcctgactcgtggcgtgggtgagtgcatgagcctccctccttcgcctgatcgacgcctgggggctcctctccccaacctcctcactctgcccactctgtcctctccctccttggggagcggcaggggacgcctagccggggtccccaggctcccgctcgcaacccacggcctcctccgcgggcagggagcgaacgcccggaggtcgcccgcgcacagggggcggcccggctgcagcggagccggggcgggaaggcgcagcctaacggtccagctgccgcgccccgcgccccgcacccagtgccccgcccgcggcgccgcagccgcctcccgcctgcccgcccgccccctgcgtcatgacgccggcgcccaacgcggaagccgctcgccgcgcgccgggtccagccgcgggctgagcgcggatccgcggcgggcgcaggatacgggccggggcgcgagccgagcgcagtctgccgggccgagcgggcggagcgagccgagtggggctgagcgcgccggcggcggcgggcggagcggagcgcggcgcgccggggccgccgccggggggatgcggctgcctccccgggccggggtgtagagagggcgggtccccggcctcgggagcacggcggtggaggggacataggaggcggccatggcgacccccggcaacctagggtcctcygtcctggcgagcaagaccaagaccaagaagaagcacttcgtagcgcagaaagtgaagctgtttcgggccagcgacccgctgctcagcgtcctcatgtggggggtaaaccactcggtaagggctcagctgcggcgcgcggtccccttcctcctcctcctcttcctcctcgttcccctcctcctccggctgcagctgctgcggggcggggagccggagtcagccctggacctccggctgctcgcccgcctcgaagcccccagccccgcggcgcgtgcccccagccctctgggccgcccaggcaccaccacttgcgtcccctttagatctatggcccggtgcgggtcgggggtcccgtgtgcatgtgagtctcacggtgggtgccagtgccgcccccggtccgcccgcccgcccgcaggtcggtccccgcagcctgggaggtaggaagtttgtgcggggcacggcgcctcggctgtcagccccggcgggagctgctgggggccgggtccgggcgaccgctacccggtgtgggggccgcgcggcgcccgcgtcttccgcttgcgggcaggtgtacctgtcccgggctgggcgcgtgcgagcctcccactggggcactggggcgaggataccggagcgcgagcagatttggggcagcagctttagtgcttaggtcctttctttttcctttaaaggcaatattactgggcacaagtcggctttttggcaaagcagcagccgatgtaaatatggctctggcgtcgggcggcatccctgcgcttctcccgcatcgccctgccgctgtgcgggctggagagcccttggcggggagtcttcctcccttcgtcgcctccccccactttggggagtcaggcagaagtcaccgactgcggaagggcggccggggcggggacagcaggcgggggtcccggcgggcgcgggcggagggggtcccgagttggccgcacccgctgtggggggtgtgggaaaggctggagaacgcgtggaaaggttagcgtcacgcacagtcggggattggaggatgcgccgctgcgggctatgcggactgcggttcgagggtctgaaatagcctcctgctgatctgacagcgagaaactcctgcagttttaatccacttcgataggatcaggaaacatgatcggagctgttggctcagccaggaaagtttaaacgagctgtgaattttgaccatgaccttagccactgcagtcacttagcatctggggaaaagtgtaagttcgctttccctgcttttgatttcgatggatgtctgtatgtccttttcagcgtaatggaaatgacagaaaaccatgctggtttttcggaaaacacacacacagacacacacacacacacacacacacacaccctcaatgtagtgaagttgtttaaaatgcctaaaagcatcgtttttgtatttttcttccccaagctgagcagggggaagggcaaaacagtatcaggatcgatcgtgtttgcatggagtgagtgtttttggaaaagttgagaaatgattatttttatccagcttaatgactgactcactgaagttcattttaacttcctggcaacttctttagctatttgggaatgtaagttgttacaagagcatgcattactgcaccaaaaactcctctctcaagttttattacggaaaatgaaatgcaatttttcctaagtaataagtttacaatgtagagttatgtataattttgttaagctcttttattatttatgttagtagtttttgggtcccttattactagaatagaaacttacaatttaaaaaaaggatgaatactgtagtgcttactcatatttatggtgcttttatctcctttggagttctggtgttttggtcaggagagtgtttctgtctcggggtttaatttagtaaggtagtgtcaacaatatgctgccgaaaaagagtgtgctttctgggaactcgtctgaattccagtttgccttaaaaaatcttgtaattgtgtatgttttactgtaaccacttacgttsctaccttatatttatgaattgctacatttgttttagagtttcttgctaattggaaatattttgaaactacttaagtgtttcatagtgtatgacttgtaaatagtacatttggtgttattttcttttgctctcaagagaagttggcagttctaagtatccacaaccagaggagtgaagtttccatttcatataaatgtaagcatgttactcattcaacagatatatattgggcacatacagtgccagctactgtgggaagaattgctaaaacacctctaatatttttatccaactgtctttattttgagggctctgagttgacataagaaaggtctgtttcacagccttttttttcaaaatgtctattttctttactatattatttttgaaaaaagaatggaggtgtaatataaacatgaaatctaaaacccttagatgccatgtatttctggtttgatttcattttaggtgacaatgtctgatattagataaatgttttatatgaccttctgtgcaccaaagtttatagtataatgtgagaataaatatgtcagcagtcttaagaacaaacaagcatggtgttgtatacgagcatcttccacatactgtggtaaaacgctcattgaatctgcgctttaagtttttcttaaattctaactgttgaccttgggcatgttaaggtcaggttttggcatcagtgtttgcatctgtgaactgaggttgtttggatgatttccaagtctaactcaagattctgttttttcagtctactaggtgcacagtgttatactaggatttgtagaatactatataaaagttgtcttactattataaccttccaaatgcagcaacattcagggaattttcaagaccttgactacaggggaaggaaatctatggtgattttaagagactgtgaactaagggtttgttatattgaatgtagctgaactgcattgcagtctattaagccaaagtcgatttgattgaaacataacaacttgcaattaaggtgaaaatgttcaagtccattgaggtggtaatgaaaatcttgatttgggcaatggtcatagtcgggagtaagcctgccattgtgtggttaatttgatatgttactgctttgtaacttaaaatacccatcagtgaatggatcagtgccaatttttaagtattttaagcagagaatataactgaatacataaaggaaaagacttaaggcagttttgtcttgttacatttagaattaaactaaaaatgatcaaacagtaagcgtcttaagatgatattttaatagtgtggggaggatgttgaatgatatgagccaagacttgttttaaatagatactctaaaagatttttatccacagtgaaatgtgagccttttagaaattagtattttaaaacctatttaaatatccaaaggaaaacattatctgtatagaaaaatcttaaagcacataaaacttgtttaaaacatgtagcatttagaagtagctaagtattgatgttagaggcttttggtttaaagctgtagaagttgaaatgagctttggcaaaaatgtcaggtattgaggggtttggggggcctatcacagtagaaggaaaggctggtaatggaaccatgtgaagagctgggtgcttgagtgtgtgggtgtgtgagtgcgtgggacttttctgtaccctttggctcagttctccttcatagctggctggttcctccacagagcagggaatgaacggttcctgtatttcacattttgtcatttctgctcccccaaaagggtttcctgtctctaattcagttataaaaataccgtggaaggattccacttgggattggtctggccttggtcatttgtggccgtcccttggactaagcagttataaaaacatggcagcgyttgcctgttggcgttggggaaagaacagtccccagagaggggaaagggcctgccaggcagtttcaggcaggtctctgtccgagtaatagagctggatggttctggacatccgtgggtctttaccgtgggaatctgtgagggccagcctgatgagcaccatgtgctgtgttgtgtgtggattggagaattcatggtgtccttggtggagcgtcagtagctttgattatattctccacaagctctggtttttggaatagacaaagaccatattggatacatcataatttttttttttttttttttggttcatgggtttttatttgggcactgaaagaagataaggaaactaagttttaaagtgatttgagtgactgtgaaatgactttgactgaataggacataataaggcaattacattaaaattaaaattagacattagatgaaattattgagtggaacccagctaccattcattcaagaactagtctcctcaaactatttttttgttctttttaatcttcagaggaaagaaacataccaagcagacatacagaaagtttattagggaagtcgttttatactccttaaaacttgggattataaccagagaacagaatacattttcctctccatttgtcagatactttagagtgaactctaagtatttatacttagtacttagtgttacttagtacttacagttactaaacttcagtactcagaatgatgccccatgtcaggtcagtgatttctatttccagggtatcctgatctgctgtgtctttagataggttgccggcaagaattataataaaccaccaaaatctgccttaagttgattagaaaatacaggcaaccagagtaattaattctgccagcatagccttcgaaatacaaattttggaattgaagggaattggtgcaatttggcaaaaaaggtttgtggttagacagatgaggttcaaatgctaactttggaactgatgggctctttgagcaggtgatttagtcacttgagcctcaattttcacattcttaaaatggagataatgatatgacttcacagggttgagagttaaatgagatactgtgtttaaggcctagcactgtaattagcacatcataaggattcagtaaatgatgcctaaaagtaataaagttcaaatgcagtttggatggtgatatattaaaagaaccagatccctgtttctcaaaatttaaggtgtttatcaatcggggacttttwaaaaaaaaaaaaaagtctgctmaattaggctctgctgctgggtaggtggctcatgcatgtaatcctagtcatgcattgggaggctgaggcaggaggattgcttgaggccaagattttgagaccagcctgggcagcatagcaagaccctgtctctacaaaaaatgtaaaaacatagatgggtatggtggcacacacctgtagcctgaactactcaggaggctgaggtgggaggatcatctgagtccaggaggtccaggctgcagggagccatggttgtacagtgtactgtagcttgggtgacagatggaggctcccactaaatgtgaaacaataaaaattaaaatgcagtgtctaattcagcagatctgttgggagtgctgcctgagactgtgcatttatcatactctcgggtggtactgatgctgcaggtccacaggctacatagcagtagaaggaagaactttaccactaaggattcctcccccagccccaactgtatgtgatgagcccttagaagaatggtggccccatgatagattagagaatttgggagaagaaattgtaggttggaaagggacacaagcaatttagatttaagaatgtggaattgcaggtgatggtggtgggtggatcctgcagttacagtaccatgtaggatgctggaaaggtgtgattggagctcgggagccactagggctgggatagaccattgagacctgcccgtacagaatcggtaagtcagatctccaccggaggagcagggacactggggacacttggctttgagggaaggacagaggaagaagaaacaggaggagaaaacagaggtcggcacaattagatgttcccaagtgcttgaaagtcatggctgtgcttgtggttgattgcgggtggctgtgaaagcttaaagacttaaggagtgaatgagtggaagtagaggcaattcctcttttttggaaggtaagtagaaggaaggtgaaagatgccattttgttaggaatccctggggagtttccttgaatccgtctcttcgtttccattctcacttctgtcactcctaaccagatttgtttccctctttcctagactgatattaaacccccctagcttatttccctgtgtctgcctttatcctcatttcttttcttttttgtactaggaactcctatggcagtccagtgaaggccatagactcctcagaatgaggcttttaaaggaataaatgaaaatacagaggatatgtcctagcaagttcaaggatccttttaattctatccatggaccacttgggagttcatggaaccccatcaagaacccttgcaagaataagatggggatagtgtggggtgagaaagtggggagagcacgcagcagccaggaagaattcttgggggggaacacgcataggctgaattgattacccgcctgggtcacagtgcctagtacttgggattcacaacggtaccgttaaccactgagctgtgctgcctgggccaagctcaggaatcattcatttctttgagttcttttattttcttagtcttaagagctgttcttcttggatggacagagtattagctgttaacatgggagaaaactacttgaaaamcagtttttcccttcatagaaagaaaatcattgttaatgttcagagcatgtagggagagaaccagtacataatttatttaagaaaaatgttgtagggagttttaaaacagtaacttacctaaagctaagcctcacaattctaaatctttatagtttttcagctacctgggcacagtgattaagagctctggagtccttgttcggttggctatgtgaccttgaacaagttattttgcctctcagttccttgattataaaaggaggyaataatggtacctactttggaagtttgttatatggattaaatcaattcatacttgtaagatgcctaaatagttgctggcacatggtaagttcttaatgtgctagctgtcattattactatcctttaaaatagagacagggtcttgctgtattggccaggctggtctcaaacttctgacctcaagcaatcctctcacctcagcctcccaaagtgctggaaatagagccttgagccaccatgcctatcctatttttttttttaatatcttaaatgctaagaggtagcaaattatcagattgtatgctaaatcaatggttactttatcctgttttgtagtagaacatcatcgttgttcttggcatccttgtgtatttttgagttatgaattatcattttagaattacccttgtgcccttgctttgctttctgtatctattttgttatgttctttcttgtatttttcacacttccactagcgattaggttctttgaagtgtcagaaatctaattcacatccattagttgcaagttatgtcagctattgacttgatatttcaccttgtctttaaatatggagacactgcaagatgcttcagatgcaaaatgaatatattgtggaccttgctctcaaattgtgcataactacaggggacacagacgtaaaataaatatatgtgtaaataactacagtgtccagaatgctaggggtggaaggtattaaatagaccgtgcagaacattgagcaaaggcatgacgtcggtgaagggcttagacatgaggcagtttgggagaagagcatttcaggcggaggggtcagctggtgcaaaggccgtgaggctggtgtttgcttggcttgttatggcaactgcaggaaagctggcatggctggagcacagcaagagggggatatagtggtaggagatctgccaaggtgctaaccaggactggatcatgattacttctgcctgggggacttggagaatccttgagaggaggtaacaatgaggaggaccttgaggattagatagaatctcccagctgcagaagatgggtgatatggtttggctgtgtccccactcaaatctaatcttgaattgtacccataatccccaggtgttgtgggtggatcagctggagataattgaatcatgggggcagttttccccatcgtattctcgtgatagttagttctcacgagacctaatgattttaaataaggagcttctccttttgctgggtgttcattcttctgcttgctgctgccatgtgaagaaggatgtgtttgcttccccttctgccatgatcgtaagtttcttgaggtctccccagccctgcagaactgagtcagttaaacctctttcctttataaattacccagtcttgggtatttcttcacagcagcgtgagaacagactaatacaatggggaaaggcatatgcagctgagggtccgacagcgggcaaaaccaagcagagcggagaatgtgagtagttggctttgggtgtggccacagtggcagaacccagtaacatgttagaaatgcagagcttgggcctctgcagacctgctggagcagaatgtacattttaacaagacatgttgatcgtcagcatatttaagtctgagaaacacccatcagggtaaatctttggtttcaagccctgagattccttagatgtgcctcaggggctggtgggagggggccaagctggtgggggaatttaggcctacctcagtttcctccagaacagccttgtttttgtcctcattgtcatctctctgtccttttttttttttttttttttttttttttttttttttaactggggtactgaatataatacgtaaagggggtaaaaaagatcctgcagccaagaaaattgaaaaccacagaggaacataaagggagtgtcaggagatggttgaaagagtagtttgaggccacctttgaagggccaagtggttgatgtttgccagagaaaagccagcagttctgaccagggttactttaaaatttgccacaaatctcaaatgacactcgacccggaagtgttactgcctcctttaatatgttctccactctctgaagtcatttcttccttttcacttctccttgaacttcacctagtgtcctgtcccccacttcccccaccccgtccttccctcagcatataacctcatttagaaagcattgaacaaatagaagccgtcagcttccactcttcccaccatcccatctaaattttggacagctgggtccgtcagtctacagacatgctggaggggctgccctgcctggttttgtagctgctagctatatatggcaatttaaatttcagctaataaaacttaaaattcagtttctcatatcaagtgctcactagccacatgtggttagtggttactggattgaacagtgcagatatagacgattcccaccattgcagtgtcttccactgacatggctcaccattccggggccgcccatcttgaaagcaaaataaactacagtaacagcagaagctctccttcacccttagtctctcattttagtgtcttctcgtgttttctgttccttttttttttttttttttttcagatgaggtcttgctttttggcctgggctggagtgcatggtgcaatcatggctcactgctgcctcaaactcctggtctcaagcagtcctgcttcagactccctaagtgctgggattatacatgtgagctaccacacctgccctgttccttttcatagcaggagtgaaaagccttgtctaaagctgaggtctcctatttctatagagacaccgtacctggcaaccgtcaacttacctgcgatgatctccttaacttaccccaatctagctttcacctccagcacacctaggaaactgctcaagtcagcatcactggcagtgctaacattttcaaatgcagggggctcctttttttttgtctcttgttttccttctgcttcactagccactccttaggtgcaggctcctcttttgctcagtctggaaatgttggaatgccccaggcctgtgtccaggatcatcttctacaattacatttactttacctacatgatttcatttagtctcatggctttttataccattttacagtcatgattgagaaatttttaacttcagctctaactttcctcttgggctctatatgcagtttcttaccaggtatcttcacatgaatacctaatagacatctcagatgtcccaagcaggcctcttgatttcctccctgcactctgccccgtcccctgtcataacttaaactggcctcttcccgtctcagaaaatggaccaccatagacccaggtgctcaagcttaaacgtagggagcaaccttgattatgcttttttctccccactccttctccacatccaatttttgagtcccgaatccacatgctttctatttgaatcttctttctcaggaacactgtggtagcctcctgtttggtctcccggcattcagttttgccctgtttcagtccaccttgtctgcagcagtggcagaggaatcttgctaaactgtagatgatttcatgtcatgtcctcagttaaaccttccaaaggctttacattgcatttagaataaaatccaaaccttttctgacctgcaggatcttactggcctgggccccactttcctccttgccctcatcccataacaccctcytcatgattcctatgttccagctgccctgcgctttttctgttcctaaaggcaagctcagagcagccacagttcttcagtctttatttttctcttcgtcgggaatgtttttccctcttttatttatttatttttttatttgagacaaggtctcgctctgttacctgggctggagtgcagtggcatggtcatagctcactgcagccttgaagtcctgggctcaagcaatcctcctgcctcagcctcctatgtagctgggactacaggtgtgcaccaccatgcctggataatttttataatttttgtaagagatggggggtctcgctgtgttgcccaggctggtcttcaactcttggcctcaagtaatcctcctgcctcagcctccctaggtgctgggattagaggcatgaaccaccatgcccagcctgccctcagatctttggatggttggctcctattagttattttagtctcttagctaaggggttgccttctcagatggcctctctgacctcctaagctaagggagcccctccactatcatactgttattttctctgtgacacttaacactgtttgaaactgagttgtgtacatttttattgcttatctccctcaactagaacaataagtttcatagcaactgagactttttcctatttactaggtgtatccctgcatctagaacagtgtgtttagatagtaggtgctcagtacatattgttgaatgaatgagtggggctgggattctaaaccgtaggccattagttctcaggtggtataccatgaggcctcccatattcaattttcataaacatagaaagttgacttttgttataatcaagcatagagcattttagagcattttgctgagcgggttgtgcagtgygttagagagtggggaaaaacttgctgcaaattggtgataagaggtatggggtaactgcaagccagtgccaaagaaagaggttatgtttacagcagcatgcaagaactgtgtcttgtgaacacgacagaaaaggttcagaaagtaaacaacttctttcaaacagtgtcagatgttgaagggccgccaagtgaactgcgtgaagactatgaatgcatttctaagtaatctgagatattatgttagaagagtgtgctgcagtgttattactgacttgttcttttaatggcttcagacatgcctctaaaaattgtagtattcagaagtgtaccataagttaaatttaagattgcataaacattgtaagaatagggataatgtcagtatctcagtcctttgtgggtctttttctattgtgtattgtttctgctggttcttcttcatggtgccttgttgccatttatgtttggttcattttggctctgagctgctcacttccttggatagtcattcagggaacattcttcaagtcttaagataaagatgtatccttccagagagaattgtttgtttttgccacatggctagggatactggagaccaagaccatttgaaactaaattcacagcttggaattttttggacctcatggtgatataaaattgggctgcagtccctggggtggcatggttttatttttggtagacccattgtagccttatggagaaaaggtttcctattagacttcacaccttgggtgggccctagtctttgtcttctgttcctgtcaacccatgaggccatcaaagcccttagagccaaagtggcttccatgactaacttattcttcctgcttccagttttcactaagatcttgacaggccgacttctctcctccctcttccaactctttcatgccttcaagaagatgtttaagaacatattttattcaggacgcttacttattttcagtgcagagctgacctgaataaccctgtcagcagaaatgcaaatcaacctcaaagtttcaaaagagggaatccaacagtaagtgagacagtgagragccaaagcatggtggcacttctgcagccttccagggatggatctgtgaggggagtcagtgggacaggaggtgggactgcaagaaggaagaatgccattkctgtcttccagaggtgatgggaacctgagcttgggcaggggtaacagacattgttggataaccaggtatagatgtggtagaagctgtgttgtctaagtggcccatagcctaaaaggtttgaagatactgctgtaaacaagcagacaaaggatgtgcttagagagatttcaggtagaatcagctggatttggtgactgttaggtaacaggaaggaatcgacagtgactcacctaggtcattttcttaccattcacactctccattacattattgttatttgggggctgttagcttctggcgggatacccctgcccctcttgccacaactgggattgtacacacagatactgtgagacagaagaggattaataaactgccctgggagagttagtggtaggctcttgaaattcttcaagaattgaattagcgtggtggatggagaagctggagaaaacatgttacaggcagagtaatgcatagaaaagcataaagggtatgtggcatttccagggaactgccaaacccttcttcaggtgcttctatacttctctccttctgattttatggttttattcatttccattcttatggacatgttcttatttaaattacttttgtttgtgtttctgtaggcttggtcatttaggcttagaaacatatttgcaagttgctagacaccctaacattcagagcttagtttatttgtagttgtaataaataagccttgcttttgttttttcagcctggactttgaggaaggtgttaggtattagtcaacccgagaatgacctctgtagcattctacatgacctgcacaaaggctccaggtggtaggggcaggtgggggctgacgtcagtattgccacctgcacaccatagcaaggggctgcattagcgggagacaggcaccctttttgtgagttgtccgcacagaggaggctcattttctgatgtgcacagaggtgcctgtgtgctagcagctgccctggtttgccttgcttttctcgggtcatgcatccaaaatttctcatgtcacgttcccaagcactggtgtctttggaggagcgttcaggtggtgttcagtctggacagaagaaaagaaagtggggtttataaagtccccttatagatttgaatctgctttagaaaatgcaccgttgtgcagtctttgctgctgctacatacatgcttctataatgcagattcacttgtatgagatcggtgctatcgggaatgtggtgtaggatgtatgaattggtccataagcagttttccttgagtatgccactgcctccaagtatcagcagctaggtgcaaagtacactaatacagctcaaggcagcaagccaaattgagaaacaggactgcataccttgctcttgtatccgttttcttcctcctgactccagcaggcttctgctcgatctcagaagtactcatttcagggttctctccaatctctggacattttctcctagtctgtgtaacttagaagcttggttactccttgtattccttccatcaaatgatcctcacctttgtgtttctaaagtccattatatatctattagaaattacactaaaatactgtttatttttctatttttaggatttttatttttaagcattctggtgatagagtttcatagtttttcagtggtctgcctaaaatctggattttagtgtctatgtagaacttagaaatttttcagaaatacatatattgcattacaataaaagtgtttgtatttacaatgtattttgaacaactatatgcccaggctgcaagtttcccaaagaaagatgtaatcgttggtttttttgtttccaaggataaccaggtatagatgtggtagaagctgtgttgtctaagtggcccgtagcctaaaaggtttgaagatactgctctaaacaagcagaacattaatttatttgtcggccctttgagttttcttactaatcctcttctggcctgaccatgtgcccctcccaagtttcgcacattcccaggtatctagtgtgttcagttgtctccctgcgctactcagcagctacctttttcagcattggccctagcttgcttctgtgcccaggaacaggaacagaagttttcttctcaggggtcccctgtctctcttagaccaagtccacaggcttttactacattaggccttggagtacatttcctgtagaatcaaagggccaacttacaaatgaatgtttggaacacaacccattcatraattaggttctgcctgcacccagatggaaagttaaatgctttggcatcagaagaactgttgggaaacagatattgtttctgaaattatgataaatccataaggcactttctttttggcacgttgcgccaaagtaggaggacaggagcaaattttagggacattaaaaaaataggttaggagaagctaatctttttgtctaattcactttctcttgcagttctggcatcggatactcacagatttaacacatgccaatgaatatttgagccaggaaatagccaatagtgaatatttttattatgtgttagataaagcttctttcttcttatgcttatttaggtgaactagaaatatggtttcagtgaaatttaagttctgataagtacagatacatagcatattttctgaaaaatttgaaaaacacacacaaatataaaaaattaccataaccattctatcaagcaaccagtgttaatgttttaatgtttctttccaatgtctttttaaaaaaatctcattgagactattctatgtatttaatcttactatgtattcttaacaattattttaaatttttgatcactgcttaataattaggttggtgcaaaagtaattgtggttgttgccattactttcagtggcaaaaactgctattccttttgcaccaacctaaatagtttaatgaagtttaatagtccaaacattggtcccagtattttgccaccacaaataatgttgctgtcagcatctccctgtatgaaactctttcttatttaggatgatttccttagaagagattctctttttkgggaatttacttggtcaaagggtatgaatattttaaggctcttggtacatgttgccaagttgctttcaaaaagggttataccagattataaccctagcagtgtggctaagagctgctttcccacatcttctgctttcagggttctaaattgaacagcaaagattggaataaaaagatatccttttttcccatatgcttttaacccatttaaatctctttatagagattttcagcagtttgaccaaagatgtacgcacatgggcagtgtgggagtatcaggtctgaggttggaagatggcttccacataggctgcctggcccgagtctgccctctgaaaagagctgctttcaactgacccacttctcccagtttttcttcgtcggactctaagcagagagtgcctgcatcccagaagcaggtcgctgtccactgtctgtggttggttaatttttgctggccatagcccacatgatttatattaaactcaatccaatagcatttaatggcaggcagaattcttcccatgtaagtagactagtcaggaatttgcctttcattatcctcggtctgactgcttaacgttagactcgacctatggacgattcacatgaaccgtttcagaaaatgtaatgtgacatctgctagagtccacaattacagggtgtgtgtgtgtttgtgtgtgtgtgtgtatgtgtgtgtttaattttttaaaaaattttccgagatgcagttttgccctgttacccaggctggagtacagtggtgtgatcatagctcactacagcctcgaattcttgggtacaagtgattctcctgcttcagcctcctgtaatagctgggactatagttgtgtgccaccataccccgctaatttttaaaaacaaatttttgtagagatgggggtcttgctgtgttgcctagtaggatagtcttgaactcctgggctcaagtgatctttctgcctcggcctcctaaagttttgggatttcagacatgagccaccacacccagccttgctttttaaatgttggatgttaccatccctctactgtggtcctgtagtttggcttgaagcttgattctgtgcgctagccactctgtcaagaattatgtagtataaataatgccggtcacttgtgctgacctcacaaacattccgaagcctggcaaggcaggtgtggaagctcagagctttgccatctaactgagtactcaggcttctttccatttagataagacactcagaaaggaaaagcaatgcaattttaatttttacttaacatacaaagtagccttttttttttttttaagctgaaggaaatgaactccagagaacactgaagaaaattgaaggaaaraagtagagctcttagaaagaaaggaaaggtcacgcttataaactgtagccatctagataaactgttatttccactttatgtggatgtattttattgtgacagtgctaactacagttgccaattttcaggaggcctaaattactgactattttagatgaattcaggctttaaaattagccctgggataatatatttcttttaaaatgggaccttaattgatccttattttttaaagcttgaattaagtagaaaattaagggtcttttgtaaaagatgataatatatatttaacttggatgattacctaatagagaattattccttgttctagtattttaaaatattaaatgtttgacacaaaaacagaccattctgaataggctttaggaagtaggtgacttttcagtatgaataaactatatgtaatttttcattaacttcaaaataagaactttaaaaattatggatataaatttttatgccctattttaagaaactaccctttttttcttatgagaaaaatgtctgcaagattgaaaaaagcttccatatagagtaatacattgaatgaaatgagttgttttctacttaatcagagtggccaaaggctatttcaaaacaaatttattcccatttctgaaccttcaaatcaagagaccatttaaggattcatttcaatttggttatttataagaagaaaagactattctgatggcatgtaggatggtcctaaagtaatcggctcagctaaaaacacacttataacagttgggcatgtcagctgaggagagacccttatagcctgtgtttcctacaaaaacaaaaacacagttcttttatgaaagtagacaagttgatggtatatttgggctaaataaaatacaatgttgacatatgttgaaatattctatagttgttacacatgttggctgaggtggttgtactgatccagacacatggctgatactttgagtgggaacatagccagtgtggttttaaaatattatgtccctctgaggagggattacagatgattttttgctttctacttacacctttttataggtttcttasaaaaatattgcgcatgcagtcttcttacaattagggaaaaaacccaagacatgctctaaggtgagatgagtggggggaagaaatctgtatacagtcagccctctgtatccaaggcttctgaatcttcagattcaaccaaccacgggtcgaaaatattaaaggaaaaaaatgaaaaataatataagtaaaagcaccaatacagtaaaacagctacttactgtgaccatacattgtgttaggtacttacacatggactagagatgatatagagtatatgggaggatgtgtgcaggttttatacaaatacaatgttttgtattagggacttgagcatctggggagtgtggtatcctggggagtcctggaaccaatcccccaaagataccaagggaagactgtatattgaattcagtgaggcagaaatgacttgtacattttggtttgtgaaataaaatattctcttcatataggggatttttctctctgtgtagctctcctaggaaatcccttgattaaaagaaatattgattgtactgggagaaacaaataataaatgattctaaaagttgtcactttttgtgagtttgggaaaaacaaggataaactgcagtgatgaccactaatttacctacaggtatccaagtttttattgcatcttagcagtgaaaaaaatcggagcatgtgctctcaatatatgaatttttatttataagttttcctgtgtgtactactgaattattttgtcttatacatagaagttttaaaaggatccactgacggtaaatattagtaactaaaacttgttttgttaaaaattattgatagcgtgaaaaattatcattagtgtgtagtggattttattttttcaaatgaaggttatgtggatgagtttgtatcactgtttttaaaaatggtgaatattttatgataaagcaatttgaaggtctggtcctatattcattttgctatttggttttaatagctcaaaaagttacctacaaagatacacggatccaaatgggtgaagtgcattgttgactgtgctttctaactggtgattctcattttcacactgtccaccagttagataaaaatttttctggtaaatttccatttttgtggatagcagtaagttctcataaaatgtgttccagtttatgttaaggataaagagggttgaaaataaaaaactttttacatttattgaaaattttaaaacagatgagaagtattttataagttctttgtacaaaagatacaaaagcacatctcttttcaaaatactttctgtacagtctgagtttcttttcaaaaaagcagttattttcttgcacttcttaaaacctcatctttaccttgaagggactgattaagtaaggtcattgaaaaaaacatctgccaggtattactgacagccacttgtgatcacagagtaggtcaggaaatttggagcaaattgtatttatgtaagggaaaaatgtgttaatcattcttaaaacaattcttctatgtattttgccacaagagaactggaacacctctgtatggtacaaaacatttttggggtcacgccccacctcattactgaaaggctttgttttttatactacatagatggtagccctacatgaataaattgaacagatgacagagggacccactgccacatcttgagttatttaagtggcatgtgacatctaacctgtggacccaaataagggctgtcagtgttggtaaaagctgcatttcttagcttttaaggtaaaattaagtgtaagtagacattctgacagtttcttcttgcactcagtagattgtcttgcttacccctcgcctatacacatcacttagattttcaggtacagtaaccccttggtatccccaggggattggtactaggatcctgcagacaccaaaatcctcagatgctcaaggccttgcagtcagccctgtggcacccaggggtatgaaaaggtagtccgccgtatccatgggctctgcatccagccagtaatgtatttttgaatcgcctttgctttaatccgagggctccgcatactcagataaggtgtgtaaatgaaggagagagtgactctggacttaacacctcttttatcatgctctcttcatttcttggattccattaaaaaaaatcataacccatcagaaccagatggtagttgtaattttttttttcctaatcccttcatgttatagctgagaaagctgagacagtaaaataaagaaacagtgctcagtgatagagcgaggaccagaattatgtctcccaacgcagcaccaggctgggtgtgtgtgttaaggtcatctgtgggtagtgtgtcgatgactaagctccccagatgggaactagtggagatctgttgatatctgactttctaaaaactaatttctctctcagatctctcggctctgttcttttgtttcttaaacatacggccttgaaatcatctttagtttttgtctttttgctttcttatagacacatgctttgtctagctattactgaaacataaagaatactcataaatagattctcatttcctgagaagttgccttctgagtgaatcaacatgccatgtagaatcactcttggactctttttagtgatgatggtgaaatccttgtatgtattactctccaaaagccttaaaaatgttaacaaagaatacataggtaaaataaagcaaaatgcaatcagctaaaaaaaaaatgaagttgtaaagatggggagagaaaaacacatttaccataaaatttttcacagtcctggttaaggaaattgacattggaacttgaaacttaggtttgaatttcttagcaaccttgacaaatctgtgatctaactatccttgtctaatgggaggacagatactggtttattttcaccccctgattctaaggaaaacttatgaccccaatcgattaaaacaggactaaaattaatggatatgcagaactatttgttattgagtcccatgaaagccaaggcaaaatgggacacacaccaggtatcagagtgaggcagcccagaggtacggctttctcccagcctggctgtaaacagagatcagccttgaataaatgattccttgacgaacattttccagtccagcttggtgaaaaattgagatcactattgagtgcctaaaggacatgttttctgcattgttgactgaaagaagattcctataccatagttaccttggtatgtaggtagtaaagaccttgtaccattgggtcaaatgagaacctcacttgtggtcttgtatgaagggctgttccatctctaagggaaggccgtaagtggggcctggatatttctgagaaaacatttgatggtagtactctattgaagccccaaattctaagctacagagcagaaaagacaacgtctaggaaaagagacaccaagtgcctacccctttcacagaagaatctagctgcagcttctgtaatatgtttatttagaatcacatcccaccctgccctagttctcaaataatctagtgtggattttagacaattttctgttgtctaagacagatccccaacccctactccacagatggaccagtagtggtccatggcctgttaggaactgggccacacagcaggaggtgagcagcgggcaaaggatcaaagcttcatctgtatttacagccgctccccattgctcacattaccgcctgagctctgcctcctgtcagatcagcagcagcattagattctcataggagcgcaaaccctattgtgaactgcacacgtgagcaatctaggttactcactccttatgaaaatctaatacctgatgatctgtcactgtctcccatcacccccagatgggaccatctagttgcaggaaaacaagctcagggctcccactgattctatatattattgagttgtataattatctcattatgtattacagtgtaataatagaaattaagtgcacaataaaggtaatggtcttgagtcatcccaaaaccatccccacaccaccccagtccctggaaaaattgtcttccacaaaaccagtccctggtgcctgaaaggttggggactgctagtctataagatggttttctattgcacagtccagactgacaatgacaaggaatttagaatctcagctattgttctatttccagcagctcttcctattgattaactatgagaaacatatttttaagaaggcttatttttgggaagttagagttgtgttgtttgaggtgtgctcctgaaagctgtttactcaaaccttyatgggtcaagttttgtgctgggagcagggtttcccttgtagtgaggagcttacacctggaaacatagcaaatgacgcaatgggagagccacctcactgtggaatcaggtagggcatacatacagaaatgaattttaaatgttaaagtatttctattttacacaaatgatcatgtgaggacttagattttatgataaaaagtaaggaataaaatttgaaaaagctttataagaacttctggaaaacaaaagcaaaaacaagtctccctggtataaagatgcatatgcagtggaaggaaatgtactggggtggcaatcgagcatcctgggaggaggagaaggggcaagagtcagaataaacatagggctctgtcatgtataggtctgaagaaaagagggccggtatatggatgagcatttcgggccttttaactacagagctggaagataatgcaggttcccaggaggtaggatgacaaggacaaaggagggcaggcctgaactattcaggggacgagctctgggctgttctgaatcgcagatgccatcctgaattgcatttgtgtcaaataggctgcagtggttcatgcatacctttgcttctgtttggcacacaccgtctgaacctcaggcatttcttaagactttaccaaaaccattcagttttcttattgtaaaatcgagacaccaccacctcttctgtctcccttagggggttacgtgggggaccaaatccttttttctaccctggagcaagtgccagcacagggaggtggtagaaatgtttgctcaggtgcccacagccaattgatgccccactgctcttgtgtttgtattgaatccctttgttaatttttttcttgtttagaggaaatacatatggtgattttgcaatcaatgcagcattgcataataattaaagggctagccttggggccagactatttcagattctagccctcccatttgccttgcatgattacttatctcaagctcagttttctcttctgtaaaacggttatttcttaccatgctattaagaggacagaatgaggtaaggatgacccaaatgtcagtccatgtgcactcattgaatcttagggtttttcctccccttctttggtatttgtgctctttgaagaaaagagcacatatctcctcttgaaagaggagatatgttgggtttttgttactctcttccacaagaggagatgtaaaaacttttcaaaattttatttagtatttcagcttgtggaaaacacattaagatggcaaataatcttaaaataaattagtggagttaatgatttccaagtagggggaaccctaatgatttaaatatgtcccgatgctgtattaacttacagagtgtagcatagtgcctgagttcagatttaggagcctactggctggactcagcacttattagctgtgtgaccttgggcaagtgaattaatctctctgtacctcagttttattatttatacaacgtgggtagtattagcacctagattttgggattgttcccccaacctctactccaaaatagggtttttttgaggtttaaatgagttaatatacattaaacccttagaaccatgcctggccctgtttgctgttatttattattgttatgatgctgctgctgtagtgtgaataaagtcaagagtaatttaagttttgagaaatacttaattataataaaatgtctttggacaagcagttataaggatttttttttccccctgcagggctcaagtgtttgaaaagagtaagtacattccagccttattcagtgatgtccttacagggaccttgcttttgtgcatcagtcttttgtgacatgaaaatgttgctaaagaaaaacttgagcagttggtaaagacatcgcaaggtgttgtggcaacaaccatcagtttgcagtgattatgctatggttggttgttctcatatgtttccactttctttgcagtaatacctgtatgcattatttacaattccaaattgaagccatccattcctttactgtcatgcaccttgaaatctgtktacagtcatccctcagtatctgtgagggattggtttcaggaccactccccataccaaaatcctgaagatgctcaagtccctgatacaaaatggcatgatgtttgcatttatactgtgcacatcctcctgcatgctttaaattctgtctctagattatagtacttaatacaatgtaagtgctatgtacatagttgccatactgtgttgtttagggaataatggcacgaaaaaaagtctgtacatgttcagtatagctgcaaccatggtaggcctagttacattttccatcggatgcggaacctgaaaatatggaggacctgttgtgtgggcttcatctaggtgattaatgacatagcagagcagtgtttttttgttgttgttttttaaaaatatttttcaatgtacaggcctttattaactgagtgctcagaagtaagctcagtgtgtgtcacaagcatggagatgggggattgctcccaaggagaagagagggggtgaggggcagcttggggagtgaggaggggaggaaggacagtgggaccagggctagtcccccacctccgacaccctagctcctgaagrgttccaccagacccacccttgtgctcctcgaagaaaaatctgctaaggaagaagaaaaagataggttagtgtttttaatgtgacagacaaatgaatctttaagtgattccttgcatgaatctaattcttgatgatagccaattatttgagatgggtgataaattataacaagcccagaccttttacccttggctctgggtatgcatatatgtaaggaacttaatggtaataggaacaccccgttatccagtctaataataaaccactaattgtaccagataaaaaatattatgaactgaagacctaatattgttgaaatgtcacaacttctgtgagtaaaacatttcagctgggcacggtggctcatgcctataatctcagcactttgggagtctgaggtaggaggatcactttagcccaggagttcaagaccagcctaggcaacgtagcaggaccccatctctatgaaaaataaaaaaattaaccaggcatggtggtgagtgcctgtagtctcagctactcgggaggctgaggtgggaggatgacttgagcccaggaggtcaaggctgcagtgagccaagatggtgtcagtgtactccagcctgggcgacagaggaagaccctgtcttaatcagtcaatcagtatttcatgcttttagatactttgtggttttcccaccagatactgtcactactatcaaagaaccacgtaaggaaattctgtaaatggttcttaactttgtgccagacacctgagaatgtgcgcaggtttattagctatagtccttcatcttgagtctgtatagaatcctgtcctctcctgatactgtacgtaagttactcagtgttaccagttttcttttttcttcatgtcgctttcttactgtattcagaaaattttcttctttaaaaatatttcagattattgtcactttggtggaccctttactcgtctctaataaaatgtgaactgaatacattttcaggtgagatgtttcagttcatgctgtggggtctcctgtctgtgtgaagatttgacctatggtgtactttctcttcattttttcccctatttctttttctaaaattaattttactctgtatatttgaggtttacaacatgatgctatgggattcacagagataatagtgactatagtgaagcaaattcatctatcaatgatctcgcacaaagtaggccctttgtatctgcatgttccgcatttgcagatcccaccaaccacagatcgaaaatacttgggagaaaaacaaataataatgtaacaatgagaataatacagattttttaaaaatgcaatataactattcacatagcatttactttatatttgggattatagaaatgatatagagtatccaggaggatgtgtgcagattatatgcaaagctgcgtcattttgtatcagggacttgatcgttgcggattttggtgtcctgagggattcctgcaaccggttgtccactgatctcaaaggatgatggtagttaatttgtgtgtgtgtttgcatgtgtatgcgtgtgtgtgtgtgtgtgtctgctttcgtaacgagtaactaaaacctatttatttaacaaaaatccccaatacagttttatgaactctaggcctcatgttaatacatgaggtctacattagacctctaaacttgttcatcctctgtatctgctattttgtatcttttgacctccatctcttcatttgggcctccctccacctcggctctgataaccattgtttgattaaatgcatacctgacctttttaaaaagagtccacatataaaatcatgcaacatttttctctctgtgcctggcgtatttcacttaacataatgtcctccaggtcacttcgtgttgtggcaaatggcagggtctcaggaagggtttctctttcatctgaggtcgacatttccttcatcctttttttttttttttaatctgacttattcttgcctacttgaattgcagattagtatagtgtcacatagcatgccgcatcatgagcatatcagaatatcacatttaatgtataagaacttaatccagtaaaacaaataaggtctcatttgctatttacgagtgagcatgtatgtgctaagtaactgtggagcaggagacagaatgtgcgcgttcttcagctgcggaatacctctcataacagacggccctaaatgcgcttctggcgtctccagacatgaaaaattcaaatggtctaatttagctgcgtcagcgtgagaaatttaaaatgttgaaatgttacctactttgtaccatactctactttattcctagattaaagaaaaaaatagaggctgggcacggtggctcacacctataatcccattcctttgggagacaaaggtgggaggattgctagaagtcaggagtttgagaccagcctgggcaacaaagcaagacctcgtttctactaaaaaaaaatttttttaactaattagttggtgtatgcctgtggtcycagtactcaggaggctgaggtggaacttaagcccaggagttcaaggctgcattgagctttgattgcaacactgcactccagcttgggcaacagagtaaaaccccatctcttaattaaaaaataaaaatccaataagaagaaaatagagcttgctttcttcaattattgagtgacttctcaacctagtataactaacaggaagaaaagtctttttgatgcctactgatgtcagttttcagaaccctgaaaggaatccaggggtttaaagtcccctctctcaaatggtttgtggggtttagttaagacgtaatttgtggaatctattgggagattacatttccttcaggagagaagaacaactatctaggagttcaagttgtccaaggatttggccaactgcctttgggaataatgagtttcctgttcctgaaattatccgaaatgtgccggttcagcatgtttccaagttgttttccacagtgatagacaggatggataaacactcaaaagcacagcagactcccatgggcactgtcggaagtttgcagcaatcttgacacgcccagtattactcgatccctgcctcacttaaggcgaatattggaatgagagggagaggatggcgtggcattgaatctactcacattcatatataaaaagtaaattagagaactgtaattgttattaaattacaaacaacaaaataggtaactgagtattgcagtcaccagtgtgaatgactggaggtgttgtctgctgacctcatggcctgccattgctgtgaggggcatggcaccagacgagtgataggactaggtagcttttctctttctccctccctgccccgccgccacccccacttcttctcttctgttgtctctttttttctgagacagtatctgtcacccaggctggaatgcagtggtgggatcatagcttaccacagcctcaatctcctgggctcaagggatcctcctgcatcagccttagcccccctgggtagctgagactaaaggcacatgccaccatgcccagcgaatttttaaagtttttgtttgtttgtttgttttttatagaaaatgggtgtcactttgttgatcaggcctgtcttgaactcctggcatcaagtgatcctcctgcctcagcctcccaaagagctgggatcacaggtgcaagccactgtgcccaacccttttcactttcttaaccctgagattttgattctgtcatgaccaaaatttcacaaggaaaattgtcttaatgattcgcctctcttctgaaattttttagtattatgattcattaatagtatgacttgatgctaaatgtccaaaacattgtttaataaaatcagttgaagagtatacactgggactcttaaactccttttaaaaattatctggatataatctcttatgctgtgtaattataagttgtacttcttatctcataactttaaatactcaattcaagcagaaccattttcagaatcaaagtcctattgaaaatgtaaacattagacttcttgaaaaaatatatacatggcagatctactgtggttgaaattaaatgacaagagtgtcaccagtaatgcggtttctgttattgcacgggttccacaggtgtaaaaataacccttactagcaccctgttttactagctggacacttgccgaaatggtcaggaacacaaaagtgaagcagctgtgtatcggacagctgtggacaagatgtccataagcagtgctataaggacccaccaaagcacaacttcagatgacttggcagggcggtgacatgctgggaagcaacagtcatgggctgtgcattttcacagaagtgttcaaggaactccagggtaatttacaaatggccactttgccatatgcctgagacactggaaagatttttagtgggtggcatcctatagaccagggattgttttgatgccagggagctcgagctgatactggacattggaaggtgtgtcaggttttctgatagacaaattatgtttcactaatagaatgttttgtttgaggtagggaatatttttaagaggacaaggaaagccaataggtatatttttaaaaattatgaacatatatgtataagaaacagtataatgaaacaagcgcattacaaagaataatgataaaacacattgtgtgttagcttttggcagaaggaatataagcttaaaagttttttaaacaactttctttggcaaaagaagtagaggcagtggcaatcaaagaaaaaataagggattcagacaaagcgtacctagtattaactgttagtaccacagatactaatgctggtttttaattaaaacgacccaatcagtaatgtctttgagattgcctaaatttacattttgctctcaagtatttttaagtcataaaacagcaagscagtggggaaaataaactgaaagatggtttgccacaggcctgaaactgtgagtggggaagttggcatactaaaytgtaatacagacagatgtgaggtaatgcatttaagggggggaaaaagactacattctacacacaaagtaatgggctccaggcttcttgtgagtatttcagataggaatcattcagtttctaatgggtatttggccgatrtggtgcttattgtagccaggaacgttccgggcaaggaagcgctgggcgattccaggagagatataaagaaaatatttcaagatctgacacactttgaattgtgtgtgtgtgtgtgtgtgtgtgtgtgtgtgtgtgtgtgaactgcttggtaggaaagctacaagagagactgggaaaggctaagggaggggcgactgaaagaggtaccaaaccatgagaagaaattacagkcaggagggacgctgcagtctggaaagatgaagctgtgattaaaaaccatgataaacacgtgctcaacagacttctttatcaaaccctgcagaagggaacagaagaaagcagttgctgcttgagggggaaagttaatggaagaagaaaataacttgttttcgacagttgacaaagcagtttcacctttgtcatctcacctgacctgtacccagcactgaggagaaggctggggacaagtcattattcacatttgacagatgagcaaacagatcagagtaagtgactcggctaagtccacactgtcagctctgcggtcaggatcaaacctggctctgactcaggtccccttgcacttggcccacctctgagttgcgaaaacttggggtctgtaccacagcatggaagacttaggatcactgtgaaaaactgtgacttaagatcacagtgaaaaacggcaaatgcaaatactgttaaagccttgactcggtggtatgagcagaactcrtaagagttgagtcagagagcagtccaggtgtcttcagctcagatagctgcccttgctagagaggctgctggttgaacagtaatttatcagcttgatccaacataaagtttcttcatttttatttatactgtactgtcgtgtcagctgtttttgttgttgttgttgttgttgttgtttttctttttcttttctttttggcttcagaaatggcctcagctacgcaaaaatraagaaggatctgaaagatcagtcttgttgtaaagaagacagcaggtgacatggtagatgaccgcacattgttcattcccaaggtcatgggtagtgccaggattttcagacgcaaatgatgcatatgtaaagatgactggaccatctgtgtctcttcagatcctgttgcaattaccaagtgttcccagcaagggttaatgtggtgtgtgaacctgactaacctcaggttctagttctccctccctgagtagagagtctaggagccaagttcagactggctcagtctggaggaattcacaagtgaggcaggtttaatggaagaacagatactctgaggttttggagggcctgtgatgtgcttgtcagcgggttcctgcttctgccacccccaccacggagcaccaaccatgtggtttgttctttgtgtactttgttagctaaactctcaagtgtcaagttgatggcactttttttttmggttcatggacactgttactgtccaataatttgtaagtcagcaatgctttgttttatcagtaaaataaaacactatattaggaatagcatgatcagaacagggtggtttcctaatttttagattgctggccttttctagaaaataaaggcaaggtgtgcatacttgaggtttgagggctaccattgcctcctggcagaggaaatgagtaggcctgatagttgctaggttaaaaagaaacagtagttgaaatactgagaaaagtttaatgaaaagtaactttggctcttaagtagaacagtttgaggacagtgaaaaattcagtagctaagggttgtgtgctctctacacagggatggtgtgtggatttgtggataaggtatgcaacagagtactcctctttgagcatttttatatcttgaattaactatagcacaggagttggcagactatggcttgtgggccagatctggcccgctgcttgtttttgtgtggccacgaactaaggatagtttttacgtatgtacaaaaaaaaaaatggttttctaaaaaagtatttcataatgtgaaaattctatgaaattcaaatttcagtgtctgtagataagtttgattggaacagagccacactcatttgtttgccagtttgtagctgctcaaacagcagaggtgagtcattgtgacagagactgtgtggcccgcagagcctagaattatttactgtctaacccttgcagggaaagttagtcagtttctgctacagtaaaatattgctggtagctgaaattaggagttttcacctcttttcctgcgttttattttttaattttaatttaattttatttattttatttttttttagaaatagggtcttgctctgtcacacaggctagagtacagtggcgccatcatggctcaatgcagcctctaccccccaggctcaaggcatcctcctacctcagcctcttgagtatgtgggaccacaggtgcatgccaccacacctggctaatttttaaaattttttgaagagacaaggtctcactgtgttgccaaggctggtctcaaactctgaaacttaaacagtcctcctgcctgggcctctcaaggtgatgggattacaggcatgagccactgtgtctggctgagaagccaggtcttgagaagccaggtggctcagaaggcctagctgacagtgtaggggagacagaggtcccctccaacctccctttagctcttagtgggctcttcagctggatctagaagtcaggttgacatcaggcagattaataggagaaaggaatacaaattttcttagtgttacttgcacctgggaatctttaaaagagtgaaatccaaaggaattggccaaagcaagacacttttatgctgagaacgatacatttgagaagaaatgacaagaaaaaatctggggcagtacatttctaggggagtcactgggaggatacatggggagtataaaacaggtagaagataagggctacttccagaaatttccttattcaggttagttgcatcttccaaaccctagtctctgggataagggctattttctcgcctgaataggtgaggggcccctcccaaaggaatctttgtggcttgctacatgcaggaagacccaggtcacctggcttgttggggtcaagttggaatctacaactttttcagtgttttcagctcacactaatcaatataaaaatccggcatattttgggatggcatgtccttcactctttgaacaacatcaccaagacctcaatacatgtgtagggtcaccttggatcaccagccctcgctgagctgtcgcaggaacacaatgttgagcctccttgagttcttgacccatgtcattatgagccaataaaatggcagtggttttaagccatgaagttttggggtgttttttacgcagtgttacttaactgaaaaggactagggatgatgtatgctagcctttttattgtcattcatgacagagggaaaataccctctcatccaggatgttagtaaagaatgtagttaaatccttctgccacttgagttcctggtacgtgtggctcatctaagacattaaatgctatttttatgattataaaaacaatgcatgcttattggagaagatttagaaaaggatagaaaattctaaagcacaatatttaaattactcataattcggccatctaaagataatcacgattaataccagccttttctttaaaaatatattcttgttttataaaatttatttatagttttgtactctgctttattcgtgtagtaaacaagcatatttcaaaaacataatttttaatgaccacagcagcccatttaagtggatttaaaaatccacataattcaaaagtagtgcatggtcttcattttttgtttctaggtttgctagagtatttttttttaaaggaatcctttttaaagacagctttattgagatataattcacatatgatataaagtgtacaattcaaataccatttagaatatgcaattcattgctttttagtatatttactaaaatgtatatatttttatatactatttaaatataggggttgtataaccattctcaatctaatcttagaacattttcatcctctctaaaagaaacctaaaccttatttcccccaacccctacccccagccctaggcaaccactaatctgcttcctgtctctgtagatttgtatgtgggcttttgtgactggctttgttcatttggcataaggtttccaaggttcatccacattgtaccttgtaacaatacttaattcctttttatgggggtcaaggcatattctattgtgtggatagaccacattttgtttatcctttcacccattaatggacctttggattgtgttcatgttttggctattacgaataatgctgctatgaacatttgtgtagaagtttttgtgtggacccatgtttttatttttcctgggtacatacctagtagtgaaattgttgggttatatggtacctctgtgtttaattttctgaggaatggccaaagcaactgtataattttacattcttactagcaatgtatgaagtttctaatttcactgcatccatgccaatacttgatattgtctgtccttcttcttatagccatcctagtaggtatgaaagagtagtatctcattgtggttttgattcacrtgttccaaaggactgatgatattgaggaggtatccatatacttattggccatttttgtatcttctggagaaatagctattcagatattttgcccattttttaattaggttgtctttttattgaattgtaagagttctgtatatattttgagtaaaagtcacttgtcagatttgcaaatattttctctcattttattagttttcttttcactttgatagtattgtttgcagcattaggtgtaaattttgatatagtccacttcctctagtttgttgcttctgccgttggtgtcacatccaagaaaccattgcctaacacaagtcacaaagattttagagaattttttaaatgttattttattcatttatcttacactttatagctcattctgctgtatttttaaaaaggcagatccttcaaggacaatacatagggaacacattctttttcatagctgtctaatactctaggtataagtagaccttaatgtattcaaccatttcctattgatagacataacctatttccagttttttgggttttgccacaaataagactgcaaaactgtgtacatttattattttgttctggtgtctttattcctaaaggatacattacctagggcggaatgggaagcttccttcggaatctaagtaccaagatttgtctgacattagaatttgagcactccagtctgctggctaggaaaaaaataggaatctgctggagaagagttttcatcacagcaaactcatttcataaagctgggttgccttcacattctgttgctctttcaacagcttatttttatttatttatttatttattttttactgtcttcaaggaagtaaaacagacttttccccatagaacgacaaaggaaagaaatgcagaaaggtttgggaaatagccactaagaaaagtatgccggtgttcattctcagtcttgtatttggagtgtgtgtgtatgtatgtgtgttctctttatcatgcactgctaaaaagaattcagggaccacatgaagacacgcacatgtgtggtgccgtatctgctggtgtatgaacctaatgggatcaccgagaaagtggaaccctcctggctctgctctggtccctggtatctcatttctgttgttgaaaggggggttggcaggggtaacactgagaagacaattgtgacaaaatagagattttttttttaaagtccagcaattaaaattgaacataatttttatatcattcattcctcatggtttaaaaggagtgaaaaatgtacaggagctttaactgatgtctgctctgtaaaatctgtgttaatgtgattaatggtcagctattcatttagaggagccaaagtagcagatgagtgttttcgtatttttagattctttttaagagcccttagtggcctattatatcgactcttccttagaccacacgcagcctccctttagcaaatctccgaattgttactttcatttaaacttcagctagaaggccactttaggaccttactgactgattgagatgctagattatattttagctgcatcttagaaacattttctgatggtttgaagaatctgtgttactgcttgccatgaactaagtaagctaagtgaatagtttgtaggaaactgacaagtggaagtggttttgaggatttatttttttcttgtacctttttattgagggaaacttaaaacatttcaaaagtagagggaatacgcatgaacccatcactcagtttccacattcatcctctcagagctcattctgtttcatcattctgcaggatcccacatgcagccacgagccacgtgtggctgctgaatgcttgccttgtggctatctgcagggagttgtgccccagtgtaaaatgcagcctgagagcctgttccagcagcctactccctcttggggtctcctcataactaagcagaccctcgcgctagccctatctctgtgtaagcccctcctttctttcctttaaaacactttgaaagtgccactgtttaattatttggcgtgcccattaagtctcagtctgattccctatgataatacagtctccagaaggggtagggcctggtgtggaatcggtgcccggagtgcacccagtgaatgagcacaccccagtaggaattctcaaccccagctgggcccaataccttctttgccaggtgatgcaaacatgtacatgcaaaacatgtacatggtaacctcctttaataacttgatatgaaattcacagatgatagctcttaaaaaatgaatataatgtcctaagtataacaggaaagagaaatataaggaaagtaatttgcaataaaatcatgctttttcttctcctatttctagtattggtggcacagattgtaccagactaacctactagcaggtaataaatattgtaagcctcttaggcaaaacagcatctcccagtattcagctcttgccatccctctgagctaagcctttctcccctgtggcacttagtactgagtgacattctggttttttaattgttggcttcctcctctgctaagaagctccatgagggaaaggaatgttttctgtttcattcagctctgtatcctcagcacccagaacagtgcctggactatagcagttgcccagttaagcagatgtaccttttacttcttgttctctgattcatcagcaggaagagcctatgaaaggtctcccttatcagcccatcactgagccagatattccctctggttagtctcttgcccttgttcctctctgctggatgagatgatgtagcagctgaagactctccacctataactgtatcgtgccacattcagatttttagaatgcccctcttgatctggccatatctacattaaatgctattttcttcaagcagtgagacaaagctgagagacgataggtttaaagattggttacaaattctgatgaagactggtccttgaagtctttgggctgttacatggccctttggaagcaataggtcatcactgtgaacaacttctgtaggtactggtttccatacgaagggaatacatcttgatgactttacatgaagtcttaactttatttgctgtttaatgtaagttggtcaagggtcttattgagcagaagaaacttgggaaatgaaagcactgttactgggaccacagtttttgagcctctgctgtcaatggaaacagacacttcaaaaatgctctccacggaggctcagagagatgaaaagacaggaaaaggagccgaaaagatgaaaagacaggaaagaaaagacaaaaaggaaaaggagctccatgtgccatcatggagcacagggacaaagaaatggcaacagtgtgtctgtttccctgttaatggttgttgagaaatactagccacagtttccaaagtatttaaggaataggaaatgtgcaataaattatgtgatttttttgtggatcagtttccttcttccaagtcgggaaatgtcagagaaacactgtgttgttcaaggatgacagccaggaactagtcaggcttcagcacctcctgccattgacsctcttctctgagcattatgtagagtggatgtgagggctcattcatggactgtgtcaggagaattgtactacattgatcatttaagggaaccattctgcttgttcaggagagtcttttcattacttataatggcttgtttattgacatttcttatttactgtttctcctcaacagtgtttttgtttgtttgttttttgagacggagtctcactctgttgctcacgctggagtgcagtggtgcaatcttggctcactgactgcaacctccacctcccgggttcaagcgattctcctgcctcagcctcctgagtagctgggattacaggcacacgacaccatgttcggctaatttttgtatttttagtagagatggggtttcaccatgttggtcaggctggtctcaaactcctgatttcgtgatctgcccacctcggcctcccaaagtgctgggattacaggtgtgagccaccgtgcctggcttctcctcaacaatgttctaagagataaagcaaaagtatcaggtaatatgtcattgtaatggtacctgggatagaagaatttcatttgcttgctactatctccactcttacatgaatacaaatgttcccaatttttagtcaatgtaccaatcaacattgaatgaatgatatgtaaattacaagaatgaagggccagaaagatgtcacgtatcagtgatgactgttctgagctgtgccctcttaaagcaataaagtaagttctctttgattaatagttacgttggctaccttttagctgcccatgaaaaatatagatggacttttttttgttttttaaagacagaatcctacggtcttgttttgttgcccaagctggagtacagtggcatgatgatagctcactgcagcctcaaactcctgggcttaagcaatcttcctgcctcagcctgctgagtagctacgaccataggcacaccaccactcctggctgggttttatttatttatttatttatttatttattttttggtagagactgagtcttgcaatattgcctggactggtcctgaaatcttggcctcaagcatcctcccacgtttagcctcccaaagtgctgggattacaggcatgaatcactgtgcctggctggaaatttcttagtaaaacaaaattcgttagtggttcaaatatattttcagtgctataaagaatataacatttctacctattgtcagctaaagctaagagttaaagaactacacctaacatagtgactggcataaagtagatgtacaataagtatttgctgaatgtgtaactggatggctggaattaactttgagtaggagaaacagctggtctggtcttcyttttttttttttttttttttttgctcccaagtgtcttgtctcttgtctcttctctgatcaccacagcatggttcttaggagtcacagtgtctggtatatacggaaagagtgtttttggagggagaattcaccaaaagaacatgatacaagccaaaaggggttattattagagaagaacagtgttgatatgaaggctagttaatgctttgtgaatacccaccatgcacaagacagtgtctgctggttgctggaagtccaagatgatcagtttgtgtccctgtggctaaatgtttggttgttagtctgcatgaaatagatatgacaccaaattagaaataggagaaagcagcagaagaaaagcaaaggttctgtgtataaccaagacaatggggttaaaaaaacacacacacattgctgaagaaagtaagttaagtaagttgagctttcatttgcaaaatgactttttatttggctgtaatattcctctgggatggctctgtgaattcagtaaaacaaagctaaagaaaaacctattctgtttgagggaccgtataattaaccatagaaatgagtgccatccagtgtattactgaagaaaaaggattaaatagtggtatgaataaaaatagtatccctttttattctctctaggctaaaattataaggactgtcagtcattttgttaagggtctagtttattattggctgtgttgggaatagtgctttctatcttcctattatgtaatagtccacaattacatgaatagtgggatttttattttttttattttttattttttttcctcagaagagcctggtgttgaggggctgcaggagcagaacaggaagttatggttgttttggaattgtgtgtggtgtatgtttaaattgtattagaataatttttattctttttaaactgtctttctggttgtctcatgctactttgagtttaatataccctgggcttgatgcaagaccccgggccagggcyagagcacctggttctagttctaggtctacctttgactgttgtggtcattttaattaattcatgcatacatatttattgcattttcctgcactgagtcctgcgcatacaaaaatgaataaaacccagttccttcctgtaaggaatcagtttagttggaggatcacagagataagcataattataagacagcttagagatgtatatggagtattttgtgatgtaagggaaggaacccaaaccatccttggcaggaagtaatgggaaagacttcctggaggaggtgatgcctgaattaggtagaagtcataaccatggggatcaggggctttgtagggcattctggctagaggttatcaaatagcaaggcagatagaccccaagtgtgttcagagcactcacctgtccaggaagtggccctggacagggagacaggaaatgaggctgcaggaatgagagagatcactggatctccgtttccttacctagaagtgaagctctgttaatactagaaggcttctcaggaactcactcattttctggaaagctttcatattgctgcttgttggagaatgacatgttaacctgctgctcacctttttaggaygttgagggctgggtattaactgtcttgagtttggcagtattttgaagaaggacatcctaaattacggttggtgtgactcatgtgagttatcagatttgtatctgttggtctttttctctgcgtctgtctggttgtccaggcgtttgtgcttctccaccccttcttaataggcccttctggaattgatctctgcatccatctcctctggacgtaaatattcatttctcttttctctgacccttcaccagctcccatgccctttgtgtgcagatgccccacagatctggctgggttttccctatccctgtatatattcacaagtacacctgtgacattcaagtattgtaatttaaaaatcagcattagcaagaaatatgcacatatcagaaactgaagtgggcgtgttatccagattaaatcactatagacaaatctctttatccatttttttaattctttggaagtggttatgaaggtgtgaatagttcattgttcaaggacagtgcattggattctgttttttaatctcatccgcctccaacaatccccccccacactgtccccccgacccagagctgtcagggcagccagagggaaccttgttttcaggatgctgatgctgatatattattcatgatgtagcggcattaaatgtgttagatagctggcctcctttttttcatttaacaataactgcctattgtacatcggtctttttctgtagtaggataagaattacaaagagtctttggaggaagaaccagtgcttcaggttatgatataccttatattgtttttgttgttaggggctatatgtaaaatatagctgcatatttgtctaatagctttgacttagactgaaacattggttgccaaaaacaaattatttcacattaacaaatattatattattagttattttaataatttattcctctcagtgggtgctagtccagacattttttgtgtttcttagtggtaatgggcctgtctacttcatgaaagaacaacagcgtctctgcatttcgctagaaaaatattcttggaggagagtcctagaccacgtgtgtgtgtgtgtgtgtgtgtgtgtgtgtattttccaagtaaatcagaaaattcaggcaattaatagtgaaaactgtcttctcagtaaccttttcttcaagtcttaacataaatgacatttctttgagagggccccctagatctggttgtacccctttgcctcccagcatcctgtgttctcttacaatgcccctaatgactcgcacagcctcggagctccatgtggcccatgtggcaggacccaggtgggcagtcttgtttatcgcagtgccaggcatcaggctgccaccttccagcgacctaccctaggagtgtgattctgaggattcagtgaaacggtttaggcaaactcctcggagcagtggctgaccagagcaagtcattaataagtgccagctctttttaaaaattcatcaggtgtactctctccacccagaagagactagtagtttaggcttaccaggtctttcttcccacttctttctctgcattgttatttattcayatttctttctataatggtttattgccaaaggcagtcaatagtatgttgaattagctatttctataatattttagactgatatatgtgtgtgtatatataaatatatgtaaaggtatatatatatgtgtggacgtgggtgtgtgaattatatgtatataatatatgttcgctttccctggcttttcactaagaaacatgaggatttaccacagtgtctcttgggtactcagtgaagggaaaggcatttacatcatagccagtagttactggatgcccgatgggatgatgccaatatgatgactgcttctctgctctttcttctctgagccaatttattccaggaactttgtgctcactgcagctgtgactataattgcaatcaaattatagtttctagtgtcacacttacatttgccgttttttaaaaaaagctagaattacgttactgtccatagcaggaatttttagtgcaaagagataatcaagtgtttgtaatgattcatatcaactggttgtaatatgtgaaaaggctacagtatttttaaatatttctagggtgtgtggtgaactgtttttgaatactatggagaaatatataagtttttactaaattagctttaaaattatgtaaataacatattatggaaaatgcagacgatatgggtgagacaaaatttttgaaattactattattaattgcactattagcccctggaatcgattttgatgccctgtacgtatgcaataaagaattgccgagtaagagggtgaataaatgaacccctgtctttgtagtgaacaccccatagaaggaaggtcacagctgtttgcatatggaagaagtttgtcagtcaggtggaccttaaggagtgtgttggctatcatactgttttgtttttggttttgttttttgcccaggctggagtacagtggtgccataacggctcactgcagcctcaacttcctgggctcaagcgatcctcccacctcagcctcccaagtaggtgggactacaggggcgcaccaccatgcctgactaatttttgtagtttttgtagagatgggatttcaccatgttgcccaggctagtcttaaacttctgggctcaagtgaccctcctgcattggcctcccaaagttctgggattacaggcttgagccacaacacctggcctgtcatactttttagttgtcagaatgagttgtaaattacatgtggtatgattattaagactgcaattaatggaagcactaagaaacacaataggtcatggtagcctggggctctaatttatgtatgcatcatgctgaggtcccataatgtccagatgaggtgctctgcttctagtggctggcccagcctggctttctgtaatcatggtcagcttgtgaactaacaggtcatagtcattcattttcactgagattctgcaaataaacaaatatgcagactagaaatcagaaagacattcatattttttgctagcaaaaaacggttggtaaaaaagtgattgcacaaagtcttccaagctccactgccccattgcctgcacctggaacttggcaagtcgcagaccgtctgtatcctgcatccgtggtgtcctctgagtgtgcatggcctctccagtgggcacgcccgcaataaacccggtgtccatagcctcagctgcrttaccctacagggtttgctgtcttgactctgtggagaggacttagtggggagaagtgctccttttccttctttctttcatagcttggtttttgcttctgacagttttgttgttttttgtttgtttgtttttgtttttttcatttatgcatagtcatgtgttgcttaatgatagggatatgttctgagaaatgtgttgttaggcgattacgttgttgtgtgaacattacagagtgtactcacatgaccctaggtggtgttgcctgccccacacctataatcttatggcaccaccgtcgtgtataggctgtgtccttgactgcagtgtcgttatgcggctcataactatacatacctttccttctttccttttttgatcttcggtctcttctaatttcctttttactcattctctttgtgagccaaaaatctcccctcattatagttgcaaagcatatggctagtactgtgacacttccctatcaaaggatttcagagccacattatttttgaagcaaagtgagacttgtgaatgtagtgttcttagtccccagagctcttgaaaactccatagacatgttcaaattatcaactagcaacaaaaaaagagtattaaaaccaggagtgttttattaaaaatgaaatgtattaaaacagaaaattgagctaacagaaacaaaacatgaagaaacatccccaaagtttactgttaaattatcttatttggtattttttctttacaaaaacagcccaaaccatgttttgcttgaagcatcaggcttcaagagaagtacatgtttcttatataaattcccattcgtgttttgtttggtttaatatctactgttgctagtagactgtgtattggaaaggaatattttctagtattttctgcattgatccacatgcatagtatttcatttacattgtgggccatatagaattttgcagactagttcagaaaaccagcttctatttataacattgaattttcaggaaaatgcattctgagttccaaataatgagcttagagctttacttttgaaatacagcccaattgtatgttgagagctgcctaccctgtaagccaatgaagggtttttattttgtatgatatttcaatatgatccagaagcatctggtttatctagcataccattaaaaaacaaacaaacaaaaaaaacactgtgctacttagccaggagaggtcttagttttgctttgacttcagcccattgtctttttagttggtgatagtctgtgatgaaaaggcctactgggaaacgttgagagaatcttttaaaattttaatgcagggaattttaaagaccagtttaaaaaatactacttaagattgggcgtggtggctcacgcctgtaatcctagcactttgggaggccaaggcaggcggatcacgaggtcaggagttcaagaccagcctggccaacatagtaaaacgctgtctctactaaaaatacaaaaatcagctgggattggtagcacgcgcctatagtcccagctactcaggaggctaaggcaggtgaattgcttgaacctgggaggcggaggttgcagtgagccgagaccatgccattacagtccagcctgggtgayakagtgagactctgtctgtctttctgtctgtctctctctctgtctctctgtctccctccctccccctctctacacacacacacacacacacacacacacacacacacacacacacacacacagaagttcactgaaaacttcaggattttctgtggctaagagtcctttcaatcatgaaagtattatttacttctaaaactttttggaggacttttaaaattgttacaaagtttttttcaaaatcctctttttacaagtattagtttctgggaaaagctggaagacatctattttctagttaaaaaataaaggcaaaggattcattttctaagagaattttaattttataacctcccagattaatgtcttggtgtataaatgtgtatctcatggaatgtgacatgagaagcacgtcatttgttaggtgctaaatttgtttttacgattatcgattttataagtgatcttcagtttgttgaagaatgagtaaaaccacatagatattactttcccactttaatcttttggatgaaagcaacacattcaaagccaaaggacttagagtgaaatcttaaggtgtttgctaccataattctaatttggtattcataaaaaattatgtaatatttcaagacttaacgtgctctgtttgaatacacacatcaaaactctgtggttgctttcttttttccacttgagaaactaaattaatttaaagctagtttgtggaatataattgaacactagttattttaatttccttgctacttgatcaagatcttgctcttttaagcatcatgtgaaaccgttagtacccactttcacctggcaaaataaggcattttacatgatcagggcaaatatttttctgactctgatgaaggacttctgtgccagtcaacacattattatttttacaaagttatagtctgtgagttggaaatgtgggtatttttttctttccatgttatttgctatagttattaatattaattggaaagtgattgttattaagcaggtagtgaatagattcacctgccctttttacatgtgcctcatagaatggcatcggccaatgattaactttcttgcagagatgtggatgttggttgttctgatgctatattggtatattattcctatcggtataggactattaaaaactttctacaaatgtaatgggaaaatgtacgttcggggagcaaaggggtagtagggcttatcaaatgcaagtgactactgggagagtgctgtttcagatgaagcctgcagaaagaaaaaaagaaatgtaggtgccggaaacagtgcagggagaacttaagaagaaccgcagttggggtttgtgcaggctgaagaaagcatttgatgataagccagctgcaggatgttgacacaggggctgtgttagcctgggtgtttggaattgccttctgagtagaattttagagctgttccttggttctacttaagtatttgataatatcttttgggatcgataatttttcaaaacaggcttcctaaattaatgccttcctgctgcataaaaagctgttccttttctttggtagattgggaaaagagcattgaaaggtcatggtttctcccgtgacttttatatgagggtacgtttttctccccctggagtttagatggccatcataaaaactggttgataatcagtaagttatacaatatactttaaaggcattgtagctctcaacrtttctcagatatttattttgaaattcatggtggaagaatttgtgtaatgtattcttttctgtgtttccctatgtaatattggtaaaagcattattgggaaacaaggagagtaatgaaagtagcatcaaaacttattggagttaggggaaaataattaaaatgtgttgtattagattttttcctaaagataggtggcaaggcaacctttccttggtcaagtttattagaaacctatttcagacattgtagagaatgttgtatgtttatatagcattcctggaaagccatctgaaaatagtaatcaaaattaatatatatggcctttgatctcacagtcccacttctgataatctatcccatagaactaaaagtactgattagtaaaactgtgtgtgtgtatatatatgtatatatatgtatgtgtctgtgtgtgtatgtatatatatgtgtatgtctatatatataaatatatttatagcatcatagtatattgcatctaaacattggaaacaggccaggtgcagtggtctcacatctgtaatcccagcactttgggaggccaaggtgggaggattgcttgagcccaagagtttgagaccagtgtgggcaacatagtgagacaccattacttttttcttaaaaaaaaaaaaaaaaaaaaagccaggtgtggtggtgcacctctgtagtttcaactacttgggaggctgaggcaggaggatctcttgagcccaggaggttgaggctgcaatgagccatgatagtgccactgtactccagcacgggtgacagagtgagaccctgtctcaaaagatacaatggaaacaaagtgaatgaccttcagtagtggaacagctaaataaattatagtgcgttcactctctgaagtaatataattaaaagtgagctagaccagttgtgtaggagggatctgtatgatgtagtttaggaaaaggcacattcagagaaatatatgtaataggatttcatatttttaaaacgcaaagcatttctcttgttgcttttgtcatcacacataccaacyaagctgcgcaccttggcttgttaaggcttgaaagtcacaggttggttagagggaaaaaagtaaagtgatgaagacagacatcatagagccagtttttcatttatgtaaaaatgtatgtgtgtgtgtttgtatatgaatgtattaaatatatccataaagatatgtatacaaaaatcaaaatattgtggttatcttgggtattgctattacaataatgttatgtttttttccttatttttctctatttgaatttttttcaaggatcctgtgtttatataatgtgaaaggaaaataaaacttttcatggagtgggggacaaaagaacaatgatgtccagttttccattttgtgttattagtattctaatataaacctcaaagttttaatgaaatctgctaattcacccaaacagagttctcactttcaaatgtaatatattttaagacctagaagatrtctgtggctctgtggtagtacttcgtactgaaagcatacagctaaatgtttcttttatgttgaaactctaggacattatttattagcattaaaaaataaaagtaaaacattttggattgtagaatttttgtttaaaagcatgtatataccaaatagaaaacaaagggcttaaagactaatagatttaaccacataagagcgaaaacttcttttatcaatgcttatcataagtaagatcaaaagaaaaaaatggagaaaaattggcaagcataaaggcatactattgtgtgtgatcaccaagaaaaagtaattctgtagaaaatggaattaaaaaaaccatgaagaggaaaaaccacagataaaaaatataaatagccaggaaacataaatatgttcagtcacagtagttatccatgtaaattaaaacaacagttacacattgctgatgagaatgtaatttaatagtctttctgaacaatagttcgtgtatgtgtgtatgtgtgtgtatatatatrtgtgtgtgtgtgtgtgtgtgtgtgtatatatatatgtatatatatatrtrtatatatatgtatatatatgtatatatatatatgtatatatatatatgtgtatatatatgtatatatatatgtatatatatatatgtatatatatatgtatatatatatatgtatatatatatacgtatatatatatatgtatatatayatatgtatatatatatatatgtatatatatggagagagagagagagccttaagtgggcatacccctgaccctagtaattcttcctctaggaatttattatgatttagctaattaggaatgtctttttagaagaatgtatatacagtgatatttatcatgcaactctgttgataatggccaaaatggggggaaaattgtgaatgcacaacagtgagattaaatgatggtgtagttacacaattgagtcctatgtcattacaaatcatgtgactgtgtatttatgtggaatattaatgtagaattaatttgcaaaatagtatgtttagtgtgctttccgcttttataaaaatatttatggaacactgtatagaaaaatgtctagaagaatatatatcaaaaacatttatagtgactatccctagatgatagtcagtgatttttattttttctcttcgtattcttttagctttctgatataagccccaaacttttaatgaaatatgctacctacatacatttgtcagtttacaaatataatatataatttgttctttctgcaatgaacatgtgttacttttataattagaaaaaagttgaattggctttgttcatttgagatattaagaaaaagccaaacaaccaaccatatggaaattatacacaaaagatttctccaaagttagaggaagaggagaatcaaggtagtgaacatttattaggctctaattgtatgccagttcttggcatacattatttcaactaagcctcgatttactaccttagcaaatatatatcagatacctcttcctatgttacagtcacaacaaagagtcatttatgcagaaaaagaaatagtctcagagacgtgacctttgagatcacacagctagttaagtggaaagccaagaatttaaatacagctggaattgtcaggatcctctcagtttactgctgacactaagctcaaatgactgatgtaccagaggtcaccatactgtcactaggagtggcagagcccaaaagaatgtgcatctaattccagatttttggattcatcagttgcctcctctttctcctcaccctggggcgacacacaccagacgttgcagaactgygtgggggctgcattgctgcattaccccatgtagatgtgtgcatatctctgtaagcccaggcttggagttctcttactttcccctagcttggctacattatcagattttatgggaagggacaatttgtatcatagtctttgggtgtcctcaccattgtggcggggggagttttagttaattccttgcccctgtggtgtctctagatatactgtgctartatatttctccattttctggtgagtgcctgtgagttttttcaaccattcaagcagtcatcgggctaaaagtttcttttatattactttactcagcaaataagcttttaagctagctcaagagtatctttttctcccagataaacagtgatgtaccctgtatattaaagggcaaagctgaacactgaaggcaagtacccttaattatgtgcaaaacgttttcaatcaaatctattgtcrtacgcacaaatatcaaatttagaggttggcctttggaaaactcacagcacaacatttcagaaatcttcagcattcagcagagtctccctgaaatgttacacccaaaccagagagaaaactcttgtgatcttacaaaaggttcttgattctttgaattatatttgggataaaggagaagaagaggagttggagtgtgggaagatagatgtaagtgatggaagaatgcagtctggtggaagaatggggatgcctagattaaacaattggcatttgtaaaaatgaaaatgaagtggaataggagcgtacagaatctggcaaataataggtgatgcaaaattcagtatcaaaaataaagacagcttttcccctctgcttcctgcagtataaatggtgggtacatttttgttttcttgtcattcattccttgcacccaacttttcagagatggatttataataaatgatcaagggtgttgttttgactgttaagatccattttggtatccagctaaattttacagaattcctttcacatcacaatcttgttcctcatgtttcacagtgtttgtctttgctttcyctactgagacttgttttctaattttcagcctcttctctctggtccttcatcctagaatttgcatccggtgtttctaacttctgctcagaaaccgtgaaaataatatattcatttaccgattgattcatccaaacaataattgggtacacactacataccaggtatcgggaataaagagcaatgaaaagcaagtcccttgtcctcaaggagcttagtttaacttaaaagtgttctcctatttaaggccagtgagtggctcacaccagtaatcccagcacgttaggaggctgaggcaggagaatcatttgaggccaggaatttgagaccagcctgggcaacaaagtgagacattgtttctacaaaaaaaattttttttaaaacttagcctggcacagtggtgcgtgcctgtggtccagctacccagaagactgaggcaggaggatcacttgagcccaggagttcgaggctgcagtgagctatgactgtgctactgcactccagcccgagcgacagaacaagaccccatctcttaaaaaaaaaaaaaaaaaaaaaaaggcagcatcatcctcacagataggtatagactagtatatacaagtctgaatcaaaaacaagatgaatttggaggataagtgttgctttcatgagaaaactccatctgatcaatgtttaggcacttggagttaacagtggtttttgtcacactgtgctttgcaactgcaaagatgaatacatggtctaagttaaaacatttgactctaacaatgtggattaactgaagtggtgttcactttttaaaaatcagctttatttttagagccattttagtttcacagcaaaactgagtggaaaatatggagagattctgtataactccctgtccccagacacacacaaccgctctcctgttgtcccacacctgagtggcttgtttgttacaattgatgaacctacattgacacgtcgttatcaccgagtctgtaaagtgaccttaaggtttgctcttggtgttacatgttctgtgggttttgacaaatgtatgacaggtatccaccattgtagtttcatataaacttttttttttttgctttaaagtactatacattttcttgagttctagaagtatggtgtattgattatttattgatgtcatagagttaggaggctgtacagattattaaagaaaaatgtaaggaaaggctatatttgaaattaaggttaggttcttggaaaatattagcaagctgaatcaaggtataaatctcatcttttgtgcaaagtgagatagggctgtgcttggtatttgtttaacgggatcctgtgagtcataaagcacatggatcacctagattcttgcatcttctttcctgcctgcctttcaggaaaaaaaaaattcaggattcagtaagcgtttatttattttttatttttttgagayggagtctcactctgtcgcccaggctggagtgcagtggcgtgatctcagctcactgcagtctctgcctcccgggttcaagcagttctcctgcctcagcctcccaagtagctgggattacaggcaygcgcttccacacccggctaattttttatattttagtagaaatggggtttgaccatgttgcccaggctggtctcgaattcctgagctcaggcaatccgcccgccttggtctcccaaagtgctaggattacaggtatgagccaccgtgtccgtcctcagtaagcatttataaacactgattatgcgccaggcacagtagcaaggagtgggtgctggggatgtagggggaagtgagacggttttcatgtctactaggggcccacatctgtgtagcaaggcagaaagtcctggaaacaatcaaagtttgtgggggtggttaaggacacaatgtctgtaccttgcagccaggagggacccagagctctgcttcgcaagacaagtgataaatgacgtttaagctaaattaaagatagccagccctgcctcagtctgaaaacagccctaggaagagattcctgatagacctgccctttaggctattaaatcaaaccctattttttttgttgttgggggtgggaggaggggcgcggagtgggagggttggaatcttgttctgtcgcccaagctggagtgcagtggtgcaatcttggctctctgcaacttccacttccaggttcaagcgattctcctgcctcagcctcccgagtagctgggattacaggcgcctgccaccatgccctgcccccattagcatcttgggggaatcaaaccaagaatctaccaacccttaagrggcaagttcctatcgatctgctctacggagcattaatgtctcaatgaccccagaccttgctaccgtcctcctctcaactcctgtggcacatttaatgaaataatatagaattactcctaagtgtttcatctcatgttattgttattacaggcaccatgcccagctaatttttgtatttttagtagagacggggttttgccatattggctasgccggtctcaaacycctgctcaggtgatcygcccaccttggcctcccaaagtgttgggattacaggcatgagccactgcacccmgccaaatcaaagccttttgtctgtagtccttayggtgcttgaatccttttgtggccataaagacgtgttatgagtatattcagtggtatgtgcctaggaaaagaaaaagaaaatgactgaagactgggtaaagctagctttttcctatggaatccaagtgttagccagaaggaaccagggtgcattcagtccaacctgttcatgttatgcagagggacctgaggccagaggggtggtggtttgacaaaccaagattactagtcccaacctcggagccaaggcagacccaagtttcttggattctggtgggggtacattccgcagccttgagctgccccaaggggcctggagatttgcttaggaaccctatggagcccttatcagaaagatgtgtaaagctccaggctttgtcatctgatagtcatgggattgaatatgaccttgtgacctcgggtgagttacgtaacttttctaaactcagttttttcttctataaaatggagacaaaaattcatatccaccaatggaattgctctgcagactttttgagatcatgtatgtaaaatgcctgtgacattcctgggcttaggataactgctggagagatgttcacattctcattcttatgggatcttttgctgcgcagcaaccatatgatcccactggattgatgaaatagagatttggtaaagatctagtctaagaagctttacattttttaaaaaagcaggtatagaatagcttctaattgcagttcttgaattcactgtctccctgtattttgaatgtttggtagtttaagcctattatccttcctgctttactttttaatttatttgtatcagtttaacaggtagtattttaagttctcagattcttacagttatatgaaacattaatataccgtggtccctttctccaccaatacatgtacctcaagtattagagatggtgttattttgtaaagtatttcagttctttccggtaataaccttgcttgttatccaagtatttcttccgtttcagtttatgtcacattcaacacttttagtctccttttgttaactgttaacattttctatagtatttttccaaaatgatttgtattgtggtgtgacattttgatgccacatattcaaagtagagcaaaccttgaaattctactaattctgagaagatcaacaaaggaagtttttaagaaacattttccctgtggggtgagtaaagtattcttgcattttattcatagctgattgcttagaaaaaaattacacgtttctcttcctgtctgtacttctggcgccacatatttctgtagcagtgatctcagtagggtttctagcctgaaaaaaacaggtcccactttctacgtccagctaaaaaatgatttcacaatagcattagtttatatccagaaaaaaaactactagatttgaaatttagcgattgcacccatattaaaaattgatgggatgtttaataacagtgttcttatttactgtctctaattccatgcctgggcaaaatgggtttcagtttttcaagtgggcaggccagctacacttcttgctttttcaagtagtcacatggataaggacacatttccaaaattcaagctatgacatcaagtctttgttttatttggtgaagcatattctttcagaagacatttatatcaaggctaaagactctttggtttaccattgtagaatctaaattggtttcagcctgtttttttcgtgtcaaagcagtgcgtctgtctttgctttggaatagggagttgaaaggcatccttttgaagatccttcaggtgaaaagaaaaatccaaaattgctctaggaagacttgttactgacccacaacagtcaaaaataaaattgaagaagttccttgaaaagacaaattttagtcccttgaaatatggaataccttttgataagggctgatggaagactggtgctttgttcctaaacgtcattcattatcttaagtgctttggggttattcccagctgtctcccatggatgtctggaggtgaaggcatcccattgcagagggaggaaaaagtactgcgttgccaacagagttatctccaccagctgtctggggcggttggtgcttctgagaatgttctgttccaattgtggcctgagtgctacaaagtaagacacagatgtttgatatatcaatcacagtattagatgttggggcagatataaagcaaaataaaatatggccctagagccaaagtgtacattaaatgctgaacactgctcttggcccygttgggaactggaagaggcttcctcaagctcagggagtttagaatctaactggcgaatcatttaggactctattttgaaagtcagttttgaaagtgacataaaataactcaaactgacttgatcagaaagagaacttcaagtataaaaaaaatccaggtgtagttctacctagagtctcatatagtttaccatggcctggctctttcttttttctttgctttttttttttttttgagatggagtctggctcttctcacccaggctggagtgcagtggcacgatctcggctcactgcaacctccgcctcccaggttcaagctattcttctgcctcagcctcctgaatagctgggattacaggtacccgccaccacacccagcaaattttttacttttagtagagatggggtttcaccatgttggcctcaaactcctgacctcaggtgatccacccgcctcagcctcccaaagtgccgggattacaggtgtgaaccaccgtgcctttatttgcacccttgtagcagcaagatggtctcagcagctccagccttaccgtgttcaccactgagtccagcaagacagtgtctcttcccttaacagtggaatgaaagtcttaggcctgactgtccttaccccaaattgggtcatacgtctgtccctgaagcagttgtcgtgtccaggggaatgggaagtgcttattttttttaggcacagttcccctctcccacttctggagctggactgggaattcgagaggggccggtgccccaggtggggacacaggacactaaccagaaggagctgagtagatgtggaggagcgggaacagccggtgtccctcacacgggagtcagaactcatccatgaggaaacaataacatgagatgaaacacttaggagtaattctatattatttcattaaatgtgccataggagttgagaggaggatggcagcaaggtctggggtcattgaggtcttaatgctccgtagagcagatcgataggaacttgccccttaaggattggtggattcttggtttgattcccccaagatgctaatgggggaatgcctggagttggaattgatgcccactccagcgctttgtrcccctccagtggaacgatgcaacactacacaacacacccagcacaacacactcagctcttaaggctgacacaggaacccggaaactccactcttgcacaaatcacagatttggtaaaaagccagggtatgcttcagcaacagtcaataaatgagtaagtaagcgaatcgtggtacagatgcatgtcggaatgttttctagccatccagtcatgtttacattttaataaatagttgttgagcacctactcattaaaatatttggaagaatttttaaatgagaaacgctgagctgcagaattgtttacaggatgagttcagccatctgcaaacaacttagaacacaaaagcctagaaggaaatacatcaaaaagatatgtggttgtttctgttctttatacttacctgtaattttaagacaaatgaaaaagaccgcacagctgtgaactggctaaatcaagagacagcatttgaaatatggggcgtcaggcttgtgcagagaagaaacataaattaccatggttctggaaggcagggcagcagtcacaaacagacctccacctcctgccgagggctccagctctgaagatctcatcttgtgcatggctgcatagacagggatcggtgcctgttacactgggttaagagcttcagcttttcttaaaaatcttcagacctctgccttagagatggtattttgcaaagtgtttcaattgagtcaaattgttatttttccacctggtggtatcccagggcttctatcaatttaccttgtgtatgtcctctgtcctgcctcttgaggcacaatttcctttttccattttcatttttaaattttaaattttcttttttagagacagagtctcactttgttgcccaggctggtctcaaactcctggccccaggtggtcctccctccttggccttctaaagtagggattataggtgtgagccaccctcctggtgcactgttttttcagtccactcatttctgtcccctgcattttccttgggtaaagccccaggcccacttttgccgtagccttctttgatttgctttaatttgaactttcacaggtaaaacctttcataggtttcaaagcagtcgcacacatctcatttgctgccttgagatatagctggatgatgccatcatccctattaaaatatgtgaggggagggctcagaggtgttaactgcccagaattatacaaccctggtctcccaactccagcttgcagggcttccccaccatgaccagcagctggaccagaccctttcttgggaatgcacacttgactacccctgaatcactttaaaactcacctgtctctgaagacattgtttctcagcgacagcttcactagcactgtttggtcttattaacccctttcccttctgttgcccttttgatcctgaaatcttagcccatgttaagaacgcctttcacagatgtcgttgttactaagattctccaatttttagctttttgtacttacgatttggatcatttgcccactctgagtatctatttttacacgtcttttttttctccacacatggtaaattcttggaaagtgagagctgtgtttttcatttccttaatagtggatatttctgctagggggaagtttaatctgagtgagtgtccagctcaccttgaggaaataaaataattcaaccttgaatattttcatagcatttttaaaaattatgagattaaattttcctgaaaaatttacggaaacatgtgtttttcaaaattaagttggaaatattaatggccttgggcatctgcggccagcaaagtcattgccattccagaacccctcactgcagggtttcctttcgtccatttattaaatctaagccccatagtgaggagagacactgctgcactcaccaaaaaaccactgtttataaaatgcttgggcacttcagagacagcagctgttttctcttggtattaacaccgatctgcagattgccagttcttcagaatacagacctttcccaaatctccactaattttgtttatttatttatttattttgagatggagtctcactctgttgcccaggctggagtgcagtggcgcaatcttggctcactgcaacctccgccttctggattcatgcgattctcctgcctcagcctccgagtagctgggattacagtagagacaggatttcgccatgccggccaggctggtctcgaactcctggcctcaagtgatccacccacctcagcctcccgaagtgctgggattacaggggtgagccaccatgcccgatcccaaatctccactaactttaggtgcgtaggatggactgagcaattttggaaattccaaagcaccagggccctacctcctttcttctgtctgcctcccctgccttcccagtgtgcatctgctgaattgaatcattaagagaaagaytaagatgagtggaaggtgagcctgttgttgctgacagttcactttccccagtgaaactgtcaggaagacaaagagatgttgaagttttagagtaagtggcccagggtcttacggtatcctgcagtgtgacactgggtagaaagaggtggaggagaaggaaggaagtggcctggcttggctgtcatgcactgccttccttcatttccttacctcccacgtactgccccccacctgaggcaagaggggaggagttttcaccttttccatatcttcttctttattctttgaaactatttttcttcttagagttgtctttggtagagtggcccttaacttagtgtacagtatgattcatacccccgggggtggtcctttctcataaacccttctttcttttttttgagatactctgttgcccagaccggagtgcagcagcaccatcatagctcactgcaacctcaaacttacgggctcgagccatcctcccacatcagcctcctgagcagctcagactgaaggtgtgtaccaccactctcagcttatttttgtggttttgtggagatgggggtctcattatgttactcaggctggtctcaaactactgggctcgagtgatcctcaagcctcagcctcccaaagctctgggcttgtaggcrtgagccactgcgatggacccttcataaacgtttcaagcagcattgaaccagaacaaggagcagcgttttcagttgggaattcattgtgtatttttcattaagaacataacatttcttaacttagatgtttgtgtaacctgagttgcaagatgaatttaccacacagtgacagactttaaatttttggttttaatacacatttgcgtattttaaaagcaaatgtaccttcagcctgtgaaataatatgctagataattacaggtactttgacttcagttatgtcttagatttattataactacagtgttgattactacgaagacattgctttgcagagggagatgtctcaaaatgtcacaattcagtgttttattatcagacagttgctaaagtggatagttaaaaattgaggcctggcatggtggctcacacttgtaatccctgtactttgggaggatgaggcaggcggatcacttgaggtcaggagttcaataccagcctgggcaacatggtgaaaccctgtctctactaaaaataccaaaaaaataggcatggtggtgcgcacctgtagtcccagctactcgggagactraggcaggagaatcgcttggcttgaacctaggaggcagaggttgcagtgagccaagaccatgccgctgcactccagcctgggtgacagagyaagagtctgtctcaaaaaaaaaaaaaatttgtgtgcagtttktcagttatttcatgactattagtggttattcaacrcaaattaagcactgtatcagttacagggytcagttaaataatacagaatctacaggagctgatttagatagcaaggcattaaatgtactagtgagtattaatagtggctcagtctctgcaaatgctgaaaaagcagctctggatagtgctagcaggtggggaatcattattttatatccagatcactagtagcaaggaaatctgagaaattaattttcagttccccagccaaagcagcacaggaagtcacacaagcagtgaggggtcgcccacgcatctgtccttggcaccctgcagccactgagctgcctcccgggcaccagcacagacctcagtagtcgtggccttgctctcaccggttccactgtccgggagacagatgtcagatacatcatacaaataccaatgatgacaactgcataaggctaaaagacaggttcacaatgcttagaagtaaataataaggggacagagtctaaagtggaggtggtgtggacgcctaggaagtctcctggaggaagatgcatctaagctgagagctggccaggagaagcagagtgagggagtgagagaattccaggcagagttgctgcgtgggaggccccaggctcgctgggagaacagagcaaaggccggggtgatcggagtgaaaggccacagggcatagagttggggacaaggtggggtcaggtagggctttgaggtcaccaaaaggatttttcctaagagcaattggaagtcatcttttgaggctgggaatagtggcagatgagtgcttttaaacaatcacagccgcctcaattgggagaaaggcttggaggagggacagagtgaaaggcaggagaccagttaagggtctgcttggtggacagacttagtgagtccagatagctggtggggcttaggaggtggagagaaactagacatccactcatccagactcagggcatggttttctggcataattaactttgtggtaagagtgcctttttagccctctaaatggagatgttaagaaagccattggtcgtggaagtctggagctcagagagtgggtaggagctagagctacaaatctgggagctgtcacttccagatgagatttaaagtccggtggtgaaccaggtaggcttgagaggcygtggcctgaggtggctcgagccagaccacttggacatgtagaagcaggctagagcaggaacagccagccagtaaaaggtaggggaaaaaaaaaaacccagtagatttccaaaaagaagaaactctccatctagtttaggaagtaatctttttgtttggaaatagaccatttctagaaagtatagaagttggttcatgtatctcatcctgctagcagctaggctgtgcctggagaagttaatttaaaataaagaatgagtttatctctgttgagaacattaactttcttgctataccgcgagtggcacctaagtgagagtatatattgaagcgagaagtccagcttgttcacaatatcacagtaaaattgagctcaaataggttctcttgtktatagagtgctctgtatttcatggtggactacatagggcagatattccttcttccattttatagttatgaaaactgaggcagcctgggcaacatggcaaaaccccatctctacaaaaattagctgggtgtagtgtcatgcccctgtagtcccagctactccggaggctgaggctggaggatcccttgagcccgggaagtcgaagttgctgtgagctgtggccatgtcactatatactccagtctgggtgacaaagggakacccagtctcagaaaaaagaaaactgaggctaaaaaacggtaagtgatatgactgtaaaaccttcacacctgcwtgtaaatacctctgatagatcatcagagctgggtcacctgggaagtccctaagggagtggcccacaaggcaggccacttgggattctggaatagcctagaagatttttggacacacacttagttttattggtcaaatgtttgagccaaatcccatggatgggttctggggagatacacagtccctgtccccaaggagttgatggactaatgaggaaggcagatagaaccatgaactctgggtgttcctgccattctcttgcagcgatacaggggaacttttgtacctgrtgggatgggagagggatatgaatggccataaaggaaatagaggaaaaaagtagggctgatatcgtttgctgaagaatgaatctacataagtatttttcctgggggcaggtccttccacctgcctgtgctgtgtaatttagcgaggagactgatgtgggtatggccatccctcttactgagtaaatctgtcccattatgtagctgtccaccccgttcctggtcttgccgctgagggagcatgcccctcccttggaggtgagctaagtcaggatgttcgggttaaccatgagcctgygtgtgctaatgctttcagacttcttccttccttgtgtctgcagtgtcacccactagttattttattagctcctggaggacagggagcatgttttcttctcctgstcttggccccttgcactgtgccgggtgcaacttggcgcttaggtggaaaagagatggccgtttgacacgtgttttggctcaggggtttttctcaagttcaacagtaactccactcactcagcccttttatgtggaagatgattcatttgacagccaagttaatattttaaaagtgtgaacttaaaacaataaagaaacttttggggagctggaaaatctatagtcaaaggagaaagaaacagacattatagacccatctgatcgtggaatacaggaacatgttaaattattcataagttgcttgataactggtgaataaatgtatgatggaacatttagaatctggcgaagccttctagagaatccattaaacaaatgcatgcaacagcaagaagttttggataaatttttattcttataaattgatgacatatagctaaactcaaatttgaactattagtgaaaatattccagtgcccagattagtaaattatttttattagtgctttctggctctaaaaactggtattttatgggaaatcagagggttaattcttgaaagtatgatactgatgtcctagaatgtgctttctgcccycaagcaaatggcatggctttgggctacgttctgatgatcacaagtatctctgaattgctttctgtttcaggaatgtgtatcctctctagtmttcattggccaaattgatctcttaaagacattgtggtctggcaaagttgcttcttgctcattaagcttgggagtatgttttaaatagttacattcaattgtttccttgaagcgtgtgaaggaaatgtgcctgtttcagaccacaagagccagggaatttttttaatgtctgattgtggttaatcagttttctgttcttcctggagataaactgcataagaaaaggtcacatgtttcagggctcctcctgcaaaatcagagatagtatgaaatgacaggaagagtgttttccagtctgaggaaaatacttggaaaaggcaaaatattcattatctgtaacaagtggttaaagattttcaaagacattcataaaaattgaagaataataatgaagttgtcccatggaagaaatattcttcagattacttttcctcttctttgatactgtaataaccagagggccatttaatgtcasctaataaaggagtcacagagtaactactaagcagacttaaggaattaactctccccacaccgtccttaattgagttttttggttgtctgaatattttctgtacatattctcactcattatttggtactttttttttctttttacttagcatattttaagatacaacctttgcaggaaagaagagagaaaactgtatatttaaacagagtgaattktgtgttaactctgaaaggacagagactggaaggaagataagtcagggcttgaatattccaggaaggctttgaggaggaaggaaataaagtctgaacagccttgaagaatgggtagacgtaggaaaggattcaggaaggtctttagataacaaaagtagagatccagtggctgagatgttgtcgatgttttatttttatcttctaaatgcttttcttggaagatcttatttcttttcacacattgtttttcttttgtttttcccagctctctgcttccagggctaatggtgagttttctgccgtgtaaaatcccaaagggtcgcttgcatgtacttgttgccagtagcctgttttcattgggtcatttactgtggtttaatatgccacttccccagtggacctgatgtgaagaaagtccccacaatcctgtcttctgtgacctttctgaggccttttccttgttacttggaacaaagatgtgatagctgattgggaggagagtgtttcatgtcatctatcacaccagtcactttgtttttccatgttgttgaatgcagattgagttactgttgtggcctatgttattgttgtccatgttgtgtagatctcatgactctctgatggtgtttaagatgggatgcctctgccatcaaatcccaggagagcctgtttttctccacctcggtcctttcactttyttatctgcttccctgcctcctcctctggtcccacaagcctttcacaaaatagttaacatatttgctttaagacagagcttgaaaacacacgcacacgcgcgtgcacacacacwcacacayacacacagtatttagagactagatactgaattgtctgatgagacttagaatttgattctcctaccctgtatcttgctaccaaaaatggcacatgggcacacatacacacttttaataggcaacttaragcccatgaaataatgagagtaataataatagtagttacgaagccttgcatttcctattctkctttggccagagagcaataaagcctcatttaaaaagcagctttccatctttctttgaaaaaactttgtagtagaagtaaacaattctgtttgtttcagtgagagaaaacacccatggatcagccaggttgacagcctagtcagcttgcatcctggtttgtttttttttgttttgttttgttttgttttgttttttgttttgttttgtcttgaagagtttttgctgaaggaagcattagagttctacttaatatgcatacaatagaaagtagtaattaaggaaaaggatatatcagccaacctatcttaagaaggatctaactagataaactttgtctttaagacagtcctgactctcagactccacaggtgggtgcaaacaacagtgctccccactggagatcctggggcccactttggcttgccttcagaaagggaagacaaagtgtccctcccaagttacaaacgcaggttgtatactgtggcttttactctctgataaccaaattagccttctaaacaactattctcagcagaagtaagggtggtcttgatttttgtkttttttttgccatccatactagtctgcttcctgtcttttcagagagcaaggctgtttgtaagaaaaatgtgtgaactgaaaaccaccactaccacctattagatgagtacaagataaccagaaaccaaatacgaaatgagctgtcagagctgttgataagctctcttgtgtgaaaggaaagaataaaaatgcagcaaaaggccatgagaattatttttaaaagtaagactatagacaaaagtccaaggaaatcttaatctccctttctctattcctcttgtctcattctccagccaactttagggacaagcaatgtcttcatcgagaggcacatcacatccccaaaggtgggttcttggtgaccaaagtacctgcctacagaaagcagagaagcctgttttcttccttgtgtctgtaggaaagttgtctttcagatgtagtcttctttgttcatctgttactgtgcactgccaggctgaccccttttctcaggcagattgatcatgaaattaaaaatggtttacctgagttaattatattattaggctgggcacrgtggcgcacacctataatcccagcactttgggacgccaagatcggtggatctcttgagcccaggagttccagaccagcctgggcaacatagggagaccccgtctctacaaaaaataaaaaaattaatacaaataaataagtagattagctggtgtgttggctcgtacctgtagtcccagctactcaggaggctgaggtgggaggatcaactgagtccaggaggtccaggctgcaatgagccctgagctgagatctcaccagcttggagtgtagaccctgtctgagtccctgagtgagaccctgtctcagaaaaaaaaaaaaaaattaagtactatcttcatgtttttcaagacattttccacttgttactttaacaaagtttacagtattctacttgttttcattccttcaaaactaatctttttctttcttttcttttcttttcttttttttttttttttaaagaaatagaatctttctctgttacccagaactggagcacagtggtgcaatcgtatctcattgcaacctgaaactcccaggctcaagtgatgcttccatctcagcctcccgagtagctgggactacaggtcctgccaccatggctggctaatttttaaaatgttttgtagagacagggtctcactatgttgctcaagctggtctgaaactcctgggctcaggtaatcccctcacctcagcctcccaaagtgctgggattatgggcgtgagccatcgtggctggccctaattcatttttaataactaaccagacacactagtggtgttatacgtgagcattaatatttttttgtcatcgtcacccatttaaaaaaattgmgttttcaaaatgagttgcttcaacctagtgtggagaatcaaaattttaaaagatcaaaattttggtattttaaaagtcaattctgaccaattatagtgatttggttctacctgatagtttaatatttctttgctcttttagtaagtccccagcatagggggaagggggtaggcagtaagtcttagaaaactgtcttgcgaatttactgactcttatggattgggaatttctaggagtatctggaaattaaccgaagcagttctttttcttctccagttagggcaagttgccatgaaacaaataatggtgacttggttggttcatttagttcatttatttattgaatatttatggcctgtccactaattacctggcacaagtgtaggtcctagaagatacacactagggaaaaaatagacacacagactagatccctactgtcctgtcttacattctaggaggcggagagaaaatgttaaaaatgaacaaagtaagttgtcargtcaggtgctaccaagtgctagggaaggagattagagtggtgggtgccatctggatagggtggtgaggggagccccatctgctaaggtggcatttgagaggagacttgaggtgagagactgggaagtgaggtggggaccgaagcctgacrgactagccatgggcaaaccaggcaggagtttagccaaggtgaggacttgtagaggagttgggcagggatgtgaaataattagcttgatgttctgcataggatgccctgggctgcaaggtgtggaactgataagccaagacctcccaggaggctttgccgccatctgcagaatcatgctgatggctttgaagagagaggcagtggtggagagaagtggctgatttggggcatgttttgaataaagagcccacagatttgctgaagacttgactgcagggtgagaggggagtcagagtcaactccgggagtttgggcccaagctactctgtgcatggaggtgctactctgtgcgtggaggtcccactggctgagagagggaggggtgagcaggagctggttgcaggccaggggagaacaggacttcatatttacgtgttgtttagttttggggatgcttgttagagatccagctggggatggtgattagcaggagtttagaattcagtggagagattagggctagaaatgttttaaaaastgagagccattgcactgcagatggtggggcaggctgggttctggaggatgataaaccctccaagggaaggggaagtggccaggagccttccaagaggcagaggcgtggtgtaatgtgatggtaggtgyttcaraggggatgaccgcttcagggaggaggagrgaatgggggtgtgggattggtcaggaggagcacaaggcacctaccccatcttctggttctgtggttcctgcgcagaagaaaaaaatacttgaggggggctgcaagggaagtgtggtccttggggacaatcagaatttggctggcatgaaaagataaaggttcagcgttaggttaatttttgctgatgagaaattatgactcttggagagccccatggagggatttgggggcctgggatggcaaaggttcaggtcarctgggtcaggttaggcaatctttggaggggaatggagcgagctggtggctagaattcttgtaacatctgaattaaacagggatggaaggcctggtgggattaatctgccttcctaagacagatctaagggtgagcaaactttttctgcaaaaagacagtaagtattttaggcactgtatttaggccatacagtttctgtcagtgactcaaacttctatcatagcacgaacacagccatagataacacaaatcaatgggcctggctctgttccaataaaacgttattgacaaaagcagccagcggccagatttgcccataggatgtagtctggcaaactgtagrcaagggagttagtaattggtgagagagggatgaggagatgggtgggaagaaggggcccgagacttggagttgggaaaactggagctccaggagccaagtcctcagtctgtccccatcctgatgaggtgtccatcacccacagggagaactaggtgtttccactcctcctccttggtgctggagccttttgaaaattgcttaatgaaakaggcaggtaatcccaggtctcatattcaggagcgtgatgagcttctcctcatctccacagcagacagactagaggaaagagacttaagatgtaatcagagatgtttacattgacaaaagaaaacttcttggcaggaatgaagctaaaatacatgaattactatctaggaaggtctgaagattgttggaggttagaatgaacaagaccaatttccttctcttacctggaccacagagactttgttggtcttttccaagccctagatcttttcatgtgaatgtgtcattgtcttaactctataagaggcaaacctgttctaactatcgttttgatgtgctataaatacactgttctattatagatctgtttataaacagatcagtgtgtgtgtatatagagacacacacactgatctgtttataaatacacatataaatatacatacagacacacatgatctgtttataaatacactgttatagatactcctaatttaagaatatatatttaaaatttctcaagttgcaagtggtaaagttatgtttaattatttatcttaataaattgaatacctattagtgacattctgagtgacaaggttgatttttccagcctatcctagtattctttgttggtatgattttatttgccaaaataaattggtttgcctcaaaccacacactaggtgctaagtatcttcaaagcaaaattcaatgaaacttgaaagtgctataggactgaggttgtaagtgacagaaacccaattcagactaagcagaaagagagctttgtctccaggatccgagggtgcattctggaggcccgagctaggatgtggagcaagggatgtggctgagcccacagtgcagctggaaccagggatgcaaatgccgccaggacctctctgtttctcacctctgcttccatccgcatctctgcctcctccaggccaaattttggtgaacagtgactgtgtccattctttatatctcatcattaaattatgggaagagtcctgcgtgaaagtccgaaggtcagatcctggaaagaaaactcattggtctgcttgggcttggggccagccttggccagccctgaacaattctggctgcagagtagagaaccctgtgatggccagagaatagggtcacagacatatagaatcatcactcctgtggtaaccaggtagatctggggttcagggaagggtgagatgtgggtggtgagctgggcattcaaaagagaaggtaggccgggcatggggggctcatggcagctcatggcctatagtcatagtgctttgggaggctgaggtgggaggatcacttgaggtcaggagtttgagaccagctgggctgatctcagaacccatctctacaaaattttttttttwaaaaaaaacctatctgagtgtggttgcacgtacctgtagtcccagctacttgggacattgaggtgggaggatcacttgagcccatgagttcaaggctgcagtgagctatgattgtgccactgcactccagcctgggtgacagagcaagaccccatctttaaaaaaagaaaaagaaaaaaaaatgatcaggtatatgttaagtaaacatgaaatctatataacagamcaaaaattcactcttatgtcaatgtcagcgtgttaatgtagatctatttactgagacagactctgtagtggcagagagtggccttgttaagccaggaccctgttctgcaggctgtgggtagaagctaggaagtccctggagtttcacccagcttttccatgaatgaccttggcctcagtctcttcatttataaaatgagggggttagattaggtggtctccagagtaccctccgagtctaaaactgctctgtctgcagcatcatatgtcataggatataatagactctacaacaaggtttaagatgacaaattttaaaaatactgctgctacacaagcatatattaccatttgttgagctgataaggcttgataatgtaattggaggcattaaatttttttttcaaaatggaatatgaataaaattttatatttctcccaaatatttctctcagttcttagaactgtttattacttttttgcctgttattttcccactaggtctcattgggctccacatccttgctctatgtttatgtagaatattaaacatcattccctttcatctcactgcaactgcttctctgtttcatccgcactttatttccactttgcattagggaatacaaaactgagccatgtttaagcaacgtagtgtcaatcaccccgtttagattccattttcccaggcrgaggagaaggtaaataaattggatccagtgagaagcctggatattaggatgtgcccatcattgtctctttcagcagaactccacacagaggacaggcaatcccctaggctctgcacgggtcactgggcactccaccctgctacacagcatcagcataatccactcccggagccctttgtggggcggtgggtcttggccagcctgttttccccacagctgctgtccttagaccccttcatgcttcacatgcattaaaaggacctggtgttgacaaacaagctgaggctcctgtgggatgaatctcccaactgggaggtgctcttctgtgtgcagaaagagcacctgattgttgctaaggtttcttttggtaccaaaatagtaccttgtgctaccaagggaaatactgtaggagtgaatttcccagatgcaatagccgtcatccttctttgatgatttatgagtccctgttaagtcaaacattttctttcaatattctaaaattaacaatttcaaaaatctagtgagcttcatgtagaggattgtgttttaataaaagtgatcattcaaaacacctgtttaactcatagctttcaattccaatcaaagcwctgttaatcctttgcttgggatgtcttgatttttctttttctttttccttaaaaaaaaaaaaaaaaagacaacacatccatgcatcyattggattgatatttgattcttcttggtaaaccgccagttttaattaagtttgcacattgatatctggctggaaattggatgaaattcagcatagtaatttccttcacgtgttcttcgtgttctggagcagggagtgtgaatttacgtggctgaagacattatgtgactttaattacacctgcttttgtgaatgaaatacaactttttagttttgatggtgttcataacaatccttttatgcttcttgaagggaagggatcagtaaaaggatattcagttttaagctatggcaacttttattcactatagcaaataagttcacatagggattttagttaggaaagcttgcggcattttgtattgtgaaaaaaatgtactctaattttaaagaaatttcaggatattccgygaattgtgcacactctatgttcttgacaatttgtattcttgagtatattacccacttttttccccactcatttttaagtcaatttgaacctaagaaaagttggacatatacataccttaaaaaaaaaaaacctcttaatcctaattctcaaatggagaaattagagaactatatttgttttgtgtctctaagttaatcaaaatgttaattcttttttttttttttagcttcttttgatttctcaagtataaagtaaatgggtgtttctggtaagctcagctggtgtttctctgagcactttttggttttgttacgtgcatgataaacatgcatggtaaaggttgacagttacctaaatggctttcggtattccttcttggcttccttggattttattggctaattgatgtgctttaaatgtttttttctgatgtctttgatttggtggatgctctttactgaggattctttctgtcccatttcctaaccaccacatcttgaccatgagtcattgtttttctatcagtgtaatcaaattaatttgatttagttgaaggtatgggctagggcttctggtggccttgagaatataccttccaattttgctgtcatggcactgttagccaaccacatgctcagggyggtgctaacaaaaacactgtcwgaagaagactttaacaagtgctaatattaagattttaaccaagtaagmatcactactaagattcttacacgggcataatacttttaatcttacagaagaactgtaataaatattctaaggcaccatgatttttggactttgtccttcactgaacttcaaggtcctacatacttaaaaacaaaagccaaaaatatgtcaatgaatttctttccatcaaacatacaataacaatagaaaagtgggtttttttccctcccccttyaaaaattgatccctgttsactaggagaataatttccgtttaagatacttattttgaaaattacttagatgggatccagaaaaagtaaagggaaaaagaakaaagagtaaaaatgagtagttctgttgtactcttcctgctctttccttttggttacgtatttagtttgaataggaatgctttaagacatacttaaataataatttaagtcaggaagactaattctgggaagaggagaggagaacagttattgagagaggctataaattgaggtcagattaaccaaagaatatggccatccatatagaaacttaatatggagacagaagagattgttcaaagaaaggggagagtgtggcagagaagagtggagttaatttactatgatatacttaattttatatrgggtattttaatcaaaacccaatgctttctatatttattttcattataaattttattcattcattcttagcaagtacactcaaccaggatgatcaaacctgcttcaacatgtaagttattatccaaaatgcagccttcctggagccccattggggatcattagtgcaaattccactgtgttctttggtccygggggactgttcaggaggmaggtgatgccagaattagccgatcgaattgcggcactcagtatctccaaagagcagattttccagagatagtattcacttatacatccattacagaactgtcttcatacttattttcagattatccattcagaatcattctgtgactctgaaaaatctgttttagagtatacttgctgagatccttttaagtaaacaagtactttttacattgtccagcttgatgggcatcaagactgttgaatgaacacgttttgtgggattttacactctttgtggccgagttgctttgctttggtggcttgtgtctgagttgtggtttcgtctgggcagcatggttgctgcagccttttggccggtgcactttacactgcttgtcttgctttgtgctgtttgccacctggatgattccatccagccattgaacctcactgcacaaagaagaaaagaacaaataacccatgtgtgttagggcatgcaagatgctggctttcttgaggatggcaaatctatgaatagagtctggataggctaagttatgcagcatgtgttgttatgtttgggcaggtttccayagtccaaggcacatcagctgagcagtagcaggtctagcttctggtcttgatgctaaaagtaatttcttgtgttattttagtaataagtcacttatttggcttcagtttattaatctttttgtcatctttaggtcctttaagctcttaaactatggaatctgtatcttagatcrttatggatgggatcaacagatgaggatataacggtttgaaaagagccatactgacaaaggtgcttagttccagagagaccaacctaggtgtcaaatcatggggccattttcactcttctgtgggttttaaaatatacacttccattccagacctaaagcttgtttgacgtttgctcttccttgctaccctacrtagacatacattgcctccatctttaaaatgctctgtagtacttgtttattgctattaatgtataattggcctaaaacaacaagtgtttatttgctggggattctgcaatttgggctgggctctgctgcgcagttcttctggtctcactcacgtggctgcagtcacctggggaatcactggatctggggctgttgtaaccaccttccagaagaacaaacccagggctcagtgcttgtcaggcttgtgcttatggtcttgtttgctgattgcccactggccaaagccaccctcgcggccagyaccagagtcactgtgggaaggggctgcataaggatgtgaacacctaggagtgtgattcatcggggaccgttaatatgcagtcgtccacatatttacacgctgggcttgtattttgaaagtctgtactacagacttgaaggacatgtctctattccctgtcctaggctgtaaactttcagaaagttttgcttgacagtatctacacccctacagcgaatgaggtgagtgcataataagttttgactgtgtatggcagctcatgcctataatcctaccactttggggaggctgaggcaggagaatcgcttgaggccagaagttcaagaccagcctagagaacatagtgagaccytgtctctacagtgttttttgtttgtttgttttaattagctgggtgtagtggcacacacctgtagtcccagccactcaaggggctgaggtgggaggatcccttgagcctgggacgttgaggcggcagtgagctgtggtcataccactgcactccagcctgggtgacagaatgagaccctgtctttaaaaactaaaaataaataaatttgaaaaataaatcagttgtggtgacagaggtgggtgtctgtacttccctgagtatggccaggagagaacgtttcctgttccttctggttctttctccagttccttttcaagactccattgtggagtcctcttcctgaagattttcacaatttttttctctctgaatccctttgtggcgttatcaattcctatagctacgcttttcctaaagctttaaataaaatctctttgccgattacttctaaatgttttcagcctcagaaccacatttgtggctgcatgttaaacatctccacatgaataatctgtggacaaaccaaaataatgcatcttctacgtaccctaagtcgacttctctttctgcgtttcctgtttttggtaatggcttcaccactcttccactctcaagggcgtgaaacctcttaagcattcctagcacctgttgcttggtcctgcattgtgattctggcctccagtcctcatccttgcttcaaattatattccacacactgagctccttagagggtcctcgtcatagaaccccccggctcataactttccatgcttcctcgctgcccacagaactcggcctggcactgaagatccccatcagtttgggccttttaagttcttcagccattttctgggtgtaatgacatgctctcttgaataagaatccaaatccaagtgttttccctccttcagggtctggctccaacatttcctcctcctcagacaaactcagtgggtaacagtctcttccctctcaatactatcacagccttttgtgctgttagcaacttttctttttatttaaaatggacattatttttttacagaagttttaggttcacaacaaattgagagaactgtgcagagagctcccacaaagcccttccagacacacacattcagcctccccaccactgacatcccagttggcaccagagcaggacggttgttacattcgatgaacctgccataacatttcattgtcaaccacagttcacagttgacattagggttctctctgtgttgtacattctgtgggttttggcaagtgtataatgatacatacccaccattatattaatagtatgatacagaatagtgtcactgccccccaaatctgtcgtgcttcacctctgcctccctccctcccccaaatstgctgcacttctcatactcacctcactgtttctgttgctcacctatgactctctccaccccatcgtagtcttctgttactatatagatctctaaaagatgtagattacatctttgaaatcccagttaaagtgcagtcattatctcctaagacccaggttttatagaaattggaaattttctttggggacacaagccactaaggttagtggttacttaagatgaaacttgacaggggagacattttacagcctagtaaaggtcagtaagtatttggtgacattagagatgatttatgctttatgtcatagttgtgtatgctccctcstaaatggtttctctatagattaaaaaaaatstatgcttcctaaaacactttacacctctgctatggagagggagagagagaaagagagaagaattggaccttggacaggaatacataagtgcatccttctttaaggcagtctccatttctaatgtgaataataacctcttaattggttttctaaatttggacttataaaagatcctattataagaaacaagcgagtaaatgccaaacaggttaacagtaacatatgcagaatatggtataatattgctgcaaagaactcggccaaaacggatacagcgttctaaagttgttggaacagccttgtcagcaagtgtctaaatgttcccccaaatctgtaaccgctaaaggaaacaaacttgaaaataaacaagaagtaccataggaaaggaaggtgatacaccagagcaagacattacagtttcctatagcaaaaggtgtgatgcatgatagttttagattggccagcagtaatgaaacaggcaaggccacttctgttctgtcccgtcctctttggctgggctctttggtctcttctgtgatttgtggacacagttttcacaggtgctcagggtggcattgcctctcagctgctctgtgaaatatcagctgcaggttctatgttgagttcatgttcatagtgactctaagtcccataatcatattttgatttaactacattttgttttcaataaaagtcagcaaagatctattaagcgtctactctggggcagccctctggggacagtgatgacaatgacagtgaagtgcctgagccaggcactgttgtggactccgtttttcctcacagcagctccacgctcctagcactgcatctgagatgccttgagaagccgacactcacttttctacctgtgaattcgcttgcttggcctcccgcttgcttatgcccagttgcctccatactggggcaaagatccgagaaaacaaaactacatgcgagtgtttagcatttattgtttccttggtgaccagttgtgtgaagcatttttggaacatattgcagacagctctgggtgtggcgagaaggaatgacggtccgggtgagaaggactcagcgcctgccatgtctcggatccctttgacctgggtttcttgccccaaggtcccctcccctgcctgtaccctttgctcctggctccaaggagcaccccaaagttccagcctatcctgaatgatgaagataaktatattttttccctctccttactggtagctgggacaaagttgggatttttttccatgaaggtatttttactgtgggtaagtgggtaaaataaaaagagcagaggatcgcatagacttacagaaagtgagtgtgttctacagaaaggctgtgtgtttgtttaatctagctcccatctacctcgtaagcagctttccctccggctactttaagtagttgagcaggtttttctttttcttttaaaaaattatgtccctttcatttatttatgtgtttataaaacaagaggcagttgagagccatggccaagagcccaggttctggagctgtgttgcccagatctgaatcccctgcgccatgcaaaggtctctgtgaccttgagccatcacttaactcagcctctgctttcctactgtaaagaggggggctgtgtaatagttgtgcccatttcacagggttaaggtggttacatgggaggctattggggtggttagcagatacccgatgtatactaagccttaaataaaagttagccttagtgatgtattgttatgggccattttttgaaatgatgaatgttgaggatgaaaaggggccatacaaatagaaaaccaaagaatataaaacaaaatatgaaactcaaccgcttcctacaagtaagatatttttttcttttgattggaaattatccatcaaatttgataatgtaagagagtcaagaatatattatgtcctatttccccctaccttttttccccataatttttatttcaaaataagctctagagattcttagctggttcagcaggtcatggagtaaaattaaaaaataacaatgaaggggcactgagctaggtgccagggatatgagtgtgcctggtggcctacaccggaggtcatgcttcttgcacatggaatagagcagatgacattgcttatcccagtggggtgtgagagaaatactccaattaattgtatgtaaggtgcattttgtggcataaaaatgacaaatccagctaacaccaacttgtcaactttagtaaggatggtgcagattattagggagaaaaacaatgttgtacatactatactaaaaataccattttaatgtttgtttttattttcattttgaaacaatttcagacataaaaatgtagcaaaaataatacaaagaactcccatatggccttcacccagatgctaacatcttatataacaaatagtacagttatgaatatgaggaaactaacactgatacaagatgactgcgtaataatagaaagctcttatttacatttccgcactcattccacttttgttttctttcttgtccaggatcacctgatgcatttggttgtcatgtctcttagtctcctttaatctggactatttcctgtctttgtctatcatgacctttacacttttcatgaagactggttattttgtagaatggctctcaccgagagcttgcttcctaatgattacattcattatgcagttttcacgagaataccagagcgttagtgttgtgtccatctcagcgcacgtatcagaaggcgcgtgatgtccactgatctcatcactgaagctgttgactctggtcagttggttacggtgatgtcagtgtcagctctctccactgttaagtcactgttgtttccctttgttcttaagtatgttgtgggagatacttagagattgtgtaaatatcctgtttctcagcatacttttgctcaaaaaaattgaacatttattgctgattcttaatgtgtaacagttattactgtggtatttgcaaattgctgattttttaattttcattattcyttctacatagttgaaattgtactgtaaggaagagtttcctcttcttccatagaacrtgaaatcatagattcttattctatggctactgtattagtctgcttagacccaccaccaaaatgccatcagttggacggcttaaataacagatacttattatctcccagttctggaagctggaaagttcaagatcagggttctgacagggttcggtttctggtgaggggtctctttctggcctgcagatgaccaccttctgcccctgtcctcacatggtgggcctgggctggggatgggggcattgagctctttggtgtctgtacttraaaggacattaattccatcagatcagggcccaccctgatgaactcatttagccttaaatacctcctaagggccccatctccaaacaaagtcacactcgaggttagggttgcatygtaggaatttgggggagacaaaaacattgagcccatgacagttacagtctgttattatcactatttacaaaaaggttattaaaaaatatttggaagagggattattgctaaagcaaagaaactctgtattgaccatcaatacaaagtaaaactgaacgtcgtatcctgtggtgtgttagtataccgtgtgtggcctgttgtgctgctttctgggcagggtgcatgacttggctcctgatcgcgagaagctgtcattttagttcctacctactctcttgtccctgttkccatgttcctgtccattagtatttagtcttgtaagaagaataagagaattgatgtgtcaaaccttgcctgagtctgctggcttaattgggtggatgatgatggaaggtgagaggacccagaacccaagtatgttgtagtaattgatagatggtgagtcatccctgcaatttgcatatcctgtcccagctttagaggactgttggggattttgaaaccaaaacttaacagaatatgaattctgctgttgctcaagtttttgagtttgttaccctttgtggctcattctgaagttttgctgataatcatatatttgctaatgtctaaaaacagaacggttgggtcactgctgtaargcagataaatacagcagttctagaacctgctgacttggtggattcacatctacaagggaaagcagttttcgttgtaaaaatccccatttcatgtataagaaagatgattcctatctagtcatgtttttaacagtcatctagtaattctgtattttaacatctaagtagctacttatattctgaatagctacaaagcagagcacttgaaacaatctttaaaacatagggctagaggaaaaaatataaaccacatgattaaactgttatggtgatcatcagggacagtgtaaatcattatggaaattaggtggaggaaatggcattgtatcattaccagcttcatatcaaacaaaaaggctgtttgatatgaaaccccagccctccaaataactgggaccacaagtgcatgccaccatacctggctttttttttttttttgtagtcatgaagtcgccctgtgtttcacaggctggtgttaaaactcctgaccttaagcgtcttccctccttggccttcccaacatgctgggattacaagcatgagctactgcgcctggccttgggtgtgcttttggagtcagatggaaacttcttgagaaatacagagagcatcttgtagctagtccagtcaaccaaagacatttttggagaacatctaataccgcttccttttgtcatctagtgaaagtaaaatatctttttttcttaatcctgttttgaagacatcttatagaaaggagggctcccctgctcactccttctttagaattgaacacttttattatcacatgtatcatgtatctacatgtgctaataaaaacaaaaactacagcaaagactgggttgtctttggttggaataggaaatatatttcctctagagtgttaaaaagggtaagagaaaactagtgaaactgatttagctaatttwgtcaacaagttaggaaaatgacatttcctaaagttctgatggggttagctctacctcctcagtggaaatagtaaaccacctggaattttacttttagtatatgtcattatttgtattttaaatttatcttcagtgttgtttatatattactttaaagtcactcttgatttttttaattataatacagaactttgwtttcttttaaaaggacaacttattttatarttagcatagattgctttcctcgaaataaaaattgtcattccattctagcatcctctgccaattgcagtatgactcgaggtatgactgcagttgtcytagaatcataggtctagtgagtgctttaggcttccacatttttgaaaagaatgcaagtatggtggacctttaaccacatawaagtaaawtattaaatgaagcatgcttttaatagccatcctgtcatttttaaggtttcartagtgtatgtttagaggcagtgaatttaaaagtgtttgtatattaaagcttaataatccttaagcattattaagtttctggtaaattgttctgtttgatgggctgtcaacaaatcatgtggaaataagagagaaaattgttgttttggatttttttagcawggagagttatgtaaaccaaaaacaaaattctgaggtccccaaaccatctgaacggacccctcctgtaggccaagggtgttccaaagttaacctgaaaaacgtgttcaggccatgatggaagagggggttggacatgcctcattctaccattttcccttttggaattcaggagaagccaaccagcattaacctcaacacagatcttaagtctgataagaagcatttacagtctgttctttctgaagcttgctacctgaaggcttcatctgcatgatatacccttggtttccaaaaccccttatcctaactcagacattgctttctatagaataactctttgaaccagttgccaatcagaaaatttttcaatctacctatgacctggaaggcytgccttcccctgcttcaagatgtcctaaccaatgtgaatcttacgtgtatctgatatctcatgtctccctaaaatgtgtgaaactaggctctgccccagcctccttgggcacatgttcttaagatttcctgaaggctctgtcatgagccrttggtcactcatatttggctcacaataaacctcttcacattacagagtttgactcttcgttgacgttactgtttcctgagtatacagcaacaatttaaagcatttagggtacaattttttctgtgatttttgagactttttctaacgatcaagattcatactataaaaaggacttaaataatggatatgaacatttataagtttgagatgctgtgcacatttacaaaaacaaacaacttcttcaaaaattgcttggctggtggaattagtctgtggagaatattttattgaatttattttatgccagtaaaataatcttttagtaagtcatcttgtgtttaatcagtctaaactttggtaacttggtaaacagaaacttaatcattggcattgtagcttttgggtttctgagagatcattatgaatatcaggatttttctttgctagatataatagtaaaatcactttaaaagtttataacccarggaatgagtttaaaatttggtcaacaactgtttcttgtagttggttcctgggatgtaccaagtgtgcaaaaatgaatagatctagtccccacccttaaggtagctgtaatattgtagggaataatgacaaccataggccaacttttctctcattaggaaaaattgtgttttatcctgttgtgacagctaatgcttatattcttacattctccctagactgtctttacataagaaattactagagtcctcaaataaagaatatcatggggattyttaaatttgacagtaaaagaccttgcacacaggcaaagcccttgcatggtgaggtggcagcaatgaaagcacaatgtgtcatgtatcccagcaggtttgtacaaagccacagccagtggctttccytatcttttttttttttttttttttttttttttttttttttttttwttacatattagcttttggttaaacaaatgcaggtctattttcagtatttctttcacattcttgatgagcagggaaaggcaatgtattagagtttatgtaaaagagatatttgtgagaaaatattaaagaaactaatacgctatttaagatctgtattattcacctaataacctttgagagatcacttagggcaatctatgctgttcctaggaatatgtgtgtgatgctgggtggtttggtgggagagactgtgagagttaaatactcacagtstgcattttatcttgatgaaaactgttagcctcaaatgattcagaagaatttttagaggtttccaggtttaaaatgtagtgagaactgcctggattaaatctgggtagattgcatgcttgattcatgttcatagcatatggagaatgagaaattaatgttaattgatctaattaggaattaggattctctgacgtctaattctctggtttattttgctcatcttttttttatagttgatagaatacatagaatgcgtgggaggagatggggagaagagagaattatttatgcaaaactcatgtgatggcaaatgccctttttcctaaagtaatgaaaacaactagtagcagttttgttctcttgacagtttgtgaataggaatatttgtgggtaggagatatatattaattggcatgacatatttttgaaaatgagtcatgaaactgtgacagttgttttttactaggctaaaagaaagtacttgttatttttgttatttgtaaagctaaagtatttttttgtgagtatacatgcrtctaaatatagatgaaaatatcctgttttcagctatgaaaaagaaattgagcttatggttgttttataaaccacacccctatactttrcattaaaatatgaagtaaatttgtatctataccgggaagtgattttctgcacttcagtgtgatgatggaatataggtgtgctaaaacctaaagtgaaaaatctttgtaacaacttactgtactgggtagctcatccttattctcctcaattttcagaaacattttcaggcacaaaagaaaattatgtaagaaatgtagtgtggtatgtcttataaacaatatcctcrtgttctgaatacaatagctttgaaatattacttgctaaacaattatttctttagacaaaacttgagttgtctcttggcttttattcttttaacaacatgcatttttagaaatagtctcttaggctaaagaacataactcaccaggaaaacatgattaattcagtatatgagaaaagctctgagctcaaaagcaagttactctttttttttaagcagaatatattttagaaatttgggtaggagaaattaatatagaagattgggatttagatatcaaaatgctgagtaccccatgcagtcatctgatttatattccgaacttgcatagtttttgcaggctcctggaatgcagcctyccaccaggccatgggaaagactcagcgggaccacgcaggatggctataatgtcatctctgtccatgtggcactcacttcaagactcyagagtccagctagaaaggactctggagtccattgtgtaggtgacattggtgtaagcacaggcctttatcagaagtctgaatctaccttttcttcttgtgacccaagagataagaaaggccatttcccctccctcctgagttatttaactttatttctcttctgttcagtgagaataatcttatttcagtgttgcgaaaaccacgtctatgtgaaaggtttttgacagtgtttaaaacatgatattgctgtggctaagcgtgaatgctgttgtcgtggccctgcctcctgcctctggccagcctgagtataagaggatcactttctttctcagcactgccaactaaatgccaggagcatgtagaagaggagaggatcgtatcacaaatacctggggactgttttgtttttttaactccaaagcccaccgccaaatatcctgtttcctcatccctggggtaatagatgcataaagataggtgtattttgaaaacatctcccttagaacaatagactccagatttttttggatcacatagctgtgtttatgtgaaatcagggcatacgaataacatgtattgtgatgtatacattatagtcatatagaagtattaatgttctatacattttaatgcatatttaagactgaaaaaggtaagattaagtattttcagtaattttaacactacagaaaatcttttgctctccgttagagattttttcatgaaagcagtaaaactaatttttgaattttctgaaaatgttgttttaatagtgattttttaaaagcctagctcttaagtttagcatattttgattgtcagttttaatggctttcattgctgaaaaatacaccccacaaagatttgtaaatacaagtggaagaactgtatcactggccatttttactaaatcatacgaaattattaygctccttttctcaacacatctcgccagttatacaaaggtttttagttgactttcagatgataaaattttattctgaaacttattggaagtttattgtgtttttaaacttttaacaaatagattcaaaaaccattaacaaatgggtttgaaactctctggcaagatttctaatacactagaatattctatttccaagttactaagtgtgctgatataaaagttttcataggtgacacagtttcattgtttttggcaaaaagataacaaaacagtggaaatattttcaaacatctgtttgtataatactctttcaaagctttggtttctcttgaaaagcagttaatttcttactcaatgttgagtctcacctttactttgaaaggaagcgtaaagtgtgctgatttttttttccccctgctaggtaacatactactgagaagcacctctgacccctgcaaaggtccatgaatttggaacacatgttttataagggaaaagtgcatgactcatctcctaaattccacaacttttttttaaagtgcttgcattcttcttccctctcaaccatacacagtagttctttgaatacaggaaataagttagcaaatacccgaagcagagaaatgttagaatcatctttactttgatgcaattctaaagcaaacttcataggctgtgtaatttattctaatccttgagtcttcaaatattgactggtgtttctatgcctctgcccgcagtatttgctgacaaaggaattcattcaaatttgatgccatattggtttttacatgctttaagccatttttgccttggtagaaatagcaagtgcttctccagtaatatgtggtttttagtcttttsctagcagaggaacccagaaagaagcttctacatgttaatcattaaattaataaaattttgtgaagtactgaatttgtagtgtagtactgcccaatgttaaacatagtgaaraaaactagagttgtttgtcttcaggtcctgagtgcttagattttaaatgacttgcgcattttgatagctctggagtatcattagctggtatctctaggcacagtgtacacttagggaagctttatcatgaacaaaaatgaatggaagcccacattttaaataaagtcttcccagtcattttaattgttgtgaactattcttttcatatctgatgaaatcatcagtgctttgacctcatcatgtgactgatagcgagaaccctgggagctcagggctcagtcttaggcctgccacgtggcttcttgttgattggtcctgtgtgtttaacattagcttcagcccatgtggttgtttttcaggcatcctcttaagcacttacctgttttgtgagcgttgctttagcttagttaaagccagatggtatgatctgcaaatccacttaactgggcacatgtaacctacaattggttgcaatgcactggacctgagcagtgcacggacgtcccctgccaaccgccaacctctaagctcctactgttcctgggggtacctcccttccaatatacagctcatgacgctcacattggactgaggagggcattcgtcagacaagctgtgtaaaggcmgccttttagtataatgtacatagagaagctctgctgtcttctccccgaggagcacaccgcccttgtggaagacccttgcgacccttgccttagagctgyggtctgcccctgagttagacgcttccttcgtgagcactttggtttttctctccatcattactatgaaaataacaagtgatcaagaatttaaacagtacggaagctcaccattacaggtgagcttcacccccgaccccagacacctaaacttgatctttgtgctttttttgtgctttctcagtgagtttcatagacaaacacatgaatgtgtaacctttttttwwaaaaaaaaagtcaatggtagcacattaaacgcatctctatctcgcttttctcactctgcactatttcttagagaatgttccatgttggtttacacagctatacataattatttgccccggtgtttgctaggtaatatgcttgtgccattatttatgaatttgtcatgttaggcattttcttttgagtttctgccaaggcagatgatgctggctctctcacaccatctcttttctcccctcatccttcttttttttgaaataatgcatactttttttggtaaaataatagcattcaccttactgtgactcagttatttttagtacttkgtgaagtactaaatttggcgatttagtattgcatgatgttaaatagcattgagaaaaraattatagatttgttatagtctccttcatgctaaaggctttcctcycatgtccggtggtttgttgctctccagtcaggttttagaacgaggtgctggaagacagacgacttgtcccrggtatgtggagtggcrgtgcccgtccactgacagtggggaagaggccagcctttgtgctgccgcccactggcggaattattaatatttctagggcctttccgccagaatgggaatcctccagtgtcccctcggggagtgacccaggccaaaggtgcgattgcagcagagcaggggacagcggcagagggcccaggcctcagagcacagatggtaactggctcctcccgtgctccgtgacgcccagcccagccctgtgtgagctgggtcttcccgtgcccgaagcttcttgggctggggtttctgaggaatcagtcctgtgcctctcatgcgatgggatggcatggacagcaacaggcagcgcaccgtctttctgccacctgaaccccagctgtggagcccctcagcatctgggagcacatggcattgagtggccaccggcacagaggtagcagctttgtctcctcttctgtctgctaacaatcctctactacttttctgtctttaaaaaattctttgacatttctcgttttctattgtctgctctccaatgttcttgtcatgtttggtggtggtgtttttgattttcccccaatctctaacttcctttactgtcatcttagcagagcttctggaaggaaaagagataaaaatgcayggtcaggtcatctcttaaaatgggaatccgggaaagcagtgtaaayggcagcatggtacccttcctctcattgttctttcaggatggatgctgggcaggaaagcaggcggcccctctgttgtggtcatggaaagaaaaacaaaagttctggtgtaacagaattaggatttcattgcttccttctggaatcttaacgaaggtcccaactgtgaagtctgctgaacacatctcagttcaaaatgctgaactgtacatgccatccccttctccattgtcttacaggttttattaatgatgtgtttcagtgattgattttctgaatgcacrgctgtcactcactgcttactttttcagtagatgtggttatctggggtacccagggacacctgtattacataccaaactcctccccatcttctccatggctagccagatttaggtatgagatttagggyttctggccagcttggtatcatctagcaccttctggaagctttgccttcacagcttacttggggaactctagttttagaacrtccttatcccaggatgaatggaaagaaagataccagggaagtattaaattattttagcatattaaatatctgactaaaaagtaaaatgtttatttgaagttttcaagatcagtttcttagagtgctgtgtgattgctagtggtcatgccatttggatgagtgaagttcttatttgacatccattaagtatttgagtgtcttcaattgcaagtggcagaaatttaccttcctctagcttaggggattgattggtttctgtctctggaaaggatgttggattaggctggcctcaagatcccccrggtccagagattcaaatgatgtcatctgcacgtggctcttatctgtcttatcccgtcttttctgtgcatcaatggtgatgcttaactttacgtggctgaagacatggttacaggcaactgcaggcatattagcttcatttagcatctcttccctgtcccctgtgtcagtttcaaaagaagaccaggaacttgcaatgcctttgattagaatattggagctgtggcttttcttccartctttgtccctgcactgccacatccacmtaaatgaaacacttaaagaggttatgtgtgtcttccaggaattaagtggatctctggaaagttgttttgtgattcatttgaatttgtgggaatgtctcccaagtgcaggcaccagagccctgtggtggctaaagccctggaatgggccaagtcatccaggcaggagactccagggagtggcaggaactgtgcccagctggagggtgtatccccacagctactcagcaccagatgagtgatgccgggcccggtgccaggtcttcccatttttaaaagaagccagaaatccaaatttgtatgtaaatgttctcaagtctgaaaagattggtgattaattcaagcattttctaaatcactatctgggccaaagcacacatcactgtgatctcttctcagactcgttttttaaagtataaagcgagatcaagagtgctggggcactttgctcaaggccagagggtggtgacgtggctgaccagggctcagtcataggtctcctgactccctgagcctggggcccttttgaatggaccacgttgtaagctcttgttttcattggcaatgtctttgtttgaatttttaaaaaagccagtattacctctgtaccagattataaatttttggcctgaattcagtagttttatgtcagattctgtggttcatgggaggtagaattttaacatgactacattcttttgtatgaagttgacagtgggccagccggcaaggatgtccgtaagagtctgattgagcttgcagataccaagtkgacagatgggagagtttgtgtctatgttataaattaaagtaagattctaagcaaaagtttaaatatttctgatgacattttaattttagtcaagtagccattaatcaaaagattgacttaatgattcttgtttaattgaaaaatctgctgaagtgaattaatttaggcttttgagtttrtggaccctggaaaggatgacctttgtgcttttattctcattcctactcacctttgatatcagaataactttatttggcttgtcaaaaaaagcatttcttttctagatattggaaggtagctcagatttcagaagaaaatgttaattaaartatacttggatctttgatttttgtcttatctgcagatagacatcaacttttgagaaatggtcttagaaaatgaatattagctgggcgtgttggctcatgcctgtaatcccagcactttgggaggccaacgcgggtggatcacctgaggtcaggagttcgagaccagcctggctaacatggtgaaaccccatctctactaaaaatacaaaaactagccacacgtggtggcgcccacctgtagtcccagctactcgggaggctgagacaggagaattgcttgaacccaggaggcggtggttacagtgaactaagatcatgccattgcactccagcctgggcaacagagcgaggctttgtctcaaaaaaaaaaaaaaagaaaaaagaaaaagaaaatgaatattgatgaagcagctgtagaaaaytgacctcttgcctcaagacaaataaaagtacatttcccagacattttcagctgccygttttttcctgcctctgtaactgattctaatttgccctgcctgtccctctgaaacctcagaactttcaaattgctatttggtttgcagggtaggttgtaatgagagccacagcattccaagtgtgggctacatgcctgaatcatattagaacttcatttttttttttaaagttcttaattgtttcaacctatattcattgtaatattataaaaattatttccaaatgagagctggtgctcaagttggtgattttttcccccagtacaaaattaacaattacacatgaatatcagatagtgaaaatcagattaaaaatgtttaggtaatccctcattctcccaataagacacttagtagaaaaaagtaagaaaraattatgcctttatgatggtctttgttctaagtatgttctggttgctaccaatacacatcaaaaatatgaactttggtgtataaatagtcgtagtttccccattttacaaacaaattggacacaactttsaagtattctgaaggagaggtcgtaggtattgcacctaatgtgggtaattctgtgtcagccaggcagcctactactgtgttcctgcacatgattctaaccctggaagctgtattgtctctgcttctcagctcccagccaagccctctgcacctctccagaaataaattgtgtgcagatagctctggagagagaagagcatggtgtggaggggattgtgcaatgtgatggccttttttaggtgacattatggaaaatattttcttagcaatgcacctgaggtcattttttaaacctttgtggagaacaagtgaaagttctgatcacaactgcagggcccttctgtttgcgggacagggacaaaacaagtcagaacttccagctgtgagtcacttcaatagctctggataccctcaactcttatctcttaatagtcctaattttagttctctgttcattcacttcttaaagcgaatgaacctcagggcagaaattgttcaaagtcatttgtttggtggaaggaatccttgtgtgctttatcagccacagagtcacaaaggaattttgttttcttaggatgagtccagtaagtggaaagtatctattttaagatactgataggaagggatgtggggaaagagaggagagatttttatctgtaatgttgaactcatatcacattttaggtcgtgaacctagcgagcatccatttgtagaagccagaagcaattgcaaaacttgcagagtctagggaatctggtatgacatatttattgtttgatttccctatgaaattaattacagtagtatctagaatagtcatcatatcaagttatgcgttacacttcttcctgttgggccctcattgatcttgaaccctttgtgcttagctcgctctggttatttttgttattgaattatgttttaaaataggccctcatatttaagtagtagaaatgtatcttgggagataaagtgagccctttttcaatctgtgtcttgagatttttgaggagggatgcacgggcctttcaagataattcccaacccactctcgacatctcctgtcttcccccatgctcatgctgccatgaaatagctccccctccaggcccccygccacttccgccagcctttatacccaacaggggctccacacaaggggtgcttcctgtttcatctcaatatgtcataatttgtagggaattgtcttcattataatcagattaagtatctcagtgtctcctctacatgtgagaggcttttttggtactttttgcatattcttggctgaatgaaaaccaattactaattatgtattagtctgagaacatagtgtttagggtgaatatatctgaattaattaagtgccattaataatgcctctcaggatttatgagcatattctttgcttgacttaaaaatgatataaattagtgaggtttattttttaaatgtcacactgtgagatggctttgtggggacacccctgtatgccgtaatttcagaaccgttaccagctgggtctcacttatttattccttgtccagtagctatttagtattcccatttttgcagcttaattgcaacctctcttttcctgccagtgtgaatttagtcttacatctgcaggagtgatactcattgcagtcagccagtctcacacgaaaaaacaaacctgtgtgttttgcagtgttggagggaacttgcatgtgatgtaaatgtcaatgccttgctcaggagaggaatcaaggtaccttttctgagttgggctatatagtaatttaaaaggaaaggcccacataaatgttactgtgttttgtgttaattatatttttcatgaaggaaactgagacaattggctttaataaataattggcttagaagtagattttacatccttcaaggatattgtgtatgattcattaagatttaatggagctttgaggagtatttattttcccttttttaaaatgacaagaaatgttagatgacaacttttcagtcacacagttctttccagatttacattgtgctattataccacagctggtgtaattgtagtagcccatggtacatattcagttaagtgtgtattttatcatctgccctaaacatgtacttaattactttttttttttaaataaggaatcttttagaagtttttttgaacacaatgaagacttaaatttcaggcagatatcttatgaagttgctaggaatcttatctcactggctgttaggaatttgaaagtatcttgggctcagccagtccagctccctgaattttatattccaggtaactcatgtgagttatgttggcagaagatttaagattggactgagttccaggtacagctctactgtttaatagcttgggccttttctaatctcactaagcctcaatttccttatctgtgtaatgggcatgataatagcacctcyacccccttgggttgtaaagatcagataagatactgtgtgtggagtgcctcacgtgggtcttggcacatgtgcacctagcatgagccrtaaggttagtgccaagtgtggcagtgagttagggtaaagctgagycaagcctgaggagctctccccggcttcctccctctccctgccacatgtcagctccccytctgctctctcccctgcccccactcttgagtcataccataatcagggacattttggcgctctgcactagccctctccgccccgtttgaccctgtttctattgatgcagacaacaaagctgctttattttatgtcatctttggagccccagcatgggcagctttgatgcccaatggccgggcagcaaggcagtgcagacccacacctgcaatttgggggtgactggcayggcataaacaggaacaagaagtccggcataaacaggaacaagaagtcgctcccaggatgccctggggccccaggctccagccactctgtgtggggcggggaatttctaatacacttgttttacaggcctgtgagtgtgaccagcagtacagagagaactatactgtgtttgccaaaggggattgacaaccattaagtatttgacaaccattaagtgtaaagtgatattgctcttttgctgtgagaattttattgaatatttgcaacctgaaggaaccttaaaggtggcctgtatgtgatagtataactggtgctttcactttgttcagctaacctaagaaaattttaataaactcaaaaaccactttcatcttcatgaattaaaaactgtttggatttcacaatatatgcttattcctataaagggtgtatgattctttccttcaaaacagtaatggttaacacaaatctttctgtttcctttatgaacattatgtaacatatagatagaactatatgtgtgcgtgttcccaatataagtatcttagaaaagtgtcaattctttgtataaaaaatactgatgaaaggacaggtgggatggttcatgcctgtgattccaacactttgagaggctgaggcaagaggatctgttgagcccaggcaacatagcaagaccttgtcaccacaaaaaaatttttaaaattagccatgcatggtggtgtgcgcctgtagtcccagctctcagaagactgaggcaggaggactgcttgagcctgggagttcaagactgcagttggccatgatcatgcccctgcactccagcctgagcaaccctwtcttttaaaaaaaaaatcctgataataagtgtaaaataatgatgataaaccactgttagttatcaattttagggtagatcatatagaatggttggtctaggtaggatgccaaactaataatttaaagttttctaaaactggagactttgaaacccaagaatctttattttgaaatctgaaagttcacagcccagagcgctatataaaatattgaagttaacaaataggattaactcagccttcttcaatctgggagctcattgccattacctgcatttgcaccaaaatttgaactagagacaagcaatatattttagtttgggtaagagcaaagtaacaggctaaaggagagagtttttcaggaagttaaatgtcttttcagttattaagcagctctgcaagtaatccatttcagtaaaactgacgaatgatcrctaagcctcatatacaacacaataaaatgtgttgtagaaaaaataatatagaggctcatgggtacactattgaaaaaatagtttactaattaaaagcttctcttttaagtagtagatcctctgttttgtgaagtgtttgtttacaagtcattaaatctagctaccacctgacgaagaagttttctggggggaatccggaggggaaataaagccaaaagcaatgtgatgcaaatgtaaagaatgaaaggccacctggaagaaagataaagtagccataaagtagctgtcagatctaactcagtatcctgccgcactactcaattatgaaggtatagatactgctgtaccaggacatattacaatctgcaaaatgagaggttagactatatgatctccgaaattctcttttaatttcagcatcttatgattccatgtaaaccatttgatttttcttcttgtctcatttcttgtcttcttagataaagaggaccaaacattctctacctcttggggtagtctggttttggaagatggggaatagctaaaagtttgtgtttccctgacatttaaatgacacagtagtcagaactctccgtccctcaagggccatgtagggctgcactccttccaagaagcccgtcacccacacccgtgaccacgggctcctgctctgtgcttctgtggcacttgttgtctggcttcagcatttcttctgtgctgcttggtattttactacatgtgaaggtcttgcaccatcgactacagtggaaaactccttacrgtcagggatcttgttttgtactgactttccatttccaagtgatggtcctggaactcctttcccctttatgtcacactcagccagcaaacaccctccatcctgaagaacgcctgtcatcctgtctctgcacctgcaccctggggttgagctctgccagaatgaggaatgtcatccacaagttcacttggttcctgtacgtgaaccatcacaaactgtggatgacgctcagctctgcccggaagcccagcctcctgtctctatttaaacttgtccatccacattctgcagtcccctttttaagctctctgtgttctctttaacctttgaagtcctcagcctgcttctcactcttagcaggtggccatggccctaatccccagagaaaataggagccagtggtcgggagccccatcttccctccatcagttctgctccctccccatgacacctatctcttttccctcctgtgaacaggaaagtcgcttccctcctcagagcctctccttcctgcatgcctgaatcccatcccctcccactttctcgagaagtgctacggaatgtcccttctctgtcaggtcctccctctgtccctcatccctcttcatctcgctcctgtccttccctgccaggctccttagaaatcagccctgtgcagtgccagcatttccttaactcaacttagtctgggttccattgctacactccaccgaaacaactctgccaaggttgccaaggacctcctgtgccgttcaatctggctgacatttcccagtccctgccttctcaaaagcatcatgatcatcccatagcatgtttgaacccccttttcccttcactcccattgggtgrccctgtgctttttcacttcctgcctcratggcagttttcccctttctcatcctcttctccaggcttggaaacattcccgttcttgaagactgcttctccgccttcctccccatcacaccggcccctctccaggttacctcatccactcctctggggagctaatgtctgatgcacagatacacacatttttatctcttgcccctgmtgcccctgggaacttcagacccacctgtccacggcctacctgacrttgacacttagatgtcccaagagcgcatgaagtttaacaagctcaaaactgaactcttctcttaagatgcattgtgccagtcgttggacccaccagcttcccccgcatgcatgcagcattccctccatctttccctacatttctagtctgtcatcatcaagccccatagatttcagcacttcagcatgccggagtctctctgcttctttcgtttctgctgcckcctccgccctctgctgagctgctctcctctgtctggtgcaattctacagcagccgcttcccggtgctcctgggcctgytgttcatccctttcatgccacgcaccttgtctatttctgcactgttttcccattaacagtgtcccctcctctctaggactcgccttcttcctggaagccctgtccacctgccctctcctttctccacgagccattgctgcccagggaagcctcacatgcctcccccatctggcctgggccttttccatacttgctcgtagcccattgtgcttctccctcctgactctgtcattgttagagttcaacacttggggcagttcttcagttaatgtgtctgcccctctggaccataagccccaagaggacaaagactggtgtccgagctgtgcccagcacagagtggactcttaaaggttgtgctgacgcgaggatgggtggggaaggaaaatcaataaggaaaattctcagtttactcattccatgttggctgaagttttcatattttctccacaaaacatgttccagagcaggtaccataaagcaaaaggatgcagaaagtttctggtttcctgtttcctgtctgagaagactctcttaagtgatactgatttaagcagcctgaggaggcatcaaagctttggaggatctgctgaacacatcacgcgcatttaaataatcagtgtctgatcccacctccacgttgggtttcgctttctcttgttccacaagatatcgaagtgctgattgagttggcatccagcttcattcgcattgtgtttattatcacaagacttggatttccattatgattttctttttctgttatttttcaaactttgatattccactgatagcataaggatacataaactttaatttttcatagatatactctgggaatgacttagtatcataagatgcttgagtaaagtgaactggagaagctatatgacgttagattcctgtttttgttcagtgggtttgagaagctagctgtcagctgtcactatcattcctctgttgtgtttgccttttctctctggccaccattcctttcttctctttgcatttggccttctttagtttaactacagcgtatctaggtatgctttgagtattcttacttatatattgctttgagtattctgcttttttttgtttttttttttgttgttgtttgttttttgtttaacagacatggwtccactctgtcacccaggctggagtgcagtggtacaatcacagctcactgcagccttgaaatcctggatacaagtgatcttccttcatcagcctcctaagtagctgggactacaggtgcacaccaccacgcccagctaacttttgttatttttttatttgttagasacgaattctgttgcctaggctggtctcaaagtcctgggctcaagcagtcctcctgcctcagcctcccaaattgctgggattacatatatgagctgctgtgcccaactgtatctacagatttataacgtgcattaattgtggaaaattctgaatcattattttttcaaatataatcatcttttgttcatcttctatttctgtataatttctcacagcttaaaaaattctatatctgatcatcttagtaactaaagtcttgaaaatattaattagtcgttgctgtctctgtgagctcatgtttgattgatcttcatctgtgggaagcctggaggcctggcaggggttgctctcctccrgagatcatttacatttacttccaccaggtgttggggccactttcaaaggcttccttcaaggatctcaggttaacgttgaagcctttgttgagctcccagctttcgtttggcccaagtaagtgttgaaactggcatttgtcctcggagtccctcctttcaggcttgcttaatggtccccacactccctgtggattaaactcactttgggggaagaaaggtgtcttggagattgcctctactgtctgtgaacccagcaatgtgattaaaaaaaacaaatagctctatcaagcagctcattcttttgttgtttgcttgttttgtttttgtaactgagaatccttcagcgtacctgccttctatcctactggaagcataaatctttgacatggtttttattgctagcaacaaggaaagtcaacatgcaaaaatagttaacsaagagaaagttcaggtttttcaaaattgtgtccaaagctgtccctttcattcactggaacttgatcttaccctttgtcctttggaaacacatctttgcttttgttcttgactcatgtccaacccacctccttctcttgtagtcctgggaccacgtgtcttcttccttccctgaatggaggttcttcttttggtaaattcatgccccaccccaatctttatttttaaacttagttcctgtaagggaagtaaagagcacacagatgagttcaatatataaatcacgtccattaatccaacaaatatttacvtgaaaaatttaaaagctttctttctcagataacattttctttacagaaggaagttgtcctggacatgtgaccaaagggtctgtgggatgaggttgtggagggaaggtagggagagtggatgggcaagaagcagggacaggtggcatgaggattgactctccctcaccactgccgtccggtggccaccatggacccagcatcagacagacataagaagtgggaatgaggaaggcaggaagagagattatgatggcagagggaaggagggtgggttggtgggtgggaagagaagttcctgtgtccaccatgttttttttcccaaggtacacattcaagtcaagtcctcctcacctggatagtaataacccatgctatttattttatatttttccagatcaatgaactgagccatgttcaaatccctgttatgttgatgccagatgacttcaaagcctattcaaaaataaaggtggacaatcacctttttaacaagtaagtacaagtatgacctttcataagactagcgtggctgctaggagtacaagttttgtgaatttttgtaatcacataatttgtcaatgggtgggagtaaagttttgctgatgaagttaatcctgtgataaacataaccatctgtcatttttagagaagcaacagcaggctctctgggataatatcctttgccatatggcatattgttctctatgaatatcttatacgttgaaagtgatattctcattataattcaaatttttgaagctgtaaattgcttggatttttgagcagttatgaacctctgctcttgtacacagaactttgaaaatgatgatttatgaacagcaatgactccatcttagaacaataaagacccaaggtacattttcataaggcacaattagatgccatgttgggcattgataacattcctccttcatttgaatgttgttttagacgtcattatgaagcacctattatatgttaggtggtccattgagagctagagatgcaatgatatagaagacayggccctgccctcaaggggctcagagtacaaaaactgacacatatacaaactgctatagttcagtgtgcaaagtatgataagggaggggtgtgtgcatatgtataatttaatttatctggttgtgtgggaacacaaagagggaaacaattctgaatgattagggtgaacctcaaatcactcccatgtgaggatcattatgaaatttttttttgagacaggatcttgctctgttgctcaggctggtgtgcagtggtgaaattatatctcactgcagtctcaaattcctggggtcaagcaatcccccttcctgagccttctgaatagctgggactacgggtgcaggttaccatgcccagctgattttttaaaaaactttttgtaaagacaggggtctcactatgttccccaggctggcctcaaactcctggcctcaagaaatcctcccacctcagtctcccaaagtgctgggattacaaatgagtggtgtaagccaccatgccaggccaattatgaaatttcttcagggggccattgtccttatgtgaagctgatgttaatttttctcataacagtgtttagaagctgactttcagggaatttcctctaagcaaatttagaatgtggcatttatataaaacaggccttttaggggggtgagggagtggccctcctttcctcagcagtagctgagagggraccttgctccgctgcctcttcctaactcactctcccgccattgtgcttttccctcactgctccccctgcctggcccgttccttccccacctcttgttctttgaggaatggctgcagtgtgtggccaggatttaaagaggtcacatagtccaagcgtgcytgtgacaaaggagacagacagacatccgtctggccccctgtgtctcctggatctttctgcgggttgtacctggttctaggaagcacacctgtgcttttggtargcagtgaactctgaacccttctttggctacctgtggaactcagtggtggcagatgcaagtctgattgactctctctgagctttattccacgctgtgactgtttcagagaaaacatgccgagccatttcaagtttaaggaatactgcccgatggtcttccgtaacctgcgggagaggtttggaattgatgatcaagatttccaggtgagttgcgtttgtaacatttgcttccagtaggaaatgggttttgccatgacttttgctgtgtcaattgggatctrtatttttgtcaataaaagtattatataatagtaattttcattttgtgtaagaagtttttaatgttcatgctgaagtaaagtgttctcttgattggggacctctatacatatgataccggtataaaagtcagtaggaaaatatattacttttctttggaaggagactgagcatgtgagggttttatataatactctcatttccaggtggaaattaacaggctagcagagctgcctgttaatttctgctgtcagacatgtcagtagcctgtgtgagtgtgcatgttttgtatcttygtagaggctacttaggactctcagraatctttatcttgctgatttgctgcttttcaagttggtcagactcttgctgcagcatttttgtcaaagggcaccctttgtgcactgcagtgctggactgtggagtgaccatagcactgtggtcagcaccaggaacccaacatcctgggcgtgtcctgtggtacatcttcctcttcatcttgattcccaccacgtaaaaatgtgcactgctgctctcctccccacactggcctggtccttcattctaacttttaaacatctgttttaactctttaaataactgttgagccatgatcatttttttctgagaaaggatttgacattggttacccaagtttcatatagcgagccagattcgtaaatgctaaggattttttttaaaagtggaaatccaagggacaggttgagtatcccaatcagaaaatctgaaatccaaaatgcttccaaatcgaatattttctgatcatcaacgtgatgccacaagtggaaaattccacagttaagtgctcaacacagcctttgtttcatgtacacaattatttaaaatattgtataaaattacctttaggctatgtgtataaggtgtatatgaaatagataaatttcgtgtttagacttgggtcccatccccragatatctcattatctttgcaaatattctgaaatctgaaaaaatctgaaatacgactggctgcaggcatttcaaataaaggatgctcaacatatactgacttaagtcccttcaaatctagtcctaatctgccctcaatttaagatctgaatttatcctgcattaagtgacatattgccaccctgggtgactacagattgagtactgatacagcttaccctgtattttcctctgaagaatagggtccctcaggcaaactgagatagttagcacactttcctaaagatctgtgctcccactgccctctctgtaccattgccaaaaatttccaggaatttttcatatgtttactcaggcatgagagaggctgccatgtttggagaaagcagcgctgaccaggctgccggtgacattgtctcatgatggcctggggttgtggtttacatggaggtccagaccctgagctgaggctctgtgtacacagaagagctgagggctggctagtgggacaggaaggatgtggttgctcatctgctattaaaactgcgtgggagccaacactcctgttagggcgtttctttttttttcttgatacaaggtcttgctctgttgcccaggctggagtacagtggtgtgatcatagctcactgcagcctcaaactgctgggctcaagtgatcctccgacctcagcgtccagagtagctaggactacaggtgtgcaccaccatgcccagctaattttttttttttttttggtagagattggggtctcactatgttacccaggctggtctcaaactcctggcctcaagccrtcctcccagagcatgagccagtgcacctggccttggggcttaatttttaagagagaacttagatcacaattatggacttgaaatttactgctgtaaaaataaytaactttaacagaaaattattagaatagtaaaaagcatttctctgaagttaaaattaataattctgtatcactttagaaccattactaaatttaaagaggccacctgaaaatgaactaggtgcttttttttttttttaaaggaattaacagcagatagcttcagtgtcttaagaaaatctcctctgccttaagaaaagctgaacaccagtgtgttcctccttctctccacgtcctttttttgtttggctgggttttgttttaataaaacaattccactggcatttcacagaaactgacttttgagggcccatgcatctatcttatcttgttagattcctcaattcattattgaaatgaagtctttctatttcttgtcataatcaattctgtcaaatgagatccaaaatgaacccattayggtctgagttctgcactgcagcagagaaaagtagtttttaaaatttcctcaaatgaccaatttagttgctgaaatgcaaagacatgaactggttttccttccctttttttcgccctacaaagaaaactacgtaagttgatattgaagtcagtacaaattgctgagtacaaactttgaaagaaaattaggcaagtggaggatgattcacaagtaactaattggcaagtccgttaaactcttcacatgagagctccctgttggggagagtggtgtgagtgtgattaatcattcgaacactcctcctttccttagctctgcctgctgctttctctttggcaactgtatttctattaaaaaaagaaaaaaaagaaagaaaaagtgtgtattcagagtcacttcagtactgcagaggtatactcttcttccctcctcagtcgtatatttctttcccagtgtctgtacctcttaaaattcttcagtagggtcagggaccctgagttccagctgaaaacaggatcgtaaatctggggctgtatcccagtcttttggctacttggtttggaagaaaggagggtcgttgtgacagctctggctccagggtcacctcgcaggcccctgtatactgcagggattcaggcggcaggcgggcaggggccaggacctggggcttcagctgcctggcacattgttactgcccagacagttcaatcctcatgcccagttcaagtaacaggtatcatttggcacatgtggcgccaaatgactaaaagcaaccttgttttcctctcctggagcttgccaatgtgcctttgctgagtagagtctcccaccggccgcctctgtcactcctgggtactggctgctgaagactgcgtatatcggaaaaaaaccaactctctttctgagcttatcaatgtgagctgctttttgaatactctttcccaactgacttggaaagtaggatcagtgacctaggctctcatagtgttttggaggacactggatagctgaaggggaacaggcattgcctgctgtgtttatttttccaaactgcttgcattttggacaagcggctctaaatcaatgtggtggttaggggctccatcgtctggtttatctcgtattcagacctttccattcagccaagtgggtaaatggtcccgacttgtcttgtttgtgtgaccacctttttgctacacctgaaaaaagtaggtattggtctgtggagaccactctgattaaagyagagcatggttaagtagtaacctatgcagttgacccctactggtgaatttaaacttcttaaaaagtttttaagataaatgaaaaggataatgaaatgaaaaatgaaaacattcctgctttctcagtaaacatttgtatctttcctctggttttgatttctggaatatcttttaaaaatgacttttccttgttgttaaagacaaattcaaagaacaattctagaatatccattgttaataacagtaccacagtaccatgtaacatacatatgtaaacctckgtgtgtgtgtgtgtgtgtgtgtgtgcgtgcgcgcgtgtgtgctcgcgcatgtgtgtaaccagtgcttctagattcagaactttttccaattcattagggcatttttaaattgcatgataggtttgtaatatgctcagggttgaatcagtgtgtcatcaaggttctgatcattgtttggccagcatgatatccatcgtcatactttaaaggtgtgtttcaggatgaatgctgcctgggaggcctgttctgtgactatagccgcagtcctgtgtctaccattaccactgcccccttaarccctgatcaccctgaggtctgggatttcatgcataattatccagtcaaagtatttgtttgtacctaccacatgtcaggctctgtgctagccgttttagggaatgcagagagaagaaagggtgaagcatcactttctttaaaaactattgcataccagattctgtattagatgctaacgagatttacagaaacccagcatcttgatttgtaatgttcttcatgaaaatctgcacccctctttccagtctcttatactcatttgatcgtctcttatgtttatacccagagagactggaaagaggggtgcagattttcatgaagaacattaaacagccctgggaagtcaaacggaggcttcagttacatttagtagctgccagagagggttgcctcccagaaaccaaaaagttatgcaggagggagctgatgctgttaaacctaaatagaccacacatttgaaagtgaggcctcttgttcactgtggaggataataccaggtttgcttttcccctacygtgactcctgaattagaatccctcattattgacatctgatgccctttcttctttgtgtttgtaacagagaattctaattttaaaataattaattttaagagctaacattttaaacttttgatattcttatttcaagtttagaaataaaattctaaagtgttaagaccttcagtgtatactaaacttgaagtggggcagcaggaattctgcctttatctctagaatatcaagtctatcctctgaaactttyacttgtagatttctcacttttgactttaaactgcctgagggcaggagcagtgtttgtgtttgctggctgcctgtcacccgttgagcacaatgctgggctcagcaggcacttaagaaatatttgcagtcaggacagtggccacacctgtaatcccagctactcaggtggccagtgcaggaggatctcttgagcccaggagttcgagaccagcctgggcaacacagtgagacaccatctctaaaaacatgaaaaataaataagtaaataagaaatacttgtgaaagagagtgagggctaatggggactttgaagagaagtgaactctctgggcccaagcggaaggcaggagagcccatgaaatgtgaaggtatttggatggtggcagaatagtgggagataaagatgttaaaatagcaagaaacacaaagacaccagggacactgggccgattctgctgccagcgagcagccctgtgggttttgctcaggggaatggcaatgtcatgacatctgtattttcttttcttttcttttttctttttctttctttcttttcttttcttttctttttttttttttatagacagagtttcactctgttgcccaggctggagtacagtggcacaatcttggctcactgcagcctcccaactcctgggctcaatcgatcctgccacttcagccccctgagtacctgggactacaggtatgtgccactatgcccagctaagttttgtaatttttgaagacacagggttttgccatgttgcccaggctggtctcgaactcctgggctcaagcgatccacccaccttagcctcccaaagtactgggattacagatgtgagccactgcacccacccgaggtctgtattttctaaagataactgcattgtaatttatagaatgcatagaagggagataaggaaatcaggagrccatgaaatcccagtgagccaagcctccgtcacccaccatgtaaagcacggagcagcttgaaaagacattgagagaagtaaacccacaggttcagtggccagtggcaaaggacaagagccacagaggcactgggacctgaaagctaagagagcagggatgcgggtcacagagggagggatgtttggggctacaggtggatagaaaggaagatggagttgagtttttgacctgttgacttaccgtagtggtaggatacctggtgaggcttgtggcctgcattgggcattctgggtcacaactctgaatgaggttggagcagaggtccagctgtggtgaggattggcacagtcgtgcttgtgggactcctccttggtccaactctaatgctcaacctacaccatcacccctgtgcttgctcctctaatgcctaagcactgtcattcctttatcactagtagttgcctgttgggtttgctccatttgtcctcacagkttagctgccctggaaggaaactccaccctgctcagagacrcactgaggctgagacccaagggaggcccctctctgattggacagcctcttgatagactgggggaagctccctcacagcccatcagggtcagcaggcatttcttgcactgtttcaagtcctgtttatgaactgagcaaattactgttcctaccaccacctgcccccacctgggaccccaggcttcctgttagcctgtgtttcccgcctcaaacctgctttgggttttgcctcgtggcttttgacagagagctgacagccagtcatccttgctactgggtgcttctctccaggttaaacgctgtgtttaccgtgagccttggggacatgttcctggttttttttttttttttttttttttttttttttttttgaracagtctcgctctgttgcccaggctgggtccctggtgttttaatcatcgtgaaacagcagctgagatttagaagatgatctcatggcactctgtgaagtttctgcaactctgttgctttctctgttggtcattgcctttcatttttatattctttttttctgataagttgtttcattattgataagtgttaaattgcactgtgtcttgctcccctctataatgaaagctattcttcrcttgagatcacagcttagattttctttgaaattccccaagagcttaacacagggctttgaacacagtgggcatttaataaatccttgatgatgatgttcaagttccacattggtcttcaactctctggcggggtcagaggaccatctgtgctcgctcagatatgtcaactgcagacccagaaagcagccttctccagacaagttgctcctgtctcctgggccgtgtgattcgaggcatgtaatcataatcctgagctgtcagcagggcagtgattggtttccagatttcmagtccatgaaacaggtagccagggttggggaaaagaatatttccgggaagttaggaggcctggttgagtcttggatcttcagtgactgatgctgtgaccatgagatactcactcacccctggtgggtctcagtttmctcatccataacatgaggagagggacacagtgctctctccggccccccagctgtcaggtctctaaatctattactgtgccaccgtgaggagatggctgtcacgtgagttctgcacggtattggcatgttcccttatacgagggtggctttacacatttgagcatggcaragtttaagtggcccctctttcaaccaaaaatgaaaacttttcatacatgatttttagcagaatgtatacaaacgaccatcaaaatggaaaaaaaaaacaaattatacaagacttacgtgattagttcaagagaattaaatatgcaaaatgcttggttgtttaaaaaatgcagggaaaagtaactgttactaaatgaggacacttttatgagagagagaaaagattggcggtaagaatgagctaattaaattgacatttatgtttccttcccccttctgggggctccactaatcctggacctccgactgcggaaataaacatcttcagcgcagacgtttagaggaagggggaaaggacagcatcgttaatccttttcttaagggaaaggacaataaatttccagttataaatgtaaaaaggcattacagagggagcttcatctatcattgccttcctttatttgctgttgagaggaccgagatagcaccagagcctcaaacagcttttgtggtttgagctaggatagtgtaaggtaggaaaggtatttggctatgggaaaagtacatttattcaccacgttgcaaaataggcgaaaatgaactaaattgtcatactcttacctgccctgcatcatacagctttgccctagaacttgaatgtttgtccaactgttcgtttttctctagctccctatgctaggagcaaacttagaagcaacatttattggctgtgatgtgtccactgcaatcgtgtatgggtgctggcctgagtagagagcacttgccaggtcacctcactcatccagagacagcctcatggtggatgagtgtgtctaggctagggcacttgaaagatcaatgtttgggccagtcacaaacacctgtgtaatgtatggttacatccatatgaaatgtccagaatgggcagatatatagagacaaagatcagtggcctttctaggctgggggataggggaaggaatgggagtgattgcagataggttcaggtttctttttggagtcatgaaaatgctctaaaaatgattgtggtcatggttgcatgatttggtgaaaacattaaaaactgttgagttgtatactttaaataggtgagtcatatgatatgtgagtcatatctcaaggaagaagaatgcttggagtttgaaactcgtttaatttattcagtaagagacgttttttcccaaaaggttgaaactagtttaatttattcgataagagacagtttttcccaaagttgattttggctgttgttktttttttgggatgggttatggtatcagtatttttatttagaacaggtgactttaactaatttcrtaatttataatatgaaactatcaaatgtatagaaagaagaaaaggaatagccaatgaagaaagtgtatttttgcagtttgtgcatgttgattattagatttttttcccataaactaatagtaaatcatcgtccattccctaagtctctacaaactgacagcagaataataattagaagaatgagcaggaagcttagagaccattaagtccagctgtctttctttgcagataatcagataacagagtaagggaggtgggaagggtgagttggagggaggacgcaaagccctgacttcagcccattgctgttgagatggatcaccctgacactctgaggctgcttcctgggtccattctgttttgtcgtcatctatgtcctttgcccatgtctggtttgagaggtcacagggaagtgagcaggggccagcaatagaaggaagaccttgtgggctgggaattttcaatctgaaacttccttgtgaaattttaaattctccttttaacatgtaagttattattgaggcctttaggaaataacttactgtcacttttgaactgataggtgcagaatccccaattttgtctgtttgtttttattttttaacagagtctctgtctgtcaactaggctggagtgcagtggtacaatcatggctcgctgcagcctcgaactcctcagctcaagtgatcctccaacctcagccttccttatagctagaactacargcacgcaccaccacatccggctaattttttaatgctatgtagacacagagccttactatgctgcccaggctggtcccaaactcctggcctcaagtgatcttcccacctcagcctccaaaagtgctaggattacaggcattagccactgtgcccagcccccaattttgaatttaaataatgtcactttattgcagaccatataactctccaagtgtgtccatgacaaggaatttgatttttaatgagagtagatctctccaaagcctgggtggatttcactgggtaattttatctggctgctttctcctgaagacagacaggtagataagggtaagtgttccagaaagtgaatattttactttggagatgaagaggactaaaccagccctctaaagggtgtttttaaggccttaggtaggatcagcttcatctcagatttgcccttttaaattaggtgattgagaagagaaagaatttttctaaatggtgtcttctgctaggctttttttttttccatgcagagctggtcttaacttgcaaatttcatcttaatttctttttttcccttctcgttttttttaatcctcccagcttagtagtatagagagtgcatatagaatatagagtaacccagaattcagcactcccagtataaaagattgctcctttcaactttggcattctttgtgaagaaaatctgtggagttgtaagcagagaaagtggatgggacagtcttctaaaggcagaaaccagtgacaggaggaaaacaagaacctccgacaattctcagaccacataaactaatttaaatagacatgatgcagtgtgccacatggtcagaaatgtgaagaattcttagggttgacatcgtcaccacagtcaacaggactcacaggaaatgctaagtgctggtcctccttcagccctgtgttacgctgtgtgagtgcctgactctgggcccagggctcagcagcacggtcttcctgtcccaaaggcttattccacaaacacatctgtctcagctcctgcgtggagagaagacagctcctactcttcctactcagttaatgtaaagtaatgaacagtcctagaatgagttcagatagctttgtacacatgttaataaaagtgtaaataacagactccggactgcattagcactgtggctgttactgatattttctacacactttacttggcaaaatcgaaaacctgaagacaggtttggttttgtgccagctggctcacactctaaattggcattagaaggtgtatgtcactatagaaaaatgactgtcccttcataatgcccaccatactctggagcccaggcagggaagcagcacggcagggggagatggaggctctgggcagggcccctgcagggccctccatgtacaccagcccacctgatgttggagaactgagttgggcaagtcatttctgctctctgggtctgttttcttatctgtatattgagtggtttggaatcatctccaaggttgcttccaactctaatgctctttgaggtttatttatacatggagggacccctcgggggcacctgaaggtcactcccaagctctgtttccatcaagggcctcccaacttgtccaagcatccaacatcatgctgtgattcctttttcctttgcaacaaaacaaagcacactgaggagtttcttattcagtgtcagtagatagactgttttgaggcagcacagtgactgtgttgaagatataagacctccttccctgagctcatgtgctcgttctagctgacgttgtcctgaatacatctggaatctgtgaagtgttattttcactgcatgttctctttcatctcagcccaggtgtcctaaaccatcattaggcccctgctgagatgatggttgtactgtcttctgatcggactctgtttcttgggacggttgtcctgagtcaccttccgaggcccatgctttacagcatttcctagagcaacgagtcgagtcttcgagtaaatccttttttttttttttttttttgagacggagttttgctcttgttgcccaggctggagtgcaatggcacaatctcagctcactgcagcctccgcctcccaggttcaagcgattctcctgcctcagcctcccgagtagctgggattacaggcatgccccaccacgcctgcataattttgtatttttagtagagacggggcttctccatgttggtcaggctagtctcgaactcccagcctcaggtgatctgcccgccttggcctcccaaagtgctgggattacaggcgtgccccactgcgcccggctgagtaaatccatttttagagtcataaaagatccaaggtagaggtctaattcagcctgttctctccccaagcttattttccatcacttcatagacccggaaactaaggctcaaagagactaaatgcaatctacaagaactgatgaatgttctagatctcagaccagtgccctcaccattaccctgtgctgctcaggttggagtgcagtggtgtgatctcggctcattgcaatctctgcctcccaggttcaaacaattctcgtgcctcagcctcccaagtagctggaattacaggcatgcaccaccacacctggctgatttttgtatttttagtggagaccgggtttcaccacgttgcccaggctggtctcgaactcctggcctcaagtgatccgcccacctcagcccccaaagcgctgagactacaggcatgagccactgtgctgcctttaaaaacacatgtctgctgcatgccttggaagaaggcaagaaagtaaatgataataaaaatacataaacaattttactttattttaaaggctacaaaaagtctatgattatgatgacagaagtttagtcttatctttgtaaatcgccctttttggttagttcatagaaagctttagacaggaatcttaggcacattgcttggctccattgtacactagtttctttatcttgaggtgggaaaaatggatctagcttttcctctctcacaggaatattgtgaaaataaatatgaaataatgagttggatttttccaggccttagaatcattccaaggatcaggygttttgtatagaattgcatgaactcttttgatttcctccttatcagataaggcttttaatacacttgatttatgtatttttatattcatagtgatatgaaaggtacattctatgttttgacacagtgttcctaacttcattggttatttcatgttcatgaaccttaaaaatattcagatagtgtgggttggggctactcacgtggattattaaaatggtgatttgagacagaatcaagattcgaatttttaaggttttatatcccagggtgaagacatggctgatatcctaatccagtgtctgcatatatgattatagtaatgcctttgaaattgaaagaaaaggcacaaactggggaagaggtagtatctgagctaaggagttcctacattatttgcttttacgtttccagccctttataaacccatatgttgcgctgggcatggtggctcatgcctgtaatcccagcactttgggaggccaaggcaggcagatagatcacttgaggccaggagttcgagatcaccctggccagaatggcaaaaccctgtctctactaaaaataaaaaaattagctgggcatggtggcacatgcctataatcccagctactcaggargcagaggcacgagaatcacttgagtccaggagatcaaggctgcagtgagccaagatcgcaccaytgtactccagcctgggcaacacagtgagaacctgtctcaaaaaataaaaataaaaaaccctgtacattgtcctggtactggtacatagtattattaaacccttctttaattagtaaagtaaatgccatgaattattattctgaactataaagtttcccattttaatcgaactagaggtgtagagaatataatgggaaaggcatgagtgccggtaagtctgtaattataatgtacttaatacgctagactttacgtgctgcatgccagtaaaacacagggtaaacaccattctgtagaccttggttctcatgtgtggtctgcagacccactccagcagcagcatctacttctgaaaatgccccacccctgacctgctggatcagaatctgcattttcacatgatccctgggtgattcagttgcttgttaagtttgagatgcactgactatgcagcttttgattcaccctattggcccatgagaggacgttatactgtcctatctaatgtgcataagaaaacgatctatgaaactgaggctgctggaattctatcctgtgctgaatacagttctcctttactattccccatcccccaaaagttgttttacacgtattgtcagtttgacagagtttaaggtctgttccacttggtctgctccacctggctttcataaacttgattgttcccactttgattttatgcccaaagataatctgcaatcttasagttcctagagttcttgttttatttgaaagaaatacccttttgcaaattagtgattgcaagaaaaaagtaagaccactaacaaagagcaataattgctttttgggggctagcatttaaaaccccacaaggggaaattcactttgattttcttcctttttgttctaagtgggaagtagtataaaggagatcttgttcatgttttaggaaagaaaaatgtaattaagaattaaactcttgttaatgtaggcattttcatcctgaaagtcatttttatcattctcagtctatctaataaattttagttgtcttmagaataactgaacactgccaagtcttgctatttaaagtcattggggattatgtagatttttttttttccttctctcaagttttctaataagctaaggaaagcaaattcagttacttggtggcctggactctgcatctggcaggtgcgcctgcttgccttcagatcaaggtgtgctattgcagaacgtgtgatccaccacaggggatgccagggtggtgaggtgagaatcctggaagatgaagatttgctcatgggccactttyctcttcaggcataggtagggcctgcgtaaacccctgcactgctgcaattgattctacctcaggtggttcagtcctgttgatttcatctagaaaggaaggaaaggataaagagactggaatatactagacagaaaggcactctttcttttgcaaattcatgggcagagctatctatcacctgcccctctgaaggtatctgtgttcccttaacttgacagcatttggccactgaggcctttgaatgcccacttcagagagcaagttaaagagagaaagcatgtttgcctttgaatcccacacaggccatcccgcagggccaggcaaggagtgaaagtcactgctcaggagcagtcggcaaggatggagacgagactttctgggggccaggggtttgctagaccccatggctggacggccattgtcaagaggttggggcaaggaggaggcttcttggaggatgtaagaaagaggagatctgaacggaagagtcacatgggaggagaagggtagacctacctagccagtgtcactagcatgaaccagatcttggagtgaatgatgtcagcagagcccctactcagagcccgtccttgtccaccctccaggagatcagtagttctcaaaaatggtggtagggagtggaggatggaccaaattcaaatcgcctaaggaggagctgttttagaagacactctcccaggctcctgcctcctcctcctggggcacacaggtagcatagtctgcaagttaagtactttactagttgagtagtttactagttgagagtttggattctgagccagccacactggagtcagaattctagctcttcccttattagctatatgccctttgcccagatactaagcctctcttattcccatctcctcatctgtaaaatagtgatgatagcaatcgtaaccattgcatgggaatgttatcagaattgggggaaataatctgtgcaaaatgcttggcacgatacctgtcatataaggaaatgctcagtgactgtaaaattttcttttatgactggaacctaattttattcagaagaaaactttgagagcttgtccaactctgaaaagaactaagtgattaaagttactttgattataattctagacattagcctgctttaaagatattagaatcatagtacaattcaagctgttttcatttcatctgaaaggcttgcaatgtgagttatgatgcatgtaaaaatgttgtcatcctacttatcaatttatcccacacacaaatgtttttgaaaacttgcaatgatgacaaattatctgggaatcggaaagccacacctttaactagttatcttcccccgccttccttcccctcttaccccacccgggaagaattccctgaccaggagcgcacccctccccaacgactcccaggcccgcagtggagctcgttttcacacttcctacgacaaaagatacatcatcaagactattaccagtgaagacgtggccgaaatgcacaacatcctgaagaaataccaccaggtaatttttcttgatctttatttgaaactccaagaagattaacatgcgtagcgatttctcaccaaggccagagatttaaatatatagttagagaacaaraagaacacatttcacataaacatctcctctaaccctgtgttctaaaattacagtggccagattcctggcagttaacctttaggcatgcttgtgctataaaggtcattcattatttgtataacacttttaacctaaatactcttgtrtaatagtttcagttatcactactctgattttaaaatcattcagcttaagatttggcaactttgcagaagtttttgcctgtgccagagattaggtgttgacctctgagtatgtatctatttacacctccgaatcctattttgctgtcactggttcttctgtcctggccccagcagggcccacgccattcacaatctgctacggagcaagctctctgattttagaaggtgggtgttggtctgcttcttgcccccttttcatccccgagcataattccattgtaatcactggaggtaaagtagaccatccttgggagcagcaatctgtctctcctggagtaaattccagcacaagcttctctggtagagcacatgttcccaaggcccagcccgcgctgtgagaggcctccttcaccatggagtataagagcatgaagtccagcgttggacaatcctgggctcaaatcccagccaggtcrcttactaagcatgtgacttctggtcttggttgttttttagagacagggtcttgctctgttgccaggttgaagtgcagtggcgtgatcacagctcactgcatgctcaacctcctgggctcaagcagtcctcccaccccagcctcccaagtagctgggaccacaggtatgcaccaccatgcctggccaatttttttaagttgtgtttttatagaggtggagttttgctatgttgcccaggctggtcttgaactcttgggctcaagcagttctcccatcttggcctcccaaagtgctaaggttacaggtgtgagcctccayaccctgcctggattttgaagccacagtttctttgtttatacagtcgggataataataacacctaatatggattctaaagattaaataggaaattgcatgtcaagtgcttagcacagtgtctgtcacacactagatactcaatgtgtggtggtggccatagcatcgctattatcaagataacatccatggtataaaaataacgtaacaactaagtcacttggagaaattgtagtcatatggtatgaacatgtctgctgttgcaacatcccaggaatcatcttcacaactggtgtttaaaacacatacacacattgttgcttttaggaccttagtcagcttgagctgtcataaaaaaccgtagactgggtagcttaaatgacagaaatctatttcttacagttctagaggttgaagtctgagatcaaggtgccagtatggtcaggttcttcctggtttgcagacagccagcttctcactgtagcctcaygtgtgttggcagggtcatggtgggtgggataggatcaaaagcactcttctgtcacttctaataagggcactgatcacataatgagggctctaagctcatgacctaattagctctcaaaggtcccacctcctaataccatcacttggggattagggtttcaacgtaagcattttgggggacacaaactttccattcatagcagagtcacacggtgtttttaacttaaatagctcccaatcccccaaaggtaaaaattggctgtcacaatgggtattcaaaataaagtgccgcaggtcctgaatatattaataaaaggattctcgagtataaacaatcacacttactaagtatctgcttcgaaggcagcactggcctggacttgtgagctcctagatgtctgtttaaacatccctttaaaagcattactttatgttcatgcatgatgctctaatatcatggattctttcttggcagttgcttattcttccaatctttgcaaatatgatcaattgcattttgcttgcagtgaagtctataaaaatctttgagctatattctgtttcttgaaacttggtactgcctctagtttgttttctaaaatcattagcctctaaattcatttaatatctaataaatcttttataatatctattccttttgaaatttgttctacactgcttatgctactgcctcttattctacaggaaattttaaagtgccaggatgctacctgtgagggggaagacatgaggctctgttatctgaatgaattgaattacaggttgcagctttkaactcttcaccttttaaactgtctactttttcattttttcccctctggaaattgatatcatacttatgcattctctttatactttctttcagttgtctcagaacattcaaagcgaagtgatatctcatgactgatgagagcatattgttctaaaaaatggccatgataccatgctaataaaatgtgacacagaattgaagtaccaacttcttgatgacaactttgagtttagcatcctttgactttacaaaaatcacgatttgaaatgttttctctgggttagttmttgtaacctaacatagggatttgacatatccccagtgttacataaaataagtgtgggatcaaaataagtctattgacacctcccaggggctttaacagtataaagacttccttctgttccactgctacaaaattgttatcttattggtgagttctttattcagaaaagtctcctttatccaacatctatactttttctttttataaacagaatattttaaatataatttgtagggtcttaatgattgggaatcacattattaatataaattatttaaagggcactaagtagaagtcaggagacatagatcctaacctgttaggaactgcctcttggatgatctctgaactcagcttctgcacctgcatttcattcattcattcatttattcatgtattcactcttgaccttattccagaaaggatttaaggtggccttcaaagaagttggaaatacaagctagaataaatgaaaaaaagaaaaggaagaggcagaaagataaaggcacaaaatggagcctggaatgagcgtagatattcatgccaagatgaccagcatgcttgatactttgagtctgttgccaaggagaaatgtaagtggtcttggtactaagatgcaacagggttgactctaaggagttccccacagagcggacacagggacatctgacctgataaaacaacatccttgccacaagctgagaaacatacaagaatgttagagaacttaaaaaaaaattgtccgtataggctgctaattatcagtataggccatgtataaatacagccacagttgcagcaccgttttgctaatttgtccatttttaaattacatttaaacraaagcaaattaagaacaaggaaatgtataggtgacacaaacgttgaccattaaaggtggacatgccactcatatacatctcagcaaaatctcacatagaagaggtttttaaaaatacagcagcagtgaagagtaacagtgttaattacatgatcagagaattccacagaaacctcataaaaggtctcaacattcacacagcttatttgatactgatctattcggggtgacccctgctaggctcactgagggcaggtctgggaccctgctcaggttggcaggtgttcatgaaggaagatgcagtccgccgagtcaaacatcacacccgcagcaattagcaaaggccacaccagtgtgtagtttacatttagtaaatgctgttctacagagaaaggctataatgcacaccggctgcctagccctctcccattctggcttctgtttgaatgttcttcaggctgttcttcttgtatgccacttccagacgagattttgatgaatattactgggtggtgggctcagcctggcatgtcctcatgtgattctgtgtgaccrgacacaggcctgtcattggtaaacccagggaggcctgtcaagctttgtgtttctatccctgtggtttgagatgctcagaggtatttgaggtatatgtcaggccttcattcctactttctgtgggcctagagtacttttagggtttgtatctaagaaactttctctctctagcttcagtagtgatcatcatttcttctgtttcttcttgcttgttgttgcttttgccttggaactctctgggcttctgaaccttccgaatctagacaagtaatgcagatcgttcaggtgcatatcagttgatgagaggctctcatagagggtttctcccgtggagtgaattgcatggactttctgacaactttggttacccaacagcccttttttttttcttttcctttgttgttttttgttttaaggaaatgcagccacagttggaattatattctggagggttaaaattgcccaaggccagcctctggagaagtagaacatggctagttatttgaatatttgaataaattcttcctaggtttaattttctgacacactgaccttcccagcaatctgggatggcaggtggttcaagagcaaggacttggagccagccagccaccttctggtcccagccatgcccctggccaatggcatgaccttgggcaatttacttatacttttgacacctcttggtctataatatttggataatagtaccctcttcatttgggtgttgtgctaattaggtgaattcatattataacatgctcagagcagtgtctagtatataagaagtgctaaatgggccaggcgcagtggctcacgtctgtaatcccagcactttgggaggccgaggtgggtggatcacctgaggtcaggggttcaagaccagcctgaccaacatggtgaaacctcatctctactaaaaatacaaaaattagccaggcatgatggcacgtgcctgtagtcccagctactcgggaggctgaggcatgagaatcgcttgaacccaggaggtggaggttgcagtgagccgaggttgtgccactgcactccagcctgggtaacagaacgagactccgtttcgaaaaaaagaaaaagaagtgctaaatgagtgactgaataagatttttaattaaatatcgttcttgtatttaatttcctacacctcagtgttgaaatcattctcatgtggcattcagtccttaactcttttaatccactagggggcctggtttctggtagactgtggcactgatgcagaattatgaagacttcagccgtgaggagttagatttttcccccaagttccagtatcttgctctattctttatttcctgcccaaattctaccctagctttcactctgtgcaaagaaagragagcatcatctctcagaccaatggagaattcatattaagcacagcaaactttcataaattttgtttacttcatttgattttctcttgtagttgggaaaataatgtttcgctataaatatccttttcacatttctgttaggctgtaagaaactcggatcctataaatgatgattatcagttgattaactaaacaatgttagaacattcaaaaaggaaaaaatggtaaaaaacctatttgcctacttgaatatctttttatcttaaatcgactgaattttttttttccccgcactgacgtgaattcattgggagctttggtatcatgtagcttcaacttgaattaaaattgaaaagtattgactggacacagtggctcatgcctgtaaccccagtgctttgggaggccgaggtggacggatcacttgaggccaggagttcaagaccagcctagccaacacagtgaaatccggtctctactaaaactacaaaaaattagctgggggtgtatgcctgtagtcccagctgctcaggaggctaaggcatgagaatcccttgaactcaggaggcagaagttgcagggagccaagatggcatcactgcactccagcctgggtgagattctgtctcaaaaaaaaaaaaaaaaattgagaggcactgttggtaacatacttccctgaagttgtataggacttagaatgtaacccgagggaagctgcaatataggtgatcaagaaataccttatgaaaatattattgagtattttaatagcttttgaaatgcagcattttaatttacttttttatttcaaagtgactgaatcgataaatgggtaaaattgataaaaaacgacttaaattcctttcttatccttttatttagggaaacaattaatatctttagttgaatccagaagttttgccccaaaatctgaactccctgttaaataagctaatcagcacctcaaatttcaaggattttagggcaaacatgtgacctctttgaaatctcctcatagtacatctgcttatcctttcccgaaggttagggacgttggtgttactattcaaaggatgagacttcggtagagcaaaactgagaaaatagggaccataaaagctaaatacaaaaaagagtggagagggttatagcaccaaaagagaaaaggttccacattgtgtcagtgcttcttagactttcatcagggctctgactggctgggtctggaggggctgtcggggagtctgtggaggccgcctttctaccaggcccccaggtgatgctcatgtgcccccggtgagtgacagggcagctcctgwgttctggaacaacagaacattctgagcactcagttctgaatctgctcttgggcccttttgttcatttttccggaggagtgatcaattaaaatttggaaagtacttggatattctcagtcctgtgtaagtatcagattatgagactaaacacaagctcccagtagaccctctgctgccattgtaaactgcggacacgtcttgcttctctcttagaaacaggggaaggtatttgtcatcttgggagttcctgtggcccaatgagtgccccgaagcttgccgatggcgtcatttgtagccctctgttcccaatgtcctcagccatttcctcctagtttcatggggagctgcccggcacactccccagcaagcttttcctgcagtacttcttctccagggtctggaagttccgcagtccttttctctttcagcctcacctctctccttctgtttctccagcaagtacatctttaacgtgctcatcctggcttccccatctttaacttttcttttccattttccatctccaaacatctctgcccaattctgggtgaattcttcaaaatatatcatccagtcctaagtgtctcttcaactgttctaatctttttttttttaatttcaacaattatcttttttattctagaagttttccagaagrtttttcaaaatctgaccgttcattcctgatagtttcttgatttatgctcatctctgaaattgcatcctttgtttctttacacgttttgtacgtaactattcaaaacttactcctgagagttcccacctctgtaattcctgggggcctgaatttgttgtcatggtctgccaactctcacacacagtgacttgcccaaccagatgatgacacagtttggggtcaagatgttgatcaggatcaaagcttatgtagggaagaggaaagaagtgagattgggcagagggagaagtcagactgccatgctggcccagtcaagcctcagctaacctggcggggcactatggaacatgcccctagaggctcctatgttgggccaaaatgacaggctgccctcggaaggcagacctagaaggagctgcccctgcaggccttctgcagaccgyacacsctcagctgggcagcatgaccttccctggagggaatctgggcgtcccatctctgtggctacacttgctttccttagtgtctgagagtcttactgaactcttagcttcatcttcacctctgcaatgtttgggaaggcctctgaccctaatttacggaagctctttttctgagagttttgtttctgcaaaagaggagggtggggattcccagccctggaccctgtcagcacccttcaagggttttgctaggagtgggagcccctgggcccactcccccaccatgctaatgtcctcagtgtccgtgtacccctgtgctcctgacaggctctgtctagcacctccaacaccttggcttggatcccagctcctcacatgctccctgggcacacctgctctccggtgcacctgcccaaatgwtcagctcccccccagccccaggcataggctactcaggccccagctccccattgtgtgtggggtacaggggccattctggaaccttcctgcctttataccagctaagctttctatctgggatggggctttccaggaggccttgggcttgtcaaagctccctgccagcggtcatacgtggagcagccattctgtgctttttgtaacaagtggcatctgtacatatgataaagcactttattgtattttttacaaagttacttcatttttaatgatgatgttgtttatgagtccttactatggtgtgtcacaaattgaatgaggcacatccgtgtatgtacttaggcatttctgcatatctcagtaataagaatttgtgtaaacactacagaagaatgcttgttccttttaagcttgawttttatcaagcttaattaagaaaagcagtaaagtttcatttgttttgttatatttgttatatttgcttaaatgtagtcatccttacttttttttttttttttttttacttcaagacgatttgaaatcaaattatattaactgacatttacagatcattatccccaaacataccaagacatccactcaaaggaagttgtatcatttatttatttatttggtcattgtacaccagagcaatccataatttcaggcttctttcttcccttcctttcccttccttttccttcccttcctttccctttccttttctttcatgtgaagtatattgtaggaataatctctaaacatagcccatggcacagtaaggattacmgataatttaacctttcaaaaacattaaatgaaacaagactttacattgaagtactaatttgatgctatattaaattgtcacttcaagcttttttaaaaaatgagtgaaacatgataataacagcaattcctgaaagccggagcccaggttcacactatcgtgcggagatataaatatttatctattgcagtacatcacttagaaccctttctgcttcaaccttcagtcagctgtgaatctcttaatggcatttcattctccatgagaatagcaacaaatcagggcttcataacccttattattctcggtgagtgcctaagggcaaaggaaacctaggtctggtggctgttacgttttatgtttttgaaagcctaattccatgactctaatttatcattgcattacatttctaacaagcccacagtagtasaggaaaaagttctgagggagaattaggaagggagaaactttacctttgttgacgacatcatttataagtagacttttttttttttcttttttgagacagggtcttggtctgtaacccaggctggagtacagtggcgcaaacacagctcactgcagcctcaagtgatcctactgcctcagcctcccaagtagctgggaatacaggcatgcgccaccacacctggctcatttcttttatttttttttgtagagatggggtcttctcatgttgcctaggctggtctcaaactcctggactcaagcgatcctcctgcctcaacctcccagtgctgggattacaggcatgagccaccatgcccagctgtaagcagattgttttttaaaaaaagacagaaaaaagtgaaaactgttagtgttggaaatgcatgttacagatgagaaaaatktaaaaagccagcaaaaataggaaagtttctgacagcactcttagaattaacggaagctattatgtggtaagtaatgaagggaagtgacaagagcaagaggtgcccagctatgacagtgcagaagtgaacggtacttaataaaagkaatattttaattttttttttttttttttttttttttttagagataggatctccctgtgttgccctggctgatctcaaactcctgggctaaagcaaccctcctgcctcagcctcccaagtaactgggcaaaaataacattttaaaatgcaatgcagtgaatttaacactgagaataggaaagctgaccccaaagaataagtgtgattgacttagctacatatagcaagtataagaagaattggtgataatcaggttcacttttatgaagtttgagagtagattttcagcacctattcagatggaagctcaatgtcaagcctccgctccaggtgccaggcagagctgctgtttgatgtgagcggagggcttagatacaggtgacctgcagagtcagacaggtggaaatgacaggtgagcattgtgccaccaggaggaatgcctcaggggaaaagccctactcaaggagccgctgaaaggaacactcttcggtattgtgttcatgctgcctgtgctctcacaggagaataagcccacttatctggtgtgtgctcttaatttctgagccacacacgggacggccagcattgttcagtgtttggtccatttgcagcctcatctgccttgggacttcaaagtgtctgcagacaggagttggcagactcatccattctacaaaggagcctcccgggccgcattagagcactgcacctgtcgagtctgtaaagcgagacattaccatcgcagaaagggacaactgtgttgatgacgtccttttgccagtggggaaggattgccttgtagccacatcttgtagaccgtggttgaaagtgaaagaaatgcacctttcctaaacagtggccccaagggactgcattgtaactttggcattcttgtaatctggaagttaaacatgtggaagagaggaggcaaaggttcctcagattgtcttgtggttgagccaacagtgttttacaaaagggtaatagataggatgctttaaactcttacaaagaagagaatgaccggktcaaataataggttgttaaaagcatggcattgtggtacccccagtacatgctcttcttctcactgtctttcttttattttctttttgttgagatggagtttcgccatgttggccaggttgatctcaaactcctgggctcaagtaatccgcccgccttggcctcccgaattaccgggactgcaggcatgagccactatgcccagcctcttcttgctgtttttgaagcattcgcttacaagttattttgttaatttgtctatgatatttaagttttgaagaaaaatgtgctcacagttgtgatcctagaagcaacataagatagaaatattttttttggtgttttacgtttacactaatctcactttataaatacagagacactgcagcattattaattatggagagtccttgaaattgggagtccccgtcatgcattaaagatacaacccgtgtctctgagagcatttggggcacatatcaggtgctcctggaagtctccctccctcacgccttcctgcctttgccctctccacccctcacctcggggccttggctgcatcttggccctgcttgagtcatgagcaggtcttgtttcccttatctccacattcatcagaatgggttgtctttttttttcttttttcttttttcttttttttcttctcagacgaagtctcgttctatcacctaggctggagtgcagtggcacactcttggctcactgcagcctctacctcctgggttcaggcgattctcctgcctcagcctcccgagtagctgggactacaggcacctgccaccatgcccgtctgatttttatatgtttagtagaggcggggtttcactatgttggccaggccggtctcaatctcctcctgacttcaagtaatccaccctcccctgcctcccaaagtgctgggattacatgcgtgagccaccatgcccggccagaatggagcatcttaaaggcagcaagttcctctgtggttggtatgggagcatcatgtctaagcagtgttatgcccaaagatcccctcccctccaagggtgaggatagggaggagctggaggggaaggaggcagacgtcctctaattgttgtgcacgtgattctgtggagaacaccatttatcagctttatcagtgcatacaaactttgggaagttgagagaattttaagtgtgaattctgtataaatcatcggatgtgattctttactcttattcagtgacagattgatatcactagggttacgattctgctccacccctttcctcaaagttctgtttctcccgtgatgctggagaatgaggatacattgcgtggtacagtttacacgtgcggtaatagtcccagaacagataaactgtgaccatttccgaattctcccccaagttaaccatgtgactgccttgttttttttttaagattaacatccttaaaccgttattttgtggtaccctcttttcctcctttcatgcccgacatatgccttttttcctacttattgtgtaaagttcttcatttgtcatggccatcgtgagaaaaatctggggcttccctttcatcataaatgacaggttttttttctgctttcaaaatctagaattttcatatttgtaacacctggaggtaagggtcatggtgttaattataaagagagcrgagagagtaggcatctgtaggaaacatcttgggtttttttaattatttgctggattcatttattcaacagttgtatatgaaatggtttttacacatgaggtcctgctaagggtagtgcttgccaccttcgtggagcttacatttggcaggaagctgtattacactagatgaatcctatgtggatgtgcaactcaaaagaaagggttgtggactgagaatcataagtttgggggttatcgagacgcagatagaaatgtaaacaaacggtgtggatcaggtagcctgtacacagtgaagaagagaagatgagaggacatctaggtcagggccctgacaatgggcatgtagaggaggaagcattggccaaagagcaggaaagatgggacggagtaggaggactgccaggagaacacagcgtctcagaagccaagggagggaggaagccccagacaagagcgctgtttgctcatggggttcaggagagagaaaggcggagaagcatctgtcaaatttaaccactcaaaggtcattgagatctcagggggaacagttgctctgaagggaaaggaaagtaaaatccagagcaggatgagctgcagaatggatggggggttacagagcaacagaaaataagcgtagacagctctgccaagaagccagtcaggagagagaccagagatggagaaagacatggagtcaaagaagggtttgtgtttctttttactttttattgtaaaaatgttcaagcagacagaaaattggtagcatatacccatcacttagattgaacaattattaacattttaccacatttgcatcattttatttttgcagaaatgtttcaaaagtaaatcacagacacatttcctctgtaaatactttgatatgcttctctgaaacataaggacttctcaggttaagaaaattgccaataaattccttcctgtcaccaaatatctagtgagtggcataatcaggtgtccccagttgccctcaaagtgtacgttcaagccaggatccaggcggtgccagaccgtgcatctctgcaattgagagggcgttttgtgttttgtttttgttgctttaatgagagaaacttcagcacatttaagcactgttgagaagctgctagtggagggagagaggttgaggatcctggactgagagggaggatgctcaagaacccgacaagatgcgtcgcagtgtgactggagagaccactctcagaaggggatccaccgtgcaagcactgagtgtctttgcctatttgtgttgctgtgaggaatacctgaggctgggtgattcataaggaaaagaggtttatttggcttgcaattctgcagactgtacaagaagcatggtgtcagcatctgtcgctggtgagaccctcaggaagcttctactcatgttggaaggcagtagggagctggcatggcttggcgagaggcaaggaaggagaggggaaggctcttttccataagcagttctccctatggcaccaagccatttatgagggacccacccccatgacccagtcacctcccaccgagcaccacctccaacattggggatcacattgcaacatgaggtttagaggggacaaatattcaaactgtatcactgggagatggggctaccggaagtcaagccattcccctcccatggcacccttttccacctgaagtaggataacttgcacacggacaagaaccaggtgtctctgctccctgatgcaaagtcagcaccgctcatggtaccaggcatatgatggatgctcaatacgtattttttaagtgaatctatgaatactttttttttttttttttttttgagacaggagtttgctctgtcacccaggctagagtgcagtggcgcaatctcggctcactgcagcctccgcctcccaaattcaaacgattctcctgcctcacccagcctcctgagtagctgggactacaggcatgcaccaccacatctggctaatttttgtatttttagcagagacgaggtttcgctgttggccaggctggtctcaaactcctgatctcaagctatccgcccaccttggcctcccagggtgctgggattacaggtgtgagccaccgtattctcagcctctatgaatgaatattgagagtgatgagggggttttgaggtttaataaaaatggaaaaggttcaaaagatagataacacttccatactactttttatgcaccaggctttgttctaaaaactttataactaactcatttaatcgttaagtactattattacctcccagtttccaaatgcagaccaagaggttgaataactgtcccaaggtcacacaggtaatgaacacggagctggaccgggagggctcttagctgtgtaaggtggctgaggctcgtgagaccccggctaaagctgtagctgtaaatctacagtctccctggttcagggctgacctccagcagctggtgtgtgtaggaatccttggagttaacacccgctggtgttacgagtttgtgctcagcattctctgggtcaactgggagaatccaccaggattctcattcaggtctctttgtgtcaacatctgcctacaacagcgcatcgtgctagagaacagaggttcctagcccaggcattcacagacccagttaaatgttcctccactgaaatgcagcagtgtgcccttttcccagtgcttccccccagaaattcagttaataggtataattttctctactgcaaaattttaacccattaatgctttctaaacctttgatatcacctgcagcttggcagtactcgaatctaatagataaactttggtatgacttgtgggtttgtacatgtttatatcctcaggagttttaggtattcatcaaggagccccataagtgagccatacgtttgagaacaactgtgtgtagacttgctgataaagtagacagactttttttttcttttttgttttttttttgagatggcgtcttgctctgtcacctaggctggagtacagtggcacgatctcggctcactgaaacctccgcctcctgggttcaagtagttcttctgcctcagcctcccgagtagctgggattacgggtgtgcaccaccacacccagctaattgttgtatttttagtagagatggggtatcaccatcttggccaggctgatcttggactcctgacctcgtgatccacctgccttggcctccaaaagtgctgggattacaggcgtgagccaccgcgcctggcaaagtagacagatttgatctgtctcttttcagtgtaataatttagctaatgtttaaggtaggggaggtatagaatgtaatctgtatgggtgttttttcctaaggggggacaactagtcaatgatttgctgtataatattcaaaagatttcttgaccatatttgtagcatgaataatggttctttgtcgctgtgagacatagctttctgtggctctgcacagcaacttgaatcagagaggaatggcgggattctgtaaaggtagttcgtgatgggagctcagtgaggggttgagcagcaaaaccaaaatcggtgtgtcccctggggcagggactgtgtcttgtgggcctcaaaaataactgcctcggagcagaccccacycagtacatgtctgtatgtcagttgggagcacaaaacaggtgtaacattaaaatttcttaacagagttttgaatgaaaataatcattatcatcttcagtatagtatagtacacagcaccgtgtgaagtattttgacatactcttacctgtaaccctcaaaacaaccttcaagktaggaattaggctctttttctggaaaatgaagctaaactgtggagtgatttggtaacttgcccaagatctcacagctcgtaaatggaggcgccaggacacacacacacacctttctggctcgcaaacctacgttctctctactgcacgtggagactagacttcctcagtctccatgtttgaaggcccatccaaccacctttctacagaggccaagaaccccttttcatttctctagatcagatgtgagaaattttcttttcacccagtggctatttactgcctgttttgcattagcaaaactcaatttattatattttgaaaggaaatagaaaatgtttcactcatctaatttcaaataacaaggtgaaactctactcaggaattacatgagattaaaatttatagctcagttattgtcaataagaaaaaagaaagggaagaggcatctttaaaacttgccaaaactctagatggcaaaaatcagaatcaagtaccaatgctgtttatctttaatgatcaaaaccaaagactttttcattcttaargtggttaaatattatcagaattgattattaacagtatttacaactaagaagtttgaaaggacattctaattacttttgtattttttataaaatgctcattgtaaaaaaaaaaaaaaacagaaaatgaaaaattcaagcagtatagtagaaaaggatcagaattccctccaattgcatcattagcatctctgaatatgcccaacatgtatggtgtttacagtaatggaatctcaccatttatgctgtttattatcctggagattgcacacgtgtcagtggacatagagcttttttgaaatattacttccccatgattttaaaggaaggaaaacctaagcttcctttgggaagtgcagagggacccctgttttatgaaaatctgctctcagggagaagtggctccatcttgtggccctctggagtttggtcatgaaaaacagccaaggtcgtgttgtgtttttgcaactctcctcggaaatggtgtcaaccctgggcttgtccagttaacttggtggaaaccagcagggacaaggcagtccccatctgccggcagagcaggagcgagggtgctatggtcacaggggttgcccccttctcccctgctctcttgagaagcttagctctgccctcccagcttctaacactgggctctccacaatttcctctttcatctcgacttcaacactgttagagaagctattttagcagccaggttgctctgcctcagccttgtagtcagggctttgggggtagaagacagaggcgctaggtggagtgtaatatcccttaaaaggaatttgagaaagatagtcacatgtcctcttgccttacacgatcatatccaaggtttgaccatacaaattccatttggaatgttggaaaaaaatctgtttggagataaaattgaattttcttttctgtgtagagatggtgaacacagatgtgattggtaagcagtacaaatgtggtcattttctgtaaataagaccctaatggctggagkttttcactttgtatgaacaccataggcgtatgtattttacatctaaggaagcaatcttttgattggatgtttttttccttyttctttctctcctatgcagtacatagtggaatgtcatgggatcacccttcttccccagttcttgggcatgtaccggcttaatgttgatggagttgaaatatatgtgatagttacaagaaatgtrttcagccaccgtttgtctgtgtataggaaatacgacttaaaggtgagactgattttatgaatttttgtaaagtaactcaagcttactcttctacattgtaaatgttgtcattgatcatcagaaatgcttaggagccgctcagcacttaaagctaccagacaagtagcagtgtattccttcctgtgaggcaataagtgcttgctggcctcaccraaaaacactggcacatgttagagatatcacatctacttaaatattcagccaactgcataccaggcactgttctagatgctggaagtgatgggatgaacaaaccaaacctgcactcggggagctgacattctggtgggtaaagacaggcagtaagtaaaagtgataagttagtcatagagcatacccagaagtggtaagtgctatagacagaattaaagagggggagggttttaaatagtcctgtcagggaaggttcccctgagaaagatgacattggagcagacttgaaggagatgaggaaatgagctgaggaagaatattgctggcagagggaactgtaagtacagagaccatttcaaaggcttggagataaaggggggcccctggaaattctgagagtggagtgacataatctggcttctggtatcaccaattcaggggagaatgttcaagttaggggttggaaaactatgacttgcctgaattccaaatcctacttgagggacttttttttcttttcttttcttttttttttgagaaagagtcttcctctgttgctcagtctggagcgcagtggcgcaatcttggctcatggcaacctctgccccactggctcaagcagtcctcccacgtagctgggaccacaggcacgcaccaccatgctcagctaattttttgtattttttggtggagacaggatttcaccatgttgcccaggctgatcttgaactcctgagctcaagcaatccacccaccttggccttccaaagtgctgggattataggcatgaaccaccgcggctggctgggccaattttataaatacatttttattggaataccacgatgccccttgtttctgtattgtctgttactgcttttgcactgtaatggcagagtttggtagttaccgcagagaccatttgggaccacaaagcctaaaacgtttacccactgactgtttgcagaaaagtttgccaaactctggtctctgacatttggttctcaagttttttggtctcaacgctttcacgctcttacaagaggacactcgaaagcttttgcagatgtgagttgtgtctgtggatatttacagtattaaaaattaatataagaaatattagaatatgtagtttctttaaaaatgagaaaaacattacatgttaacatttttatgaaaaataactattttccaaaagcaaaaacatgaatgagacaagtagcattgttttacatttttrcaaatctccgtaatgtcttgacttaatgtgagatagttggaatgtcctgtctgattccgctgtcagtctgtgtggtgttatgccgctgaagtatgtgaagaaaatctgaactcacacaataatgaagtttggaaagttgttaaagcatgttttaacaacttttttggataattrtagatattcttctttgatactacaccaaagcttgacaagaggtaatttctcaaagcttagttacattatgaaatctgaaatcatatcaatgaactttttgtactcttcatcgaaatccattgattggtttgcatgcattgtttgaatgtgtgattttgccaaggcatgcacttgccatttggaacacattggttcactgagttatttgactcttccaaatattgacacatttcattatacagtatcaaaaagtcataacagtgttaccaccaatgtcatcagaaaagtcttttacatattgggaagcggtcaggcccaggatggtggatataagttttttaaaaatcagttttttacttggaatctcaaattttatcactggccacaagccctgtcagttgttttctgtgaaatgaccacatgtagcaagcaccccagcatacaggggagcctagcagcttcattcattttgtagcaaacatcagtcacatgcccagatctaaataaacatagactgtcagttgttctttcaagtaaaagtgttgtttcatgaaaaagatggccagttcaactcataactcaaaccatcacgaaaacagttcttaagaaatcattccttctttataaacagaagtgctttatgtatatttcctgcacagaatattgaaaagacgtgtactcctgggtctagatttgatacatttaatgttatgctttcatgtgtttactagatgcctacttgtatgacacaccatcttagccagaagttcagcaactcgtacacagctcacaagtcacaaaaaccaggatgtgtggcttcagaggtttctgaaatgacgctgggtttcttagatggtgctggtttttttcattgttttttttttttaaatcacaaacactactaatacccactgttgccactgtttgacttatgctaaactgctagcagttcttcccaccattgtttttgcattatttatacaaatatcaagacgctgraaaaggcaaataatttctcagtattattataaaaatagttttggctttgtatagttttggtcttgggaccccagggttctgaaccatgcttagagaaatgctagtctaagtgaaggaaatggtctrggcttgtctcctaacctctgaagtccccacacactggatccacttcccaaatacacccttgtcctgtcctgtcttaaagtcttcgcccaagcaagccattttgtgcccctggaattgcccctggggaaatcccagccatcctccagggcccttgccagcaccagctcttttcgtgaagccttggcggtactgctcagagcacacaggactctgtctgacttccccagggaagaaagccagagtgacctctaaagtcacatgttgttcttttatgacttgttaaccttgtgtaagttgctgaacctctatgaccctccgtctcttcatctgttaaaatagggataattttacctacatttgcagggatgttttgagaattaaataagatacatatgtattgtgtccagcgtgaggcatggcatatgggagttaatgaatcttggttgcctcattcattctcctgatgtgtaagtgcctcaagggcaagtatgttcttctacttaacttttttttttttaatccccctgcaatgcctaagatagcgcctcggacaagtaggcatctggtaaacatatcttggagtaaattatacttagagattggatattctagttttaatttgccttgcttttttcacagtttcatctccctttctggcttgtggcatagataaactctgttcttgccagtgctctcagttgtgatggaacctgtacatctggcattgtttcatggcttaaactcttggccttccttttctattttttttaataattttttattgtgaattaatttaaacttggatgagttttgtgttttgttgttcccaagctaatgatcagcatttgcatacagatgaagcttccctgagaatcagaagcagggtggattatattgtaggagaggaaacacacacacagacacagacagacacacacacacacagacacacacaccccaagaacttggttaagaattcaaagtagaatagtttcttcctgttcccagcatcataggcagtgctcaagtattacaaatgtcccatttttaaaaagtatttgggaacattcgttgtgaaaaatcagtgtgtaaaggaaggtacttctggtccatattcaggaatccctaaaggaaggaaagtagaccatggcaagtaacagttgctgggcatggctgtgcagaggggctcggactgtggtcgtagaatgggttctcaggtttgccttcatgaatggttcacattatctgtctccatctgatgggtcagctttgggctgctctgaatcgccctgagaaacattgaacattttccctgggccagcagcagcgtccctcggatcttccagtcctgggggcactgagcaccagggggatggaagatcggccctggggagacccccccagcctggtcttggctcccttccccaatgtgaggagtctcttccgttcaagtttccgcatctgtgaattgcaggaagctcaatcctagtcaatgcctgagctgctcgatgaaagccagtaatcaaaaattttgatttctttgcagatggccaatctaaaagccactttcacttttcccaagccaactgtaagttcatttaatgaatggctaactcaagtaacccagggcaatagatgtcttttcatcaggtggtaaagaagcaagtggcttggctgacctcacgatagttaggggtgtccagtgcaggaggggaagggagcccaggaaattggcctgtgattcttctccagccatttatgcagtaaacacaggacatctgctgtgtatgagacaccgtgattgtcatccatacttaggaattcaccagaccatttgtttcccagcttttcttttgaattaaaatcttccacaagccacgggaagtttctctgcttggactctacccctaaagcctccccgtcggcctccgaggtagactcaggtcatgctagacaacccagagctctaaggcagagttttgaacaccactgcagtaagagcacaaactgctgagatcaagggccatgttttcctccactttgtacctctgcactcagcatagggcctggcacaaaagaggtacaaataactgtgtgtctttgaaggaatctccaaagtaaatggggtcagagagtggctgtgggggactgatgtatagcaagcaaggaaagagtgttcatcagtaactcttaagacgggagaaaacaatgagcattgcagaaaaaagtcagcaggtgaggatgtgcccacagaaggacgtaatgtggggaaagaggcacttaaygctcctgtggtcccactgcagccagctagtgggactctttaagataacaggactgactatttctggcagttgatacaaggagtaaagtgtggggctgatccagtgttgagtaagttactgctcaagtaagtgatggtcaggttttctaacttccagcaggtggacaagaaccacagaaacacaggtgagcaagacagagtcagggctagagaagcggccagtggccaggaatacctgcagagaggggacacaggccggacagagagccatggtcagggagggatgagaagcccattccrcatgggctgcgaagcagagtgggtgctgagctggctctctgctccgcctggagccattttcatattttctgcgtgtgaaacccartgcctcccatgcgcatgtttttattattgccttgtgtttcagggctctacagtggctagagaagctagtgacaaagaaaaggtaagtaccttgctgtatgtctccccatgtcctgggggcatgatcacatactcccaatcacctttactctttatttctagtctcccacccctgctattgtggttcttcctgttccccattctgctgccaccagcgagaaacactgtattgacccgatgagagttctacttcatttctcttcatcaaattgttgaatagtgaaacagttatttgttgcaagcatggttggaaggaacattccacatgcaacttgctcttgaaaaacacagccacctgtgcagtaaacctataatcgaaaatggcactgacagctgagagtgcgttcctgcgggtcagggaaccaggacctaacactgcttcaccgatatcaaaccgaatgtgaccctgaatacatttctttgcatcgctgagtctgctttctcacctgtagtatgttggcttggatgagcctcaaactcctttccaactattaagacatgatacaagtattttttgcctaagaaattaaggataagaagactgcatctctttttctcttttcctggcttattggaccttaggtagtatttgagccacatttagtttactgtgcaagattatagagagagtcaacttgaaggattggtttgaataggaatttaggaagtagcttcctggatgtaaacctaaactaactcaagtcaacacatgcttatataaagggtacatctatactcttagttatgccttcttgtcaccttgggaagtgcctttttcttaastattccatttgaaaacagagctcaaaattgttgtttgaaagttgttcttttagactgatagcagttttgagttgaattttatagatttgcaaatctacttttgtttgttcattcagaggtgtttgtgaatatttttgtggctactatcctagcttcaggggctaaaataacaagacacacagaaagatctagcaggggatgcagacctcaaatagaaaattatgttatcatggggtgaacacttggacaggacactcagggagctctagagcacatagcaagggcgcctggctcaggctgggcagggtcaaggaagggcttcctggaggaggtgatgtccagaaacctgaaggatcaataggagttagtcagaggaagagcggcaggtgcaagggcatgagagtcagagtggggagtatttggtgcatttgctgcagggagagaggaagccacagagggaaggaagccagtcctgtcagagaggctgatgaagtagcccggagaagatgctggccggagctgggatgtggtagaagtggatgaattacagagagatttgggaagacaaatctacagaactgagggattgagtgccagaggtgccagggagtgtgcgtagagggaagggggttaaggatgacccccaagtttctggtttaggcagttgggtaggtaggtgttcattccactccctgaaatagcaaacaagagcaggaggaggagtttgaaatgtcagttatcggggaacctgccccgatattcacataggttcttttctgttkttcctaagcatcagccggcttgagaaataaagggacagagtacaaaagagagaaattttaaagctgggcgtccaggggagacatcacacgttggtaggatctgtgatggccccacaagccacaaaaaacagcaagtttttattagggattttcaaaaggggagggagtgtgtgaataggtgtgagtaacagacatcaagtacttaactggttaatagaatatcacaaggcaagtggaggcaggtcgagaccacaggactgaggcgaaattaaaattgctaatgaagtttcgggcaccactgtcattgataacatcttatcaggagacagggttttgagatcaaccggtctgaccaaaatttattaggtgggaatttcctcttcctaataagcctgggagcgctatgggagactgaagtctatttcatctctgcagtttcgaccataagagacaggcacacctggggggggctgtttataagcctgtatctccaggcgcgtattctctttctcagggatgttccatgctgagaaaaagaattcagcgatatttctcccatttgcttttgaaagaagagaaatatggctctgttccgcccggctcactggtggtcagagtttaaggttatctctcttattccctgaacaattgctgttatcctgttcttttttcagggtgcccagatttcgtatttgttcaaacacacatgctgtacaatttgtgcagttaacgcaattatcccatggtcctgaggcaacatacatcttcctcagctgacaggattaagagattaaagtaaagacaggcataggaaakcacaagggtattgattggggaagtgataagtgtccatgaaatctttacaatttatgttkagagattgcagtaaagacaggcataagaaattacaaaagtattaatttagggaactaataaatgtccataaaatcttcacaatccacgttcttctgtcatggctttagccggtccctccgtttggggtccctgacttcccccaacagtcagtgcggcgtcagaacagagatatccagtaggcatgagaggctgcacagtggctctcagctgaaaaaagagtgtgggaatcctccctgaaaggatggttggcagagacaggaaagtgggtgaggtcccccaggaggagtgtgtggagaagagaagcatgtctagaacaagcccagcagaacatcaccttttacaggagccaggagacactgggtcactcactcagatattgattgtctgtgatgagtacacactctgccaagcattgtaagaactgcttcgtggaactaggctgatacagtccccatcctcatgaaactttcactctagtaattttccatgaaccagaggaaatgaacttcccagcgtcagatgctttcgtgaggccaggtagggtaagaatggagagttgtccagggacatatccacagggaaatcgctggggacctggtcggtgagggcgagtggggaccaaagccagattgcagcaggtaaggaggagagaagaaaatggtggaggcttctttggccatttgcccttttactgtacatcagtgaatgtacattttgagaattcaaccttcgcctaaaccccctctaaggcactggctttggccagaagaggcagaaacagtgactgtcgacttccatgctgccatgagtgaatgtttcttccaggtactgaagactcagcaggtatttcagttttagcccatgagaagctcagaggctaaattttgttgagattttctcctcagaggaaatgccagggtgtgtacagagtcacacatgctcttcagcatcgtacgacaggccagcccctgagtcacatgatgccccatgttggtgggtctgtttttactttcttccaaagttccttgggactaccactagcaggatttttttccttcattcattttgatttcttcaggttcagtcaacaagtgcttggtcctgctctgacagtaaacactgccaacaaggacagttacagctaatggcgtggttgctgctgaggcctaaatcataaaacaagggcacacagagaggaaagccacacgtatttgacttcctgtatctgtaacggttcctgcaaagcaggacattcacttacctatcttccgttccgctgttgcacctataggacttaacacactttccagaaacccagggcatgaaccacagttcactgccctcctcaccaaaaagtgtttagtccctttattggtatagcttcctatgaaaagagaataatagaatttgtttgaccgagaactcatctttctaggactctgctaggatgcttttatcctgtatctaatatgaacacgtagccatcattccttaaaacatctccctagggggtaggcttagaggaagtcacaactggcactggttgagtacaaactatatgccagaccgttttaaattgtacatgaattatgtcatgtaatccttaacagtcaccagatgagattggtgctgtcgttacttactttgagtggatgaagttgcttaactgacaggtttagtaacttcatccagggtcctacagttaggaagtgacagcgccagggtttgagcctgggatcagcagccccagagcgcacatttctaaccactatgccacactgccttgtaaatgtttgtgagttcatgtctctcctttcctttaagggcatattatcaaaaagtcatgttaatcccattgtgaaaatgaggaaaaagttaactacattgacaaaaacattgtttcagagttaaatatggtgctgaaacagttgattctaaaacttgattttttttctaaagtagtgaaataaattatttgtttccatactatgttagcaaaacaatttgtatttcctctatttgaagagcttgagcattttcgctcatactttcagatgtacatatttgtaaaacttttacgtttaatgcagtctttatcacgtgtcttacactgtgcaaacattagaattgtctgcacagttgccctgaggaagaattcagtgccctagccttctttttgtggttgaggtttctaataactcttattccagaagacagaggctgcataaagctaccccacccacccttctatattaaaaatgctcacttgggaaggggaaaaggaaatagcttgaagatgtggaatgtcaaagtcatagaaattggtaaatgatggagagtgtgcctgccttgacagtagggtagagatcaaaatgtaccttcattcatgcacagtaaaagggcaaatggccaaagaaacatccaccatttccttttctcctcctcacttcatcacctgctgcaatctggctcccacccaccgtcaccgaccacgtccccagcgatttccctggggatacatcacccagactagagagagaggaggcatttgaaatgtcagggtggcgtcagaacagagatatccaataggcatgagagggtgcacagggtgtcttagctgaaaacaaagggcttgggaatcctccctggaaggacggtcagcagagacagggaagtgggtgaggtcacccaggaggagcgtgtcgagaagagaagcacgtctagaacgaacccaggggaaagtcgtcattcatggctcggtagagatcatgccatgccttctctctctgatacagcagtgttttgtagactcyagaaacgtttgttaaactgtaatagatgaaatgaaatgtattaatagagccaaactgttttgttttttttcragacggagtctcgctctgtcacccaggctggagtgcagtggtgcaatctcagctcactgcaagctccgcctcctgggttcatgccattctcctgcctcagcctccctagtagctgggactacaagcgcctgtcactacgcttggctaatttttttgtatttttagtagagacggagtttcaccgtgttagccaggatggtctcgatcccctgacctcgtgatccacccgcctcggcctcccaaagtgctgggattacaggcattagccaccgcgcccggccaagccgaactcttaaaaacattgtttgtttgtttttttaacttttaaaaaaagtctttgctttcccttttctgccatcctttgggttttctttccatgatcagttaggatttttgactcttccaaaaagcctaccattcattgtgttcacaaatcataaatactcctttttatgatcagacatcgggggggaaaatgctatcaaaacagtctactaaatgctatcaaaacaatctactggtacctctggtttgaaatatttggggaaggctaaaaacacttactacattttagccttttataaatgaaatgatttgcaagaatattatattcattgctattatatataactatattcctttccaaatgatcgttatggtacaaagaacaatctttctagagggctgggcatggtggctcacgcctgtaatcccagcactttagggaggctgaggctacaggatagcctgagctcgggagttcaagaccaccctgggaaacatagcgagacccccaactctacaaacaattcaaaaaattagctgggcatggtggtgcacacttgtggccccagctacatgggaggattgcttgaactcaggatgtcgatgctgcagtgagccgtgatcacaccactgcattccagcctcagtgacagaacaagaccctgtctcagaaaaaaaaaaaaaaaaaaaaaaaaactgcatagagaatctctggtgacatagtttaattagtaatctcaattcttattcttcccaggttttctttcatatgagtcattataacttctagttttccatacttttaacttgttgatgacaagtttgaaactgtcatttcaaatatttagcgttataggtgcagacaagtcccatttcttagattgtagcttgacatgtaattagtgtgatttgcattagcataatcatgaagatggaactgaaggaaataagttatattctaacaatggaatcactttcatggcaacaagtctcagaacatgcatgtacagatgtcttgaggttttttttaagagcagaacagtgctttaaaaaaaaataaccattgtcaaattctgacagctgctatgacttgttttattctttaattctttcctttttaatggaagggcatctcccattcatggctccagcagtttcgcctcctctaaatgagacagagaaatgtgaacctccctggtggtcgatcttttcacagctgcgctgcaattccagtgtgacatcaaattagtaattatagctgagcgggctgctttttacaaatgacagtcttagcatgctgcctgctagcgagcgactcagcaggggacctggggaagtaaaagaaaacataactggactcacttgatttctgggggatttgacctgactctttaaaaagcccatgttcttgagagagagagtcctggggatttacacaaatatgcattttgttcatcatcctgcacagttcttctcaaaactcatgtctgattttattaggtaaagtaaagtatgtgtaatggagccatagggtcacaataagaagatcccttttaacatacagccttcttcctgaaacccatttgaaagaaaacagctgccctgcaattggcatttgtgtaactrtattggcaataatcattgttgacactttgataatgggctacaaaaagccgccttgtcgattctcaggcactgtgaattgcaccagcaattaagtgactgtcaccgtctccgacgttttacctattaccaactgagggttcgagaggattaatcattaatacccttacgtctaaaaatgcttttcgaaaccagttttcagcatttcttttgtggtctttaaattgtaacaaattataattaattactacccctatctggtcatctgggctgccattgaagtgaggtggccagggcggcgggctccccaaacgtgacacaaaagcacagcagcgtatccttctggaaatctttatttgccgctcagctaagaagtgcctctttttccactgtgggcggatcatcggttaaaggggggttgtcaagctttttaggccctcaattcagctaatgctttaaccgccttctgtaaaattccttttcttccgagatagaagggaatcatttccctttgccagccagtgttagttagggacaccaatcctactacccaaagtgcaggggaaagtttcccactagggcagaagcagggcttctttctcagaccttaaaggtggcaccagtaacatctaccttctggaccagagacattttataaaagggagatttgggtgaaggactcsaaacagagggttaggggatctgagtcccagccctgggggcacagggctgcattaatggggtttgagtataggtcatctgactttgtcctcgtttgtaaaattaaaggatttgcttgcgtcattgctcctcatgctgtagtgttggtgagaatctcttgtttcaaatgaagctttcctggaccttcctccagagatgtggttcagcagtcggccccacttggagaagtcctggcctgaccatcactaaaatcttctctattccagatatagattaaggtgattgctatgattgatggggaaaaaaatgttctgttcagcaaatatagataagaaccccataaaccatgaggggtattctggaaatgaagttttaaagcttcatttagaatatctcgtaactggtaagcatggcacgtgacaaaaagagaggatcacatgcagtgactcttgtgagcactttccagattttcactcagatgacagcattaaaatcctcaaggctttatgacttatggcttatggtgcttcatcagctctcatttgcctcagattaatttttatctcactggaatgaaatcaactcagagtatcccaagcacacgtggagcactgctgttaggtatgggaatgttttcacgctaacaactcgtagttggttctagaaaaagttggggtggagagaagacttccaaaattcagtatgtggtctgaatttaaaccaagctgctacagatgtgtaattcttaattaaataatgatctttaacatggtagtattaaaccagagatctagaggagttagcaaactccttgagtgttcagcctttgacatttcttagattatcaccatagatatctgcgcaccagaatcttctgttmcgactggaacgaagccatcccgtaggtcctattttgtaggtcttgtatgcagttcagctgtcatatcccagtttgtggaggaagaccaaaccgtcacctttgacattaccacayagagttgtcataaaatatgacagtattaaaaaaggaataaattttactttttacgtattagcttgagggaaaattgccaacagctaggtcttgccagccctaacarttataacttaacgcttctccagttttgcgcggcttacttacagcactgtttcacaagtatgttgaggtatattctctttccacattcatacataaacagattcaaaataaaaattataagatgttcacatctggatgctagtcacagatgtgcacattctcactgttttcactgtgaaaattagaagttattaatgacctcttagatcatttctcaaaccatgaacttgtatagacattctgcttatgtagttaaaggaggttggcatatgtactatttgtgcaaaaccaccctttttctttgctacttctgtatgaactttatccgtatccactaatttgccttttgatgtatcaaatttgtggcttagatgttccaagaagcagaactgattttattataaatctccagcatctcttattaccccagaattgataccaaatatgttactccatcaaattatttttatcctagctccaacataaggattacctaaaattccttcccttatagaaatacttgtgaattatgttttcagttccatagatgctgatttttatgaagatttttgcaagcacggcaaaagggsttttattcttttttgcaagtttattttcatttgrgtgagcttggaattacaagtaaatcaggaacacaagcagttctaacataaaacaataattactacgtattttttatgtggagcattcagctctgagtgtcacagtgacagcgtatcaaaaggacacccggcagcagtctttgacattgaggcttacaattagacttaaaaaataataaataggttgccaaatgagcatatcaaacaaaaaattcattccgaaatacaagtcctttaatcacagagtactatgatatgtattatcctttgcattaaaacctagtgccaaaatcctgtttgcattagacactcaagtgtgactgggtgcatttcttcttcccagtaaagtttccatccagactaaaataaaaacttggctctatattataaagattttggctctgtgcattttaggttcatgtattttctrtttccagttattaatggccatttacccatactgttggctcttgttgtataattaaagtttagaatgatcattaaaaatccaatgatattttagtttgaattctgtttaatgtttcaaactatagtttgaaatttgtgatttttaaaaattttgtgtcatctgaaagatagttttttaaaatctcactaaaataaaatgttcatataacttctggctttactaaaccttasaatatccaatattgctcaactccatatgaatgacagcagttatgcatcaaattacagaacctsatgaaataagcacatatgtacacatacacgtgagttaattcccacttcaaacaaacaaagcatttaactcttttggtaaacacattgttttggttttggttttagagattctgcaaaagttcttagtcatttggaatttttaagcataaaagtactaaataatattaagcaggaattttttaggtgttgctttttagctcctttttatcagttctgggaagcaaacagtgctgcatctcctttgctctcatagaattctgtaatttttataccacaggtctctgctaaaaggcggcatgtgtttagaaattctaaaaatgagggctctgaactttgtaactgtcctgatacgttttcccttttttaatcccaaccccctggccaaatctgtccttagagatcattgataccttgtattgaaccctagggcgtaagtaattccgttgagaggcttttatacactgaaagccttacgcgtgtgttggttatcttcaggctctgactcagctgagtgtgcatctcacttcgcacattcatgttgtgtcttaatgacacacaaactatttttgaccatgacctgtattgtcacacagtgtgtttcttactgttgacttacagtagacttgctgaggcctgtgatgctgtgctttaaaagccaaaaactttgcaaaatgagggagaaatgtctataataaatgtattatatatacacaaatgtttataataaattttctttttacaactcatagcaagttaaatgttcccagtgggttcactgctccctaggagtgagttcaccattccctagtattttggttatattttctggctactaagatttcagcttctgtggatttttgctttaggtcagcaaaacagcattcactaaattatccactattataatgtgctgagaaaaaactaacccatggaaaattaaggtaagacagaagtcagcaaatttctgtctttggccagatacgtaaaatcattacattttattccatatattgaataaagatcataaatttcaaattctttattacttcaggaatttaacyagtccaatttttatgataagatagggacattttactctcatttgggtttcagtttaaacaaaaggtcttttcagtgaggtttcctactaggaatagcttttgcaggtgatcacagaggtttttctagctggtagcattcacaattgaggtttgcaaagcagtgtagggaactagagccgccacgacagggaggttggcgcctcgggccatgtcaccttcgatgcatcctgtctcatgtgccctctgtgttccccgtgggtcctgtgtagtgaaatgaaatactaactttgccctcatgtatggtaggtttgtgtgcagtgtgcagtgacaaaagtgtcttccaaatttgaagacagtatgtagagaattcatgtgacatgtttgtaactagcagataaaacctaaaaacaaaggaaattttaaacatcgtttaaataaagcttgtcgctcacgggctgcatggggcccaggacggctttgaatgtggcccagtacaaatccgtaaactttcttaaaacatgatgagattttcttgtgattttttttttttttaagctcatcagctctcattrgtgttcactgattctatgtgtggcccaagacaattcttcttccagtgtggcccagggaagctaaaagattggacccccaggtttagattaccgacatcataaattgttttttttttttaattatccaggtatcaactagaaggtatcctaagtttaaagaccctattttagaagaaatagacatagcaagttactattgccaggcactatgtgctttgtgtcatttgatttacacactaaccctattacataggtacagtattattaattacccattatataagtaaggaaactgaggtttgggcagaytaagcaactggcccagaacatcacagctagtgttaaaatgttaaatatgtcagtatattttttaaaagaaaaatcttgctctggattgatcagcgatgcgcttttcctagatccataagccatacttgagaacatgattagcatataacgacgtttgtatataacacactgkgtggcaggcaccattttaggcctttttacatgtgtgaactcatgcaaccctcacaaccctatgtttgcaaatccccctttaaagatgggaaaccaagtcacagagaggtaacttaacttgccagagtcacatagctaataattggagttgcggagctacaacccaggcagcctggatctagtgtgttcacataaccatgggcttcagtttgtctcctacgtggaaasctgagccatgcctagtcgacctggggtcgggcatcactccgtatgacagtgaagggctcattttatccgaacgggaagcaggacagccaggctgcggggggaacggcgtccctctgctgatgcctgtggctgtgtttgtgcatttacacgtcacattagcggagatgaatgccacttggaatccaacccaccgcagcagattacctcatgcaagagagaaaacagccctgcctgtgctagcctggctctgcgttgggctgtatttactcacggggcctcagctggccagggccttggagcagctctggggcccccgacccgggcaggaatcccagctcaggactagacgcacagaggaggacggggtggggaagagcagttccctcccataccctcgtcccctcccagcaagtacagagggtcgtacagcaatcgtcccgccttacttagaggctctgatctgcacaaaactggccagagctgaattcagcgcaaataaagactcggcccgccgccacttcagaaaggttgctgaccgctggctggaagccggcctcggagagtccacagctgagaagcatttctgagctgtctttagttagccctgggggtttcttccaccctctggctgtttctgcactgaactagaaaagatatcaaagacactcattaaagaaccagacccagtgactacaagcttggaaaactctaagcgcaaataatccagtgtttaaaagcaaagtgtagaatctgttgctacattaagctgtcgctgcccacagttaattttctgctgctctgcagacgtcatctttgtaggcagttttacaccaagagtttattaagttcattaaatcatagtatagttttccacatttaaaaaaaagatgtttctaatataagcactgctcattatcagagagatatattgaaatttcttttaaaaagctaagtagtaagattttcttgagagtgaatcattgtcaggtgacttaacctttgtcatctcgtttttttctttttgtttttgaggtagggtcttactatgtcacccaggctggagtgcagtggcgcgatcatggctctctgcaactttgacctcccgggctcaagcgatcctcctacctcagcctcccaaatagctgggatgagaggcacacaccaccacggttatctcatatgttttattacttttttgtagagatggagtctcactatgttagccagactggtctcgaacttctgggctccagtgaacctcctgtctcagagtcccaaagtgctgagattgcaggtgtgagccgccacgcccagcctatcttgttcttaatttaaaaagaacagttaagtttttgtaaaaaaaaaaaaaaaaaaaaaaagtttttcaacctgtaatacccatttcaagtctgtgcgctttattaaatgctcacagtgatgatgatgacgatgggggtggtgatggggattataagcaccactatttgaatctgtcacatggtttctgrttgagttcccagcacaactctaccttagcagaatgattaaggttcccatctcagctcatcactcaccaaactctgagaccttagttaaattgcatgatctcagtttccttgaatgtaaaacgtgaataatagttaaggttgttgcaaagactgaagatagatgatagatgtgaataaaatgacgcacacaaagtgctaagcaggttacctaaggctgctgcrtgttttcccctttctgcatctatggaaacaggctggagaggtccaggaacctggcccctggtccctggcaagcaaggggtggaaccaggattgcaacctcaggattcatgaccccaaaaccttcgtgcccctgagcactctgtcttgcagcaagcatttgggaggttgatatctgtaggccagtgttagattccatgctggcagctgccctgccaggatccgccttcgcctcttgatcctttcagtaagcccttaagtcttttagccaatctgggtgcccttttttgagcttgatccaatctaaatacgaccctagtgcctgtgaaattcacaagtcagcttagtcatagagtacatggtgtccagagttttatgaggtaggattatactttccctgtcacatgaggtaattctgctggggtgaacctgaagtggcattcatcttcattaatgtgacttgtgttacaaacacacatccagcatgtaatttactgccttgtcgggggtctgtcatctctgccttcaggtttctcacatttatacaaaaccagaaaaaaacaccctctacccttcttttcttacacttataaaatgggttgtggaattgaggcagatatccttaacacccccacccacacgcctcccatcgccaacacataatgacacagaaatgcccaaggtgtctgctgggaaaattacgatccttctccatctctcctgtttttgtgtgtaggtctggcttcaacccttttttctaacgtgcttccaattttctgttttgggcagtgcttatgttctcactgccctctgagttttgttaaacttcagaaccttgcatttcattcttggtgaaacttcattatgtttacagttctaataggagagaaaccttataatctagtgtgatgaactcaaacattttaatattgtgctgtcttcacatttcaaggtttgtgggaatggggggtgcacgtattgcattattttaaaattattaatgacagatttagggggtaagtctagcaggcgcatcctgacattttgtgaagaatggcgttgcattctcatttcttaaagactcaataactcagcataaaagtgtttggaattagatcagtctttcctagaatcttagtatttatctttacatcttacatacacatcccatcctgctttattttctacctacgtgctttcatatcattctcccgtacgagattacaaactcctttacagcagaaattgtgacctattcatatttgcatctctctacttgactcactcagtaactgctgattgaattgaatcttgacatttctgggccttgctgtacctgctttgtaaggattaattctgtttggcttataaagattgtggttatatctaattcaaagttgcaaaactgtttaaattttctcaaagttagtagccaaagcgactaatttagaaatgcataatttatgtacatatgtgttgctgtaaatagatgtgacwgtttacatgcatgtctatactttataaataggaggggaagtgaacagttcgagcatgtgaaagatgcaggcgatggacccagggagtgttctttcattgctctgaataaggagggaggaggaacagtgccggagccaggaaggacagcagcttgtttccttggattattttgtttacatttggttcacacctacagaaaagaggaccattccaggttcatcaacatacaggcaaaggcagtgcatgacattggatttctttctgctgaaataaacaagctatggttagccgaaaggggtgggagattattttgagctcgtactgaatgcaggttgcacaaagttaaatagaataatccacactgttttaaaactatatgcctatattatcctgtttgctgcaatacaagctacagtgttttctgctcatgatccatgttttgatagttgctcattgctttgtgttggttgccataagtgcagtttacttattagctcaccctctcgttcatttgtaaaaggtagaactctgatcttaatacgtttatgttaagagaagaccttttttctttgatattgtccaaatgagaagagaatttccttcttggagtggtgaacaggaaggcttggaagggcagatggctaacctcgtgctgcatgtctccctggtgcagaaagtagatatgattatggatagagctgttctgagacaagataacatgttatttgcaatgtgagcccagcaacggctccccaaaagtgggaggagggatggagttgggttgtaagaaaattgagggttcctgggaaagtattccaagaatacaaattttatacttagaagacttcttgtaagaaagtgagtctaagaaagcagtcaggttcattcctctgaaaaacatgaaatgtgttacaaaaagccttatgatatggagtctgtctgacccycaccccactgctcttgcgaatgcttccagagattggggctcactggcgccccccggtggtattcaagccttctcctattttattgtttgggtaagacccctgtggtggtgaacggggtgggggcggtgaaaggggcaaacttcagtgtccagggttggaaggtgtatgtggtttttttaggttttcttcaagcgcctttgtcattgtttttctcatttgttttaggccaaagaactgccaactctgaaagataatgatttcattaatgagggccaaaagatttatattgatgacaacarcaagaaggtcttcctggaaaaactaaaaaaggatgttgaggtaagaacagtcagtggagaggccagactcattgtataaatatcagccctgttgggttttaggagctttttaaaccatctatttaaatcttcaatcaaggcaaaaacctgcatactctaccttakggaagtcagacatgaaggtgtctcatgttacatgatctggtttaaagcaaacgcatgccagtttagcagccctctcatttaggcaccaaacacaagaaagcayctgctgtcatccgctgggaatccccggtcccaggcccctgtattctgtattgggatggcccatgaagactgacctgcccacaccagccagtttgggaggggccaggggagtactggactctgtgtcaaccagcagagcatctcaaaaacaaatattcagtcactattacagtcttggcacttttccctctaaagcacaagtcagtgctggttaacatagcctgggtcacttaatgctttcctatctccaccagtcaccacaaaccatgtcatgaggyccagtgaggcccccttacacattgtgggactagcacaggggcagcttgggatactaggtcataggggacagtggagagacatagaacagtgtccaaggggctttcgtccataatgatggagttttgcttttaaacactgttctaaacatttaaaatgtaccttttcctgtcatttagtttatgataaaggcattgcagcttttccattggatttgctcattatttaagtcttttataaatccaggaaaaaaggaaaaaaaggttattttctttcctttcttttttttttttttttttttttgagatggattctcactgtcttctaggctggagtgcagtggcgcgatctcggctcactgcaagctctgcctcccaggttcacgccattctcccgcctcagcctcctgagtagctgggactacaggcacccgccaccacgcctggctaattttttgtatttttattagagacggggtttcaccgtgttagccaggatgatcttgatctcctgacctcgtgatccacccgcctctgcctcccaaagtgctgggattacaggcgtcagccaccaagcccggccaaaaaaaggttattttcttggacttcgttgagttacaaaacaatgcagtgggaattagaatttaggcagctactaaactcagcttttcttagctgttgckttcattcatttgtgtacacttcatggcacaccagtacggatctgctacttagagagaggctttgtgggaagattgtctttttatgtcattaaaccaaaaaaaaaaaaagaaaaagaaaatgackaaagccacagaatgagtgtcatacatttgtatttcccatgaaggcggaagcagtataatttatttttaatcttctaacagttctttttattacaagaaactcacactgaccaagttattagtagttaatatttttagatcataaattagtttaataaaattttttacattattttacctttatagtatacatacttggattatttatagtatacatacttggattagaacctatatattggttatttgtgaagggtgtaagtatctactttcttgttgccattgtttttagagacagtcttgctgtgttggctagagtggggtggcatgagcatagctcactgcagccttgaactcccagctcaggcagtcctcccgcctcagcctccatagtagctgggactacaggcatgcaccacggtgcctggctaatttttgaatttttttttttttgtagagactagggtcttgctttgttgcgcaggctggtcttgaactcctggcctcaagcaatcctcccacctcagcctcccaaagtgctgtgattacaggcatgagccactstgcttagcctgtaagcatctacttcaaacaaacaaaacgatacaagtgtttgcttttctcttctaacattttcctccagtctttcattaaggaatgtttagttttcctcagttgtgagtggttactaataaaatgtattagttaagcatttcccccttgctttgggatctgtttgatccaactgataagtatccttagtaaacatactcttggatttttattgattaatcagcaaatccttgatactgagaagaatatggttttagcaattatggtaagtagcccttagggttatctgtgacctattaaaaaaatggtttttttctgttggcagtatatcactatgatatttagactccagaaataatgtaattcaagcagttcaaatttacagttgaattacagaaggatcctcttagctcttttgttgtctctaataataccattgattagaggactctatagtctaatcccatacatggctcaagcacttagctgtttcgttgaaatggaggcagggtgtaaaacatcctttcatttaaaaatattctcaatagctgataacagygtctttagttttgaaatttatgcagaaccatcattaaatttttaagcaggtaattatggtgaagtagcttgacatctgatcttgataatgaggctagaatttaatcgagttttctgtttkcatcagttccatgctttctaatttagctgactgacccattggagtttcattgcagttttttgttgttgttgctgtttttccttaatgcctcgagtaggagatctgagtgtattacagctcaagaaatctagattttaggaaaactaattttcatctgaggttctagttgctgtttttctgtaacagcagccctgttctattcctatgccatgctgggtattttcatccacatagctttgcacgtaacacaggtgagtctttttytgcacacaaacacacacacagatcggtgtatgaggagtgacargcacttttgccttctgccctgtgttttgtcaattctgatcacggccctgaagaatcaaccctggtctctcctctcattgactcacatgatgcaaaactgttctccctctgtggcatccaggagtaccccctcacagggcatttcagttgtctgaggtttatagccccccatccatggagatgggtgagaggggatagggcggtgggagtagtgggatgggtggcagcatttatggagcacatcgagcccaagtccttcccatgcagtgtcacttgtcattctcaaaacagccccttgacagtggtcctgcccctaccctagtttgatgaatggggaagccgagcccagagaccctatgtaatttgctcaaaggcacaaagcttctaaattcagactggggcgtcaggccctcagagggcacagtccttaactactctgacataaacacaagttaaaaatacctgtgagagcacagtggaggctttgttttctgataattgcttcgaaggaggattataatttttaacaagtggtaagatataaccgttaaacagggctgactggcattttaattctacttcacagatatgttgggagatggtgatgtggtagaacacggtgtgttagtagagttaaataaatcagttgagaaccattgtgaaggatagtcttagactcgtaaagatctcaaggaagattgtagctcaaagatttgtcacagcaaggactcaattagtaaggaattagatgagaagggatattctgagggaaaaagaggcagatstgaggtccagcaggtggtttctgagaagctggaaaggaagaaaagcaggggacctaaataaagactgaaaaatcttcacactttgaaatcttatgttcttaaaacttaaagaacaaatatatactgttttcctgcagtgagccggaagcagaccccgcagtgaagcccacgccccctttctgtcttctctttccatctgcgagcttccagcccacgaaaaatctcagatgtattgccacacttcattcactctacctcagaacagatttaaagtaaagtttgaggcctgttgtggtggctcatgcctgtaatcccagcactttgggaggctgaggcaggaggattgattaagcccaggagtttgagaacagcctgggcaacatagtgagaccccatctctacaaagttttaaaaattagccaaacgtggtggtgcatgcctgtggtcctagctactagggaagctgaagcaggaggatcccttgagtccaagagtttgaggcttcagtgagccatgatcacaccactgcactccagcctgggtgacagagccagaccctgtctcaaaaagaaatttaacgttttgaagatgagagcccgtgaattaacaggcttttccatatggttctttttcccccggtctacaaactgaaacctgtttaaattgaaatcttgatattaaaaaaagacttctaccataatcaaaacattgccagttacaaataacagcttccattattttgtgtgaggcaccatattttttctctcagtttcattatcttaattcttcgacacccctgtgaggtgagtggcattgtccaattttaaagtcagaatgactgaagatccaggaggcgaactcgtcaagcatggaactggcgagtgagaccaaatcagactctttgtttcttgaatgggtctccctggtcagcatgacctgtccttttaaccactgtgccatatttggtttttcccatttctacctcagtctcagagatttgaaatcatgaataataatcccagcagtttgggaggccaaggcaggaggatcacttgaggccaggtgtttgagaccagcctggacaacacagcaagatcctgtctccacacaaaataaaaaataattagctgggcatggtggtgcacctctgtaatccagctcctcgggagggtgaggcaggaggattgcttgagcccaggagttcaaggctacagtgatctgtgatcataccactgtactccagcctgggcaacagagcaagatcccatctcttaaacaaaaagaaaacatgtgcaatgcccattgtgactgcaattttctcagtcttcttgggtgcctcagaacagcttcttacctagagatgcattttgcatcatgctgatggtttttgggttgtgctaggagttgactgcacctttatttcttcctcactggaagacgacartaagcrgtctgaccacaggcctgaggcccaggaaaattactctgggctgcccggtgtggcgaggaacccagatggggtgccaggggaggctgggccctggaggctcaccctggtgagtgcggctggccagtcccagttgtccccttccctctctgccctttggcaagttaatcacagacagccctgacttctgtaactaaaacatacttgaaggtcaaccagtagaccttcctgttaaggtaatcgtcttaaatggtcaccttgcgcttcctttgcagagctgttgcctcatgcagtctcagacaaaagttttctgttgttgctttgttgtttgtatttggctttggtagttacttcctgctggaagcaggttggggagaattagggagagttgggacggatagggaagaagtaacaagcatcccattcacttgtccaacaagtgccgaatactttcccgagccctctgcctgccgggattcgggaatgcagtgaaagccaaaaccttagagccccgtttggggctgccttgcttgggaaagagagaagtcgctcaaatactccaacaaaatgaatgtgcagcgaggccccgtgtcactggggaggagtgtgcggtgccctaaacacccagactctggggctgtgctgccctgtgcagtgccccgcagctgagacctgaaggcacaggaggaagtacctgcccccagagaagcccaggaagtgggcagagcagagctcaagtgggccccagaagtggatggggccaagctctccaggcctcctgggccatgtgagttttgtttgtgccctgtgagaaacgcggcactatggaaatgtgttaagcagaacaggatgggatcaggttcacattttgaaaacttctgccctttgcagaggactggaggggtggttgaggcaccactcagcctttaccacttcacagggaccttccaagcacccagagggagcaggtgtgggcagaaggggggccttttccctgtcacctctcaagccgagcagggcctggcctggctccagagaggcttccaggtgtagagagagaggccagggaagccgtagatctagggagcagagccaggcaccgtgctaggcttgggaggggcagcagaggtggccaaggagaccctgacccagtcctccagcagcccagaggccttggaacaacagggcagggagaagtgggcccaccataagcacccccacccccaccatacccctcaagcattggagaagacaactgggtacttacaatgcagtatttttcaaataggcttctgaaaccccaggcccacaggtcattctgaygggaaagcaggttccatgatcacagcagtgccatgtgtgctgctgctggccacctaaccctccggagacccacagcgcagagtcatgtgwggagggcctccgatgccagctgattttaactcgttaccttcctcctagggttgcgaagaaaaggagaggggaaagctgctttaaggcagcctccagaggtagctgatagagagcagagagtacaggctcagaacaggccctgaattcacccctccttggatttgaatccttgcactctcgtccagctgctgagcctggctgctgtctcacacggagagcctgccccctgccttggatcttgtcacctgtccctataccccggagtgcccagttctcttccacatccacaggcccatgtatagcggagctggtacccgagacccagctccctggctggcttcaccgtgcgggtggaggactcaagtgagccttccaccactgtagatttctccccgcagccgcccccacaaacatgatcccagccaggtgatctcggccaggtgcacctcacagcctggcagctgccgagattctaggggaggatgcgcagtctctgactgctggaaaggaatctggcagagagaggtgcaagtggaaagtcagttctcatgtttactgtaatgggggagtttggggaaagaccaggggggatgagcagtggcttcccctcttctctgggacccagaaagctgaacgcaggagccccatgctgtttccacgaggggtttgcctctatttttaaacaaacaggtttctcccactttgcttaaatatttgagtgtaagatttgtgtgatttctcttttttgagctcaaaacaattggggaagatatagctggccctgggggattcctgttgggaaggcagcgaagtgggagctctggccagtttgctgggctgagcggggtgctggctgatggagaattgcaggcaccaggaaccagctggagagtgggatagccctgtgcccaggggtcctctcctcgtctgtaaggaatcggggcttctcattcagtttcgagacagaactccttcccagcaggctgaggagaaatgactctgcggggcttagcaaattgatttcatttttagccagaacttcaagacctgtgattttatctgtttgccctttgcatgaggacatctgcttcctaaattctatcagcatagcccagaggctgctcagccactctgcattccccagcgaggtggcactgagtccttccagagccaggaccgtgaaccttcctggaccctgagcccaaggtcrgagtggaacaggatcctgtgcagagccagccagccacggggtcagggagccagttgggtccagcccgcagatgggctgccactgtttgcactcagcacaaccatccacatcttatggcaacattggaacgttgtgctgaaggtctcaaataagaaaagggaaacaaagagaaatcgtgatctgaaaagtcaaagaactgggcagacaggagtagccaaacacacagagctgggtcttgcccccacattatgttctagccacggctggaggaggagagggaggacaggaatcctggatgtgtggtgcttcgtggaaagcacacrtggaaagcaccttgttgacctggacaggactgcattactcaccagatgtggacacagtgcctttacttttacttatttacaacagcgtaacaatcgcctccacagagcatgctgaattccagggtgctttcctgaactaccaccagagactccgctggaagctacttgggagatgcctgggtttccccattagccagtcttaatcattgggaggaacttgctctctctcccagtctctctccgcatctcttactggtcatgctccttgctatctggtgaaatccagccaccctgtgatagatacacacctctccgcatccagtgtggcattccagggtaaacagcctgagctctgagccagcctgaagtgtgaggctacattttagatagagaaacagcccaggagtgtaagagcatcgtgaaggaggcacccggcgcctctgctgccccaccccacagccttccctctgggtgtcacccgagcttgtctcctttaaatgttggcttttatgtttaaggtgtggctgactcaccctgttgcctctgtccccagtttctggcccagctgaagctcatggactacagtctgctggtgggaattcatgatgtggagagagccgaacaggaggaagtggagtgtgaggagaacgatggggaggaggagggcgagagygatggcacccacccrgtgggaacccccccagatagccccgggaatacactgaacagctcaccacccmtggctcccggggagttcgatccgaacatcgacgtctatggaattaagtgccatgaaagtaagtttgattastgtggaccctttttgcatgtgaagtggtttgactttggccttgttatctaccagtaagcactaccccagttatgagggtgctgcccggcagcactcatcctccaaactccaaagaaatggatttggggacaagagtatgttaaagctaaccgtgatctcagtgctgaaacataaggcratcggacctttgaattctgtgatgttgagggaatacagcaaaaccacgaactatactatacatgtacaacacacctgtacatatgcacatacacactggcatacaacgtacgtgcacacacaacacaacatgcatgtacatatgcacacatacatgttcacaaataacatcagaaatgctttaaaatattaatacgtttttgcctagttatcttttttatctaagtcaaaagcatcatgagtctaagctaggcacatgcatgtgatcctctgtgacccttagcttgtcctcttgtcattaccaacagccctctccctctcaggggtgtgaagggtgtgtgaagatgggccctgtgggtggggtgggaatctgatttgctgctgagtctggctctgctgtcctcccccatggaagggcctatggccctcttccctagagtcagataaatcttaatccaccgtatccaggtgattgggtgcaccagttatttgaatattacatcctaccttagcaacttatccgtgacaataccaaaatatttttgtgataggataaaaacagcttcttggtttttgaataataaaaactgtggctcatcagttgttttttaatctcaaatggcatatcagctgaggatctgagttctgttttgttctgttttgctcaccaaaatgttttcttcaacacagaaaattagatagtcaaatgtacttttcttactgttcatatttttggaaatggatagaaaacagacacgggccgggcgcagtggttcatgcctgtaatcccagcactttgggaggccgcggcaggcagatcacctgaggtcatgagtttgagaccagcctgacctacatggagaaaccccatctctactaaaaatatgaaattagctgggcatagtgatgcatgcctgtaatcccggctactcggcaggctgaggcaggagtcacttgaactcgggaggtggaggttgctgtgagccaagatcgcaccattgcactccagcctgggcaacaagaacaaaactctgtctcaaaaaaagaaaatagacattggagtggatgtatgcctttatccagttctgatactgtatccagtgagaattatgaacagttctaccatttgatgtaaaggattagtgtacataattagttctgttttatagggtatttttaaatagcatatttcttcacaccaaagcaatacacaattattaaagaaaatgcaaattaaaaaaaaaaaaagactccgttccaccgttggatctccactgttgataccctggtgtgatgatgtttttagttgttagggttgtttctttttaaattgcagggggactgggtcagagaggcaagctgtgtgtttagtcaggatccgcaggggtggtgtagagtttgtctctggactccttccatccgcgttccattgaatcccctccctccaggctcacttctccctccctccctccctcagcagcaatgctggcactggtgttgtcacatgtcccacagtcattgctctcctgtctctgcagactcgcctaggaaggaggtgtacttcatggcaattattgacatccttactcattatgatgcaaaaaagaaagctgcccatgctgcaaaaactgttaaacatggcgtgagtatctccattttgtttccttctctctttctctccctctctctctctctctctcycyctctctctctctctctctctctcctggctcctctgtgtgacctgtaactcagggatcactcctttctgccactgagctgctttctactgagccattcaaagccctttagtgacgcttgttccctgggggcaagtcatgttctgagcgtaagatacagaacccacaaacgcttactgctcactgctgctcttaccacagctccctgtggcttccagcgaagtcacttaaacatgaacatctcttctttttacacatggcggacactaacaggcatgcgcatcactaggatgttacacaaattcttttttgtttgaaaaatgttccagagataaaagtgcaaaagaagataatgaagtgttctaatatgaaatattcaaaactgaagcatgattgtctgcttaagacacttcccaagtatacaggattaatatttcttttctcacagtgagttgtattttttctactacagaaatctyttgagtgcaaaatcaaagttgcataatattactcaccgttaatgttgcttgatgggagttttcactgctctagccatatgttaagctattttatcccccatgagaagcctatgaaagagatagtagtgtacctgcttttgtcagttggagaaactgaggaaaatagcttcaggagtaacttgccagggcctcatagtagcaagtggcagagatgagattcctcccccggacccagccccctcctggctctgtgttcatgctcatccccttgccctgcctgcaaacacctcctgcctggctgaactttacagctcgccaagtttcaggcttgtattgcagggtgccatctttgttttgcagaggtcctgaaagccatagagcccaccccacacagatgaatgtattccctggtttgttggccctggaagaagaggtgcttcccacagactgtgtagaactaatgaagattcaccagaaccaaaaactcacttgaaacctcttcttttctattttaaaatagaaatcagcctaacaaacacagtattctatttgccaaagaaatatttcagtcacattgtcgatagctatggtattcctgctgtgtgcagagcacagactgggacctcaccgcccccgagcacgtcagtaagcaagtgtgcctggtggcttccccccaacagaaatttttgagtactctttttaaacaaacatccgcaccaggtgcaccacccccattccgtcatttctgaggccagttcaggagggtgagggaggggtcttcagaagactccatggtcattctgatgctcacctctggttgaaaaccatggagtgtggcaaagagagaactggcgaggaatcctcgtttgacccttcccacttgtatgacctcaaggggacacttttggagctcctgttttttcacctcatacagaaatcctactgccttgckgatggggttttgccagagatacaagagttgtctggacaaatgctttgtaaatgtctgttcccatattatacatcctgtgaaattggagtgtatcctagccaatatggctccatgttcatctctcctatcctagccaatatggctccatgttcatctccccataagccacaagttcgcctccatagtgtgccacacggcataaaatcacaggtagtttgcaagaagaaaacattactgtcagcaaaggaacgctgtgttaagctgctgtgggggaccattctctctgcattcaagcctgggctcctccatgcagccgaggcctggaaatattacaagttccccggtgaacatgggtgtctaaaaacagcacatgctcacttagcaaaactccgtgcttgccctttgcagctcaggaaactggccagtgagtgactcccttgagtgtgctggcctgcaccctgcatctcatcatggaaaaatccctcaccgtgcttctgcagggggccaggcttgcttgctctctgcagggctcagaaaggggaacagtggcacccctgtgtgctgctgcagagggaagtcagctccttcccccgtgggcaagatggagccagcagtgttgtgcctcacctggttacggtgcagggaatgggctgggggcagctgtcccagaacctgtggctgctgctgttgcccctcatgtttgagcactgagctgggggcctctgtccagaaacgaaggggtcctgaagaaatcatgcggttttaagtcatcgtcattaaggtttccctttcgccaaatgttgatgtcattctcaaggtggctccagtctgccttcttgaaaagtataacataagtattgtttccgtgacttctgaacaattccactctttgatagtaacatcccaaacgtggcctgtttgatttttttgtgagttgcaacagccccggtgtgtgtggtagcatctggtgctcctgtcgccctttgtctcatttgcagacacagatttgtaagaaccttgcttattcaaccatgagcgccaagatattttgagtgatgtttttcagagcagagactgcatggatttgaaaattgcttgctgtatattcagttgccattggaaatagctgtagatattgagtaataatttggggaaatcataaacactatgtcaatatttccttttttaaaaactgcccaggctggcgcggagatctccaccgtgaacccagaacagtattcaaagcgctttttggactttattggccacatcttgacgtaacctcctgcgcagcctcggacagacatgaacattggakggacagaggtggcttcggtgtaggaaaaatgaaaaccaaactcagtgaagtactcatcttgcaggaagcaaacctccttgtttacatcttcaggccaagatgactgatttgggggctactcgctttacagctacctgattttcccagcatcgttctagctatttctgactttgtgtatatgtgtgtgtgtgtgtgttgggggggggtgagtgtgtgcgcgcgtgtgcattttaaaagtcataaattaattaaaacagatccacttcggtcagtatgtgtcccaacaaagaccctttgattccagctatggccgaatgaatgagtgagtgagtgagtgagtgaatgaacacacgtgtgggggaggggagaaggaagtgcatgatgtcaggcaccgtgttggcatcacacaacaaactgtggatcagttttttttttttttttttttttttttggagttgaaagatgtgagacagtattcagaataatgaagataataatratgattattataataatgatgatgattccaaggaaaaaacctacagcgaatgttccatttctaccccgcacgcagacactctccctaacactgataacctgagmccccagcactggacggaagaatgctggcgtctccgtgtgtactggttcagggttctggccccagccttgtcaggaccccctggtgtccagagcccccacccctcccgcaacaagcagctgatgccccagtgattctctmtacatttttcacctcggccaatatgtccaggaaaactgcttacttctcttttcttgcctggagcyttcattgttcacccttacgttgcaatataggaattaatgctacaaaataaaagtaaagcttacctgaaaagtgcatagtttggggcaatggtatctacatctcccactgtgggaaaaccagcaaagcatcaaaactctcaattctcctgttaccraatgcagatctgaattataagatgtttatgtttgaccattgtttcaacaatgggattttgttacgaattatccctttaactgaaaccctcagttttactgtttacattattaggaaaacagggatatcttttgaatctaaaaatttgatgtacagcatgtgatttttgaagtttacatgtaaagtcacagtataggtgaaataacgtttgtcatattttgagacgtatcctgcagccatgtttttacgtgagtgttttagtcaaagtacatggtagacagtctttcacaataaaaggaaaaggattttttttcctccaaatgtacatttatcaacctaatgattgatttttttaaaaagagatttcgccccagtctggtttatgaaagttcattgccctaaactgtgctgattgtttttaatcaagttataaatttccaacctagatcatgtatctaccaactctcctgcattttccaaaaggcattgagcttaaatattagtcttgcttagagtaggttatccacttacatgctgcgctaaagccatgcctttgaaactccttgtttaaaacatgatatgatttttgtgggcagtttcagaaaagaaaacaaacaaacaaaaatcgaccctttaattattacttgcaactcaacagatctccctgccgtactgccttttccaggaactttacttcagggctgtccagattgcagttgtgccccgtgtatgtggatctagttcacagagtctttggaagccagcagtcgtgccctccgtatactgtccactcattttatgtagatttggtatcctcagcagccagtgttaacaccactgtcacgtagtgtacagattcatcttttatgtatttaaagtaatccatactatgatttggtttttccctgcaccattaattctggcatcagatcagtttttgtgttgtgaagttctactgtggtttgacccaagaccacaaccatgagaccctgaagtaaagataaggtacacatacattatttgagtaaytgtttccttgggggccaatctgtgtatgcttttagaagtttacagaatgcttttatttttgtctataacaaacagtctgtcatttatttctgttgataaaccatttggacagagtgaggacgtttgccctgttatctcctagtgctaacaatacactccagtcatgagccgggctttacaaataaagcacttttgatgactcacaagatgaatccttttttcctctgtcccaattgtgtgtctctgttccaaacacattttaaatactcggtcctgacastgtctttagctaatccttgaagaaatraaagtggaattgaatctttttagtttctagagccttgccttcagtttgggaattattttatcagtaataacaaacttccacaacacaattgactttgccgcaagatgaacaagtagaggaaaagaatctcttccatgaacatcctataaagtcatatgttttgtttttagctttgatacaccttaattctatgtgtatcaccattttttgaaacttccttgggataccattgatggatagcagacttaacggcattccacttggtgccaggttaacacagacagcttgtctatagcacttgctctgataactcatttttcttctaatgcaactgatgtattatagcaggggtccccaaaccccgggccacggaccggtactagtccatggcctgttaggaacctggctgcacagcaggaggtgagcagctggccagcattaccgcctatgccccgcctctttcagatcagcagcagcattagattctcataggagcgcgaaccctattgtgaactgcacatgggaggaatctaggttgagcactctttatgtgaatctaactaatgtctgatgatctgaggtggaacagtttcttcctaaaaccatctcctcagccccctgccagtccgtggaaaaactgtcttccacaaaaccagcccctggcaccaaaaagattggggaccaccatattagagaataatttgagcataatgcacttgtcacattgcttgtgtgccgtttggtctgcaaggaacattaggtgaatgcagagaactgcactcaactgagctgcatagggaaacacaacacaccgacacttcaaacatctccagcacctcacttcagtgcatgtgatttgttacactcgttcatatctggagttacacgtttccacctgacatcagatcacctttctcctctttacaataacccaagagctgccatccttctgatgcccacaaccacaggcgtgccttacatctttttcaaggtaacttgccctgtttttatattttgaatatttcctaaccagttagcgtttttataattgtgctactgtttttattagatttctttttcttttcagtgtgtgactcattacattttgggatgttgtggccctagtttcatttttcccagaagttctgtgatttccattgtgcagctttgcctaaagcagtgatttctaggaacatacatgttgcattattgtagaattgactgtggtcagcagggagctttaattcaatgttctttgtggactgtttgaatgtggacattcattttcccttcattttggttaagttcctggattagaatccacaatagttccagaaggttatttctaattcatggaagggcaaaagttggtatgaagcattaatcctgagcacaacacttttcaaaacagtggttaagagttaagtgcaagagattacaaactatatgttgtgaaatggtgatgtatatagtgtgcaaatgtacacaggccgagaggctgaacaaagactcaggaccgctgcacacaacctttcttggaatttttaaatagcacaaaatcagtgattggagtgactgttgtacacgtgcatctttcttcgagctctgaaaataactggcccccattccttcctataatatagatatattaaaagcataaaaattaatatagattgctatattaaaaacatagaagtcattcttcctaaagggcagaaactctgccatgtcttttgaattcctatgctaggctgggcacactggctcatacctgcagggggatcacttgaggccaggagtttgagaccagcctgggcaacctagagagatcctgttgctaaaaaaaaataacaattaaaattttaaaaaattagctgaatgtggtggtgcatacctgtagtcccagctactcaggacgctgaggcaggaggatctaattgagcctaggagtttgaggctgcagtgagctataatcacaccactgtactccagcctgggcgaacttgtcttttaaaaaaataataataattaaatagatagtgaattcctctcccgtagagtcacctgcatcgcctcatggagcctctggccagcctgccttcactccatattttcattattctgagctggtatctttataaacagttggcaaattgaaggggcagtcatagtaaagtagcccagaagaccaatgaagtgacccgggaaaattacagttgctaatttaacctagagtggtcattgaaaattatttcataggccgggcttggtggctcatgcctataatcccagcactttgggaggccaaggcgggtggatcacctgaggtcaggagtttgagaccagcctggccaacatggcaaaaccctgtctctactaaaaaatacaaaaattagctgggcacggtggcaggtacctgtaatcccagctactggggaggctgaggcaggagaatagcttgaaccccggagacggaggttgcagtgagccgagattgtgccattctactccagcctgggaaacagagcaagactctgtctcaaaaagaaaaaaaaagaaaaggaaaattatttcataaaagaaactcctgaggagtaaagtacctctttttcttaactgagtgcccttcagaagtttgtcctagttctgcttttggagttctgtgaaaatcctgccaaagagcaattaaatgccccaatctgtgattgtctctcaaacactctgtaaacactctgtttaatttcataagagaggggacaaaagattagaattctccagaatctactgtgatagatctttgtttttatagaatgttttatagaacttgttgctggaagagatgttacagatgagaagaccttggcccagagaagctaagtgacttcttcaaggtcagacagtggtcagtggcaaagctaagcttagaactcagctctctgccccaacttctaagagtggaatttgaatgcatgcgctatggacctggaacctcaccatttccctaatgagaattaatctgtattatcccattttcctaattctttccctgagtccaacagttttgtgggtttttaactgtctcttgatttttttaaatcaaggagtctcactggggaatataaaaatattcgtagacctacttaatggcactgtggacatggaacttgaaaatctgtcatgaatagatttcctgggtgcttctgaatggccagatttagaaaccactgtcttaagtagtgaagcactcccaatgatgactaaggggtttttttttttgttttgtttcttttttttttttttttttttttttttgagatgggcatttgctctgtcgcccaggctggagtgcagtagcctgaacataggtcactgcatccttgaactcctgggctcaagtgatcctccttcctcagcctttggagtagctaggactacaggagcatgccaccatgcccagctaagtttttaaattttttttgtagataaggaatcttgctacatcccccgtccatctccatctccctccccctctttctcccccttttttctgtactctctcctaatatatgaacaagttaacttctcattgattagagcaggagttagaaaattacagccttagggccaaatccaacccagaaaatgatttttattgtaaataaagttttattgaagcatagccacacctattgatttaatgttttctatggctgctttcaagccacagtggcagacatcatggtccacaaaacatgtaccatccagccctttacagcaaaggattactgatgcctgaaacagcctcgttttagtattacagtctaatttctgcaaagccgtgggcttcagctacagttgcttcacgtttttcctcagctgtgatataaaacaaagtttgagaaacatttcaagatgtgccaacaaaattgaatattaaaaacttggtgggatctggcaagatggccaaataggaacagctctggcctgcagctcccagcaagaccaatgtagaaggcagtgatttctgcatttccaactgaggtacccagttcatctcattgcgactggttaggcaatgggtgcagcccacggagggcaaacagaagccgggtggggcatcgcctcacccaggaagtgcaaggagctggaggacctccctcctccagccaaaaaaagccatgactgtgctacccagcctgcatactaagcttttcccacagtttttgcaatctgcagatcaggaggttccttcacgtgcctacaccaacagggccctgagctgcaagcacaaaaccgggcggctctttgggcagacaccaagctagctgcaggaggttttttttcgtaccccagtggcacttggaacccctgtgagacagaaccgttcattgccctggaaagggggctgaagacagggagccaagtggtctcactcagctgctcccactcccagggagcccagcaagctaagaatcactggcttaaaattctcattgccagcacagcagtctgaagtcagcctggaatgatcgagcttggtgcagggaggggtgtccaacattactgaggcttgagtaggcagttttcccctgacagcgctaaggaagcagggaagtttggactgggcagaattcaccacagcacggcaaagcagctatggccagactgcctctctagattcctcctcactgggcagggcatctctgaaagaaaggcagcagccccagtcaggggcttacagatgaaactcccatctccctgggacagaacacctgagggaaggggcagctatgggcacagcttcagcagacctaaacattcctgcctgctggctctgaagagaacagcagatctcccagcacagccctcaagttcggctaatggacagactgcctcctcaagtgggtccctgacccctatgcctgctgactgggaaagacctcccaacaggggtcaacagacacctcatacaggagagctccggctggcatcaggccggtgcccctctgggactaagcctccagaggaaggagcaggcagctatcttggctgttctgtagccaccactggagatacccaggtgaagagggtctggagtagaccgccagcaaaatgcagcaacttgcagaagaggggcctgacttttagaagaaacactaacagaaagcaacaacataaacaaaaggcccacacacaaaaatcccatccaagggtcatcagcctcaaagatcaaaggtagataaatccacgaaggtgaggaaaaaccagcacataaatgctgaaaattccaaaaaccagaatgcctcctctcctccaaatgatcataactcttctccagcaagggcacaaaactggatggagaatgagattgacgaattgacagaagtaagcttccgaaggtgagtaataaactcctctgagctaaaggagcaaattggataaagagtcaagacccattggtgtgctatattcaggagacccatctcatgtgcaaagatgcacataggctcaaaataaagggatggaggaatatttaccaagcaaacggaaagcaaaaaaaaaaaaaaaaagcaggaattgcaatcctagtctcttgtaaaagagactggcaatccttgttacttataaaacagactttaaaccaacaaagatcaaacaagacaaagaaggacattacgtaatggtaaagggatcaatgcaacaaaaccaactatcctaaatatatatgcacccaatacaagagaaccaaattcataaaacaagttcacctactggttgtgtttttctggtggagttttgactaaaacagcctctcagatgttccagactttttctgataacaagggaagaagcacctctggaaggatggagtaaaggcctctaagctcttcctcaggaggcttaaatgctactgctgctgccaccatcctgtctctagtgccctctgaaaagttccagcacattttttaagtactcaacaccaacactgatgggcaatggaaaatagcttttgtcatcattcccattaagy

SEQ ID NO: 95115 - DNA, 18441 bp, Homo sapiens
agagactgctacagtgcatacagcctttgccatcggaactgccttattaaagcaaaaatgggaaaccagttcatgcaggcagaagcagttggtggtgtctggtttttgtttgatttggttggtttgggattcttttgtggagggttaaattcccttggtcttttcttgccttttattgtgcttcagtgccattgcagcttgaaaaagaaatgtttttgctgttaaaataagaacaaagagaaaagtaagttttgttaatgagataaatttaaagtctaagatgtgttccttggttgtataaagcaaaagtagccatcattcctttatttattttcatttttaggaatttcaagaagtgtagttcaatagtctaatcaagtgtgtgtgtgttttaagtaggaatctgagaaagccctctaggaaagggtatgataagctttatatacctctttactgagcagtaggtaggctcacttctctttcccttcaaaatgcttttcataggcttagagaagggctctatggaagtattaaatctggcctcttgaaaacaatgcctcggtggattttacctctgtggtcttaaacaaggtgggctttgtactatggtaactttacctagaagggtatatggtgtgtttccttggtggaaggaaaaaaaggaatggatgtgctcactgatttttaaaacgttttccattgacatggatggtttgggttttggatgaagtgcgtttctgtggatatgaagcatagttggaatggtcactcctattttcctgacactgattaaggcagctaaagggggatgaaggcataaaccaaaatttggatcatataagcaccattttctgtccaattttattgtagaccctggtcttaattggagagaattacaggcattttattttttgtctctgttttcctctcctactcaaacatttcttttgtcatctgaccattcagtcatgtttcctggtaaaaccacacaagtgagtttgaattgtatttgaatagatctttttggttgagttcctaatttggggggtgaaagtagtaggggcatccccaggttacatgtaaagaatttctattattatccagtacttaagattgctcccattgagtaaggggaagaacttctacttttacagggtgcataagagccacacaaacacacttcatcttaggaagcacttggagaaaactcccaagaaagtcagtgttagcaaaaatggttgatggtgatgcttgactcttatagatgcgagtataccaagatgtctgctcaccaaactcacttgcttttaatgcttaggaatatgtatattccagtattccttgtatgaaaataattagtaatgtcagacattgttgtaacactgtactaagtagaagtctagggttagcttgaatgaatgttaactttctctgtgaattttgactgcttacaattgctggtacctggtagcatttattttccctcaagtacctagtaaccttatgaaggtagggagggtagatgctctaccacattccttcagctgtattgagtgttccatttgcttatcaatttagagctcttctatggaaagagggtgaaaatctgttttgtgcctcttttttttgtatgtaaatgtgcaattatactggattttctcttgtaaaaaacactacaattcttttactgaagctcctaaactgccatttgcctgactccagcaattaattctgcggtgactcattgggcttccagtacttctgttgattagatatggtcccaaaagaaagagcaaaatggaaaatgcgatccatgtcaccaaatataattgctacaagtaacatgaaatacagctcaccaaaacactaaactttgctcttgagcaattatatagtttgatgtccttttaaaaaataagaaaagctaggttttatcatactaaaattttattttgtatatgatgtttggttttttaaacttactaacataaggatttcctttaatattccaaatacagttcttgaaacagtatccaacatgaaatcttatctccttgcttttagacttagtgctatttactatctaaagacttttctatggtaagccagggtacatcctatatactacagataccttaggtttcagtatttttatgcagcttcttcattgtgtcacattttgttttcatatctgtaacagagctctgctgaaattaaaaaaaaattatgattaataggattgtttcaccatttcagaaatcagagtagaaaacaaaatagctgccaggtgcagtggctcacacctgtaatcccagcactttgggaggccgaggtgggcagatcatgaggtcaggagtttgagaccagcctgaccaacatggtgaaaccctgtctctgctaaaaatacaaaaaggagccgggcatggtggcacatacctgtagtcccagtttctcaggaggcagaggttgcagtgagccaagatcacatcactgcactccagcctgggtgacagagcgagactccatctcaaaaaaaaaaggtaaccatagttctgaagtctttggccatgaatgttctttaatggtctaaaaagcggttttagtcatgctggtgccaaggagttctcctcacacctccatagcgtcaatgttgacctatttgatatatttttaagttgcagattatagatgcagaaagagaaaattgtcctttatgtgtgcatgagtatacatgcactgtgcctgtgatacaccaatgaaatattccaaaagacattgctcactcatagtctgaagttggtatttgttaacttttaaatctatatgtggtcagagtgtaagtggctggtttttattcttgtccaacaatgaaataacttaaagcagcatgggctaatggtggtattttttttaaccacatgttaatttgttgaaggaagaagtgaacataagatttttgataatcagcctaaagcttcagaaactggatcagtaagagctaaagatgaaatcctgggaaactttctcaggcactgtgcaggggagggaggggctggaccgccactgctgcgagggaagaatcagaagagctgcctgtggctggctgagaagggcaaggtggatggctcttcattcctggaaggctgaagcagccagaggcagtgattcacctctttaatgtctaatcagggagagatacaggagtgaggtgggttttattttcatttttgttttaacaagttcccactcttatcttaattctcaaaaatgatctggcctcatctatagaactggctgagttggggaatcatttaaaatttgggattttctgtacaagtcaagaacatatgtgaaagctaaaaaagtaatggaggcagggggactgctcccagctcccttctgccatttacacaaaatatttgaaaacatgtctgtaaataacgttgtggaactgagatattgagtatctaatcatgtaaaggaccctcagatgggacaggctattggacaactttcctggttcatgaagtggaatttcctttttgagtagtttcttgcatggtgtattccaataggtcaaacccagacctactgtttgcaaacaggccatctgtagagaatacaatctctggactgcccaggacttgttgcttgtctttcatttcattttaaatacaaagctcttcctttagcattcaccttgaagtcaaggtgttggctgccacatgccatgtcctcttaacaagataagaaaacagtggctatggagccctcacagctgggaagctgacattctatacttccatatgagaaaaaggacattggaaagttgctttatttctgggcagcgtagactaaagttacttttcacaaggctgatgcatccagcctcccccagttgtccaagttggtgcagacatgaattgatgaatggaaacactttcctttggcctagggccacctagaattggtctctggttatttgtaaaacaaaaagtagaacttgcttccattttcagatggactagggaatactataattagacagctttgcaatgaattaacaaatactgaaaagttggaaatgtgtatatactgaaatctcaccaacttttacctggggtggggtaccaggagaaagggaaccccctttctcctggtaaagggtaaggggggggataatgtttaccacaggtacgaaatagtcactttaacattgagacctctgcctcattgaattcaggttttttaagtacttgaaactcttcagattctccttattttagtttctttttacatttatgaagtagaaagcattgttttgtaaactgttttgaaaataaatagcctagtctcttatcctctttagcgtggattaaaggtgaagttctgcaaatgggagagtgttcacagtagatagctcagattgattgaacacatttgaggaagagactcctgcatgagataccagcatttttacaaatactttttatgtacattctttattttgtcattttgtcaaccctctccccaagcacatcttctttccttttactatgtctatgtagggaaaaaaacaaaacaaaaaattgcacttacgttacactcccaaaatgtgggtaatccgtgtctttcaaaaaacatttctgttttttgttttgttttggtcagtccattgcataagtgacaagtttgggtgcttgtggcacgtatgtatgaagcgggagggggatgagaaytgcctgtccttcagtaggctgtaaaagtaatttacatgtaagtaaaaagggaaaatagaatagatgccaaagtcatttattcagtccttagttttcttatgtggcattactgcatctgctagttagtgagaaagcaccctcagcttttactgctcccctccctgcctgccaacacacttgatgtgtgcaaacagccctcaagtatctgtcagatgacctatataaggtattgaataaggtattcttgtcagtttagaaatggactggataaaacttacttggttgtcattattttatctcatttgtcctgttacatgccctatgttaagataattatattgccactaataatcaagatgctaaatgagtattacaactggctaatatcattttttatatacaagggtatgtgtatatttggaattgrtatgagaaactcatttgtacccatttgagtgatattgcacaacaaacacagatacctacagactccgttttcattttctcgtgttctttatgataatgatctttgtagattggttatttctgtactttatctgtaataaactttgtagatcctgtgaaccattactttgcctaaatcacttgagacttgagtctttaataacaaagcatcaatattcactaaagtcaatctcttttgagtttctgtgacttggctagaagctcttgacactaagggattagtgttaattttccctgggggtgttccactagggcattactgtataatgacttgatgttgccacatagacttcaagatatataatattttgaggattttgttgattggcctatgttttattgcatagtgtgaaacgtgtaaagcttggttaacctgtatatagatagcttattgttgactagttatagtgtatttagggttgcctgtaatatttaagcttctttactgatgtgtgtgctggtaggaacatataatttttgtacattatatttactgagatgttgcctttyttattttacaaatactttggaattccaatgtgttttttgcttccgtgaggattaatttggaaaggtttttaatgacattccactgatttcagattttgcttgagattgacttcaataaattgtcctgtatgttccaaattaaatatgtgggcttgttctttgccaataattttttgctacaacactctgggcaggaggccatcctgggtgggaggactaaatgacacaatccagccaacctcaggtagtgtagcttcctgcagaatgcggctgtgttgctaaggaacgaggatctgagagcgggctgtttggttttccatttagaggcgaggtcccgggagaaggctgctccccgcggtggtgtggttgggccgtggagacgagctgctgatgatggaccgtacgccgacctactcggctggaactggggcgctggctccctgctgaacgcaccagagggcagctccgctggctttgcgtaccctttgccagacgatgccctcggcacagccgccaggccgtcttcctggggagccgccggagcgcgggcaactgggagagggggcggtgcccagttcccggcccggccctccccgcggaggtggccacgtcagcgcagcgtcgctcggagctcgcggccggatggggaaggcggcggcggcggtggcctttggggccgaagtgggcgtgcggctcgcgctgttcgcggccttcctgtaagaaagatccacggccgggcccgggcggccccgcttcccaggcaggcgggcggcacggggcggcgggtcgggcagtggggaagcggggaggaagccaggcgacctgctctgcgcttctttgttcccctctagggtgacggagctgctccccccgttccagagactcatccagccggaggagatgtggctctaccggaacccctacgtggaggcggagtatttccccaccaagccgatgtttgtgcgtggagaaagatcgtctttcctccctccccatgaccsggcttcccgcgggcacctgtgcgttttccaccccgagacggcctttgtagggacccactgcccactccgctgctgtgcgctgggttccgcctcctagggctcgagtgtttaagatcctgattgagagaggagggtgtccgagcctctttgggctgagacaacgttttcccgggcgctctgtgcctcagcctgaggtaccggggcccgagccgcacgggcgctgctgttcactggtggcgctgcctggcgcccggttacgcgcactcagagaccttatgttagctccagtgagtcctgctgtgtcacatccctctttcctgtaggagcacgagtgtggcttttttttggattgtttttaacctctgacattctgattcaggttattgcatttctctctccactgtctctgatcttcctggccaaatttctcaagaaggcagacacaagagacagcagacaagcctgcctgggtgagcgctagccctttcgggccggtttcttcgtgctgggaacctaggaggtcgttgtgggattcagccacggtgagcctgtgtggaggccactgagttctgcattcctaaaggaactctatccccgcgggagaggaaaatagcactgcagggacttggttacgcaggctacacggcaggcagccctgtgcctaaatgcactgggttatttgtacctcagaaatgtctttggcctagtacaaaagttctcggctacaaaagagtgatcactgaggaccctrattatttttgtgcccaggcctggttggattctatccatctcagaaacagcacggctgctctcataacgaggccatgaccatacctttcctcctagacagatcctttcaactaatggctttgctttgcagctgccagccttgccctggctctgaatggcgtctttaccaacacaataaaactgatcgtagggaggtaagtgacaacagctaaccaccccagcatctgcctcagcccttacccaccagaacagagaggttaatggtgtccaccacacgtctttctcattcttttctcctttatcttcactctgatttttcttttgtcattcaacgcttactcccttccccatacctcagtcctccaggtgacacctgggckcttttctgcctgaacagcatttcccaccaacggccacagcagtcggtcagtgtcctcttgagcacctcctgaagctgcagtgtcatttgctgtttgccctaaaaagtaatcatgtgctggaatgggcgtttttcccctaatttaaatgctcaccttgaaaggcttttctcttagtgtggtgactatactaagccagttaccttattttgcctggggcactatttgaccaatagttaacaggattattaatgtctgctacaactgaaaaataatttctggagttaatgatttacgttccaaccatgctgctttcttccaggccacgcccagatttcttctaccgctgcttccctgatgggctagcccattctgacttgatgtgtacaggggataaggacgtggtgaatgagggccgaaagagcttccccagtggacattcttcctgtatgaatatcatatggactctaccctatgcttgttttcacatcattgaatttaacctagaaagctagtagggatgggaaaatctgactactcytgtttctacaatttggaaaatccccccttctttagtaactccacagtttaacaagtctgagccttgactatttgggtaaatattacagaacagaaaggtagtttaccttcatgagatttgcacatttaattgttatattatttgcctagatcctgcaatcttgtactagcaataaaaatacctttaacgaagagtttctatgtgtcaggtactttgaagcattttcatttcttacctaattatagctcacaataatccaatgaggtggggactattgtatttatgagtcccatttatagatgaggaaactaaagcatcaacaagttgatacatatagctagtataccgaaaactatactcagataaaacattaactttggggcactaagtccttcatttttctttttgtttccctttccttcacaatgacttacactataagtatacacaaaaaaggattaaaacaccctcatggccgggtgtggtggctcatacctgtaatcccagcaattgggaggccaaggcatgcaggtcacttgaggccaggagttcaagaccaggctagccaacatggtgaaatcccaactctactaaaaataaaaaaattagctgggcatggtggcacacacatggagtcccagctactcgggaggctaaggcaggagaatcgcttgaacccgggtggtggaggttgcagtgagccgagatggtgccactgcactccagcctgggcgacagagcaagactgtctcaaaaaataaataaataaaaacatactcatgcttcctagcctcctatgtggggatgaatgaggtagcttcctttaaaagacaaaccacttaaaagtttttcttgttccagttgcatttgctggtctggcctttgcgtccttctacctggcagggaagttacactgcttcacaccacaaggccgtgggaaatcttggaggttctgtgcctttctgtcacctctactttttgcagctgtgattgcactgtcccrcacatgtgactacaagcatcactggcaaggtaagcaaagtactcaggctatggaagcttgcatatttcactcattttattcctagcacctagcacagaggagatgcttactaaatatctgctgaatgaacaaattaatgagtatggatggtctgggttctgtactaagtacatttaaaattataggaaagataagacaaaaagagtttaccaaagataaacatcctaatttttccattatttgaagcattgtaagttcaagttaaactgcatctacaggaaatttaaaacctcaaagttcaatttactctcttaaaaatcaggttcattgtcataggacttttgttcaaaaacataagtaaaattcaagaaaacataaaattataattaaaccaaacaaatttaagctgaatgctatagtaagtaaaatatccaaattacagaacacctggcttggcgcggtggctcacacctcagcactttgggaggctgaggcaggcggatcacctgtagtcaggaattcgagaccagcctggccaacatattgaaaccccgtctctactaaaaatacaaaaattgaggccaggtgcagtggctcatgcctgtaatcacagcactttgggaaggtgaggtaggtggatcacctgaggtcaggagttgaagaccagcctgaccaacagtgaaacgctatctctactaaaaatacaaaatcagctgggcatggtggcacacgcctttaatcccagctacttgggaggctgaggcaggagaatggcttgaacctgacacaattccaaaaaaaacgctggaggtattgcccacaggtcctcaggaaccctattttaaatttttaaataaactagttttttgcaaagagaagcaactcttttttttttttttttttttgagacagagtctagctctgcgcccaggctggagtgcagtggcaccatctcggctcactgcaacctccacctcctgggttcaagcaagtctcctgcctcagcctcctgagtatctgggattacaggcacatgccaccacgcccggctaatttttgtatttttagtagagacagggtttcacttgttggtcaggctggtctcaatctcctgacctcgggatccatctgcctggtcctcccaaagtgctgggattacaggcgtgagtcaccgtgcccggcgagaagcaactcttaaaatactttattccttcctctaggaccctttaaatggtgaaaatgggcagatgaatagcaataagtggacctttgttactcttctgagttagaaaaattctaatttagtacactctgaacaaagcttattatacttacttaagatgtgttttgatttggtgttcagaaagcaacctgacaatgataatactgtaactatgataaaattgagaataaaaagattttatttagaaatcataagtctggaattgaggttattttagccccacagtagagtatcctggagggccaggtcctctatgctatgtgtatgtaataggatttaggagcctaatattaagagaagaccttgtttccactctcttcagatgtactagttggatccatgattggaatgacatttgcctatgtctgctatcggcagtattatcctcctctgactgatgcagaatgccataaaccatttcaagacaaacttgtactttccactgcacagaagcctggggattcttattgttttgatatttaaaaattgaatctggccgggcgtggtggctcatgcctgtaatcccaacactttgggaggctgaggagggtggatcacctgaggtcaggaccagcctggccaacatggtgaaccctgtctctactaaaaatacaaaaattagccaggagttgtgtgccgtaatcccagctacctgggaggctgaggtaggagaattgcttgaacctgggagctggaggttccagtgagccgagatcgcaccactgcactccagcctaggcaacagagtgagaccccatctcaaaaaaaaaaaaaattgaatctatctcaatagagaacaggtgaactagccctcctaaccggaccatgcacaagacaagaaattctagcctttttttccccttccaaggtgcaagtgaggacataagccacactgtattctgcctccaaatgattacacacttttgcccctgctcatctatcttgaggagttacggttcttttccactactgtatgccacatgttctagtaaaaggatctttcaaaggtgtccaacaccttatgaatctggtctatcagattaatatctgaagatctacagtgtttttacatttaatttaaatgccattcttagaaggatcttgtcacaaagaagcctttacatagccccaccttgtctcagaagctagagttcattatcaaaacttaatttccatttcatatagctcaaaatcttaaaatctagggcatggccaactaaattactttgattctgtttaccttctctgatgacaattccatcaagccttaaataggaaaatgtcgaatctagggtaatttatcacttttgtgtgcatcttatctgagtccagccatctggtactgctgtgcattttgaacaccgtgggcataaacaatttgttgaattactaagtgaaaacaataataaagaagaaaatggtcaggagtgtggtttcagcactactaacagatgactgtttctacctcatttgaccataactgtacttgtgagcttctttccttccattcatgactgaagatctgctcaaatgcaccaacactgccaagtgactaaggtagaaaagaaaaatgacaggtatcgtcatctgaaggacagatgaatctttttctgccccttcttcacaatggaatataaggaacaattatgggatgtcatcagaatggatgccataggacctacagctccctttctcttkattgtgattatactttaaatatgacrttgtcttttatgtgtatgttcctatattttcaatgtatctttttccttcagtaaacctgatattcaaataaaatggtaaatgtgtgcttttttaaatatttaaagtacattaaggggctggaactttagtaaagcaaaacattgaattccccatccgccctaagtgattcaactgctgttatctatagtactggctaatatttataaataccaaaggaaagtctcttataattgccatgctttaaattctgaacttaaattctgcctatgacaattaaaataccagtcaacaggaaagaacttacatattagttctttgcccaaaacctatttttttgttttagtaatacataaagacagagaaaatcgtgactgtactgattttcttgactttgagacgggtgagtccaggtaaaagtaggccactagtcaatatggtttcatgttagtatttactaaagttttaaatataatcacgtagaaaacaaacatttcaaaaatgcaaaatattagaaatctaatcagtgctattaatctttccatgcaaacaatctcttttgctgagataagtgatactagttctgcagctgggaatatgtacaaaatgatgctgtaccagagtttaaaaatagggttggtctagagattgcacatgatacaaatgaagcagcgcaaataatatatgactaaatacaggatttcaatcaagcttatcatcctgggaatatacagctataataccatgaatagacaagatataaagctctttcacagttacccacccctcaccactaggaaagaaacatttcttaatacaaagagtggtttatctggctatccagggctatgctgtccatctttggttatagggactccctctgcttatcctttggtttactcttaaatagcacctattctgccaataggaagagtaaacataaatttgaagaccacaacttggcaaaagcttccccttaatatacagtgaatacttaattctcaataactcagagtttatatacctttaaaaaaataaagtattccatatatctgaaacttagtggcatacttagcactagactataagcagatgacaaagaaaggccaggcctgacctataccccaaccttacctctacaatctccatggtgacagtaattacccttcattttccttttctttccagaaagggataaagaccactgctgtctaaggaatggcttcagtaaatattaaatgtcagtggctttgaataccataacatttataaaaaaatttataaacaataaaccacagctcgcctgcctttgccactctataaacagaggcctgtggaatctgagagcaagtataaaggattatcataaagagaactacaaagacaatgacaaactgaccaatgaagaagaaaaatctacagcaaagtagtgaaaagatgccttgacaaaattagtgtgcagtcacttgtgttcttagaagtaaacctcacttcatatgttccagactcagctgacactgactctggaatagctgtttcttggaccctacagacataagtttttctttcagaacaagttaaacatttccccctagccaaacctacctgctcaaccaatgctgcccgtgccaagagccttttaaatatgctttgtggattatggatacctaagaaggaaagaggatacacaatactaccttagctcaagtagaaatggcaggtgacaaattctgtttcaccataaaggcaccactaaaaggttttatttagaacctcagcagcctgtagaggctacacaatttcaggttcatcagcttttacaactattttcaacgtaagaatagaagctattagcaaataacttctatcaaatataaaagggaggcctaggatatacaacatctttgctttataaagatgcacctaacatgaactaacttgtcaactttagactcttacagcagctcaaacagttgcaaaaacaatgaacatcagtgatttctggcaataagtctgtcagttctaagagagtaaacaacacttttttaaagctacattctagtctttcttcatacactacacataagaaagaaatgcaggttcaaaaataaatcacccaaaagtcttttccatgtccactgagacttagccttcagttcaacacaaacaagagataagtgtactccaaaatgccttctgaatctcaagaatctgtttccaaactagaacattttctaaagataagcaataagttccttaaaaacatgtctaccccacccaaaacaaatcaaacccaaaataggctttacaccctgtcaagtactaatcaataaagtgtggcaactataaactatcatcaaagaattaaagacacaaaccacccccagctatgcagaaaaaaatggcaagtgtttatatgaagccagtggttaaaagtaatagggccttttgcttttccattcatttccaaagaggaagattatcttccaaagaccccagtggtgagtaagtggcaggcaacatgcaggaaatgacgcagctgaggagaggaaaattgcagcaacaaacaggtggattttctggggaaggatccctcaatgtccgtctagggaagaaagtgggagaagagctgcagtcacaactggaaggcaaccacagagaatgccagagtcgaatacacagactttgtaatttcacatctaaaaggctgagtaatttaaatctcaggatgggtggttggtaattaaaatcataactgttgccacagtaactcttagataacagaaccattaaaactctgagtttagatcctaaaaaatgacaggtgtcattggacaaaatctctagcaaaacagacatacactaatcttcctctaaatgggctactgtgtttttttccccatgaatttctaccagtccctctaaaaatgaatagcagcctagatcttggtgacaggcaacagctagtatatttaaaaagagcttgaggctccatagttcattataacatgttaatatgtaagaattacactatatatatgacattttaaaacttacattaagcagccatagatgggtcatttttactgtaaaggctgatcaaggaagataccctgggtttggtagatctctttgaggacgagcaatactgtatcttcagactccctataaagagaaaaaattatgttgagaaaaggaactaacacttgtgccaaatgttttacatatattatctcatttaatccatacaaccatcttgcaagtttattttttacttctgcaaagaaatgagattcagaagtaatgtaattggcagtggtttggaaggtgacctggcaaagaactctggcattaagtctagtaatataaaaaagctaggaagagaggccaggtgcggtggctcatgcctgtaatcctaacactctgggaggctgaggtggacaagtcactacaggtctggaatttgagccagcctggccaacatggtgaaaccccatctccactaaaaatacaaaaactagggctgggcacggtggctcacgcctgtagtcccagcactttgggaggccaaggtgggtggatcacaaggtcaggagtttgagaccagcctggccaatatggtgaaaccccatctctactaaaaatacaaaaattagcagggtgtggtggtatgcgcctgtagtcccagttactggggagactgaggcagaagaattgcttgaacccaggaagcggaggttgcagtgagccgagattgcaccactgcactccagcctggcagataggcgagactccgtctaaaaaaaaaaaaaaaaaactagccaggcgtggcagcatgcgactgtagtcccagctactcaggaggctgaggcaggagaatcgcttgaaccgaggaggcaaaggttgcagtgagccgaaggttgcagagtgtcactgcacttcagcctgggcgacagagtgagactccatttcaaaaaaaaaaaaagccagtaagaaataaccaagaattgttccttttccacagagatcattctagagacactattgaagagttatccagttggtcaccttaatttttaaaatattatgcactttttggaaaaggtaatacaatcataaggttccaaattccaacaatataagaaagtaacgaagtctccctcccacctttgttcctcaaccaccaccagttcccatcttctgacaaccaatgttatcaatttctcatgcgttttccagatattattctacgtatgcacaagcaattacttatatccacacttcataacaaaatttgatttaaaaagattaacactcatgagggactgccttaaggatataagcctctattattcttctagatctgtggttcaacatttattgagtcatgcatccttttgagaatctaatgaaattacggattcttccccagaaaggatcacattgcaaccacaattataaatgtgtatttcattggattcacagacttccctcatctcccacaaactcatatacacagaccccagcttaagaaattcctgtatcaacaagtgggaattagctctatcagatattaaaatggtacataaataagcaaatcaacaagtaagaagttgagaaatagtcccatttatgtataggaatttaattaagtggccaggcacggtggctcacacctataatcctaacactgggaggtcgaggcaggcagatcacctgaggtcaggcgttcgagaccagcctggccaacatagtgaaaccccatctctactaaaaatacaaaaattagctgggcatggtggcacatgcctatagtcccggctactcaagaagctgaggcaggaaaatcatttgaacccagatggcgtaggttgcagtgagccaactactgcactactgcacttcagcctgggcaacacagcaagactctgtctcaaaaaaaaaaaaaagaatttaattaatttaatttagaatctcaaatctattaatagtgttgagacgtggggaaaaaaggacctgaatctgaatcaaagatttatatgtaaaaattagatataaaatattagaatagccaggcatggtgttgcacacctgcagtcccaactactcaggaggccaaggcaagaggattgcttgagcccaggaattcaagggtctagtgcactaagatcatgcctgtgagaagccactgcatgcaagatcctgtttctaaaaaaaattatatatataacaatatactgtgttggctgggtgcagtggctcacgcctgtaatcccagcactttgggaggctgaggtgggatcacttgaggtcaggagtttgagaccagcctgaccaacatggtgaaaccctgtctctactaaaaagacaaaattagccaggtatggtggtgcacacctgtaatgctggctacttgggaggctgaggcaggagaatcacttgaacctggcaggcagaggttgcagtgagccgagatcacaccattgcactctggcctgggcaacagggtgagattccatctcaaaaaaaaaaaaaaaaaaaatactgtggtaagaatttttttggaaagtaaggaagatctttctgagtatgacacaaattccagaaaccaaaaagcaaatgacaacacatttgattacataaaaataaaaattttgagcaggcgcagtggctcatgcctgtaatcccagcactttgggaggcaggggcaggtggatcacctgaggtcagaagtttgagaccagcctggccaacatggtgaaaccccatctctactaacaatacaaaaattagctaggcatggtagcgcacacctgtaatcccagctactcaggaagctgaggtacaagaattgcttgaacctgggaggcagaggttgcagtgagccaagatcgtgccacagcactccagcctgggtgacagagtgagactccttctcaaaaaaaaaaaaaaaaaaaaaaaaaaaacttgttggccagatatggtggcttacacctgtaatcccagcactttgggaagccaagtgggaggatcactggagcccaggagttcaagaccagcctgggcaac

SEQ ID NO: 95116 - DNA, 66080 bp, Homo sapiens
agcttagactacaggcacatgccaccatgcctggctaattaaaaaaaaaaaaaaaaactttagagacaggctagtctcaaactcctagcctcaagtaatcctcctacctcggcctcccaacatgctgggattacaagcatgagccaccatatccagcctcagagaatatttttatcacttagatggagaagggatttcaacatatggcacaaaacccagaagtacaacagaaaataataactaatagatctgatcatataaacattcaaaatatacacatagtaaaatatactaaaatcaagttaaaaggcaaatagattcagagaaaatatttgtaacatgtaaaacagaaaagggttgatacccataatccataaagaacttgtacaaattataagaaaaataaggccaggcgcagtggctcatgcctataatcccagcattttgggacgcccaggcaggtggatcacctgaggttgggagttcaagaccagcctgaccaacatagagaaagcccatctctaataaaaatacaaaattagccaggcctggtggcacatgcctgtaagccagctacttgggaactgaggcaggaaaatcgcttgaacccgggaggcggaggttgcagtgagccaagatcatactattgcactccagcctgggcgacagagcgagactccatctccaaaaaaagaaagaaaaagaaaaacagaaacaatctatcatggaatctgtagtttgtactctaatatccattccacccaaatgtagctgctgtatgtggcttacatgggattgaatccagcccaactccagggtttaaaccaatcagaataatctcattctctctgccaagatcattgattcaggtaccaaggcctcaaacaaccatgcacggcattgccttgaccactggtattgatttgtggatggtttcatcagtttaacactcaagtcttctgcctataattctggaacacaaatctttccttctgaggcctggcatggctacagcaatttgcaaacattaacaaagctaggctaagatagagctaacaccaaacaagcagaagagtacggagctgagaattctggaaaaagaagagtcctggccgaatcccatctgaaacccaacctctcattgtgcttttcagttctgtgagccaataaatctcctttatttatttatttatttttttgagacggagtctcactctgtcgcccaggctggagtacagcggcgcgatcttggctcactgcaacctctgcctcctgggttcaagcaattctcctgcctcagcctcccgagtaactgggactacaggcgcacaccaccataccaggctaattttttttattttagtagagacaggatttcaccgtgttgatcaggctggtctcgaactcctgagcctcccaaagtgctaggattacaggcgtgagccaccacgcccggactaataaatcccctttaagaagccaatttgatttgaattttctgttatttgcaactgaaagactccttcctgatacatgaccaaaagcaagaatgagaaaacaagccattcacagaagaaattaaaatgccaaataaacaaaatgtataatgttcaacctcactaacaaaaagttgtgattttctttttttttttgagacaaagtctcactcttgtcccccaggttggagtgcaatggcgcgatctcggctcactgcaacctccacctcctgggttcaagcgattctcctgcctcagcctcccgagtagctgagactccaggcacgtgccaccacgcctgtctaatttttgtatttttagcagagatggggtttcaccatgttggccaggctggtcttgaactcctgacctcaggtgatccgcccgcctctgcctcccaaagtgctgggattacaggcatgagccactgcgtccagcctttttgttgttgttgttgttgttttttaaatcaaagcaaggtatcattttgtggttttcagattggcaaacattgaaaatatggttaatatataattctagtaagaatgcatctaactaaatagtcacttccatacactagaagacatgtaaaatgctaaggccttttgggatgacaattttgtagttatagatcagaatttaaaatgtgaatttttgagtccaataatgccttttattggtctctaacctatagaaatattcaaaatgtatgtatagcatatataggtctctagcgtaaaatactcaaggtgggccaggggtggtggcttacgccactgaactccagcctaggagacagaacgagactccgtctcaaaaaaaaaaaaagaaatactcaaggtgttcactatagcactgtttatatttgtggaaaaccgtaactaatctaaatgcacatcagtaggaaacagttaagtaagttatagtataaacacaccatggaatactgtttggcagtttggaaaagaaaatgaaacaaaatgatgtacatgtatatatactgacatggaaaaatgtccataatatatattaaatgaaaaagcaagctacagaacaatgtgtattagaaattagaataatagattagaataactggaaaatagggaaatgggtaagtaaaccctactacaacaaccattttgtgacagaaagagagaaagagaaaagaaagtccctgaagctatgagtctagacatggaaggataaagaaaggcttttatttaatattcttctgttctctttaatttttttaaaataagcattttacttatgcataattctagttttatttaaaatctatatatactgttgttcctcagtatccaagggggattggttccagaacccccctcagataccaaacctcaaggatgctcaagtcctttacataaaatggcatagtatttatttgcaaagaacctacacacatcctcatgcatactctaaatcatctctagactacttacaataccgaatgcaatgtaaatctatgtaaatagtcgttatgctgtatcgtttagggaataatgatgagaaaaaaagtctgtacatgttcaggacaaatgaaaccactgtaggcctaactacattttcactcagacattggttgaatctgaggatgtagaactcacagataccaagggccgactgtacatcaatatcttatataaatatatacaaatatacaaatgcattttaaaaagtccagaaaaatacacatcaaaatgttaaaagtagttatctccgggtggtggaattacagattttctttagacttttctgtagtttctgaataaaaaattacatggaatatgtattccttcaatagttaataaaaaatagagatttcaaaagtaagagggactaagcaaattatcctatagcagagctgacctttctgtcatttgctaaacttcagaaaacagaaattttggtaaaaatattcaaagcatggaaactccagggtagggtagggtaggatcgagttggttagggtaagcctgagtaaggtgtgaactatggaaagatacacgaagctgcaggcacctgggagcaagggaaaggaagaagagtctaggcaagtaatgaaaacaaaagcaagatggggtggctctaacagctcattattacaactttgaaacacaacgtaatggttaagagaactaaagccagactatgtccaaatcctgattcaccctagctgtatgactttaagccagttacttaaccacataggacgcgcacgcgcacacacacacacgcacgcacacccacgtgcacacaccacttaaaatagtgcttgatacacagttaggggtatacctgtgtttgctattaccagtagagatggtgatacaaatgtactgtttccctctatataaaccattggactaaagtgcttagggatcaaagaaacattataacatttctgccctgatggagcttagttttgtagagaaagcacagggagcaaaaaaatggagccaaatgagtgatctaaatcagggattggcaaactacaacacacgggcctctagctaaaaatagtttttcacatttttaaagagttgtaaggtcgggcgtggtggctcacacttgtaatcccagcactttggggggcagagctgggcgaatcacctaaggtcaggagttcgggaccaggctggctaacatggtgaaaccccgtctctactaaaaatacaaaaaattagcccggcgtggtggtgtgcgcttgtaatcccagctactcgggagcctgaggcaggagaatcacttgaacccgggaggaggctgcagtgagccaagatcgcgccactgcactccagcctggacaacaagagcaaaactgtctcaaaaaaaaaaaaaagttgtaaacaaaacaaaacaaaagaaacaatatataacagagaccaaagtgatcctgcaaatcctgaactatttactgtctggacctttaacaacaacaacaaaatttaccacttctgacctaaataataagtgttacacgcagttaggtgttgaagaaagcattacatgggcaggaggcaggctctgaactgtaaaaaccttgtaagattatcaagaatcctttttgcaatttattcagaagtggtcaggtcatccagtttctgcttaaagtgctcacatgatgagcactcactatgcaacttgagctttaaacagaaacctctctactctgtctctatactcatttcagtcttaacttcgatgccccttgtttcctgtcctgcagagctgtcagtctggcgagtagtgagactcagacttatgtctgaatgctaggtctgtcacagactagaaaatgtatatattctgagcttcccaaacttcatctagaaaatgcaaatgataataatttggggaatgtgaggactaaacaaaaaggtatgaaggtgaccagagcacagcaggctctcaatgtgacttccttttgaaatcaatcactttattccaggactccagcccatcattccagcacaaaaacagctaccatgcaatgaagaactcttcactaggagttagtagacttaggctccagtcttatttctactacatatggccatgggtaaaatcactctctctgattcgtaggcagtttcttcaccgcttaagtgagctgaggtgtgaacgaccagatagataatcatccagatcggaaaacccccgagagcgcaggattatctggataacggagccggatggaggattgtctccgttcctcccacactcaagccccgaaaggtcacctgacctagtcttattctttacagcagaaatcgggcaaacccatggcgccgtccacaatctctatagccgccgacctgggtacaggggaagcaggcgaaacaacacacacttctacgcagaccagggttacattaaggccgacgcccacacacgcccacacacacccacacacacacacacacccccacacccccagacttcgttaacttgtgatgataaattagggcgcaggtgacactactgtcccgaacttcagctggaacgctagtccaagtcactgtcctaactgcagctagcactgccgaccttgtccgaggagtttccttccgctccctcaactcccactttcccagggaggggagggggccgggggcaccggcgacagttgcggggaaggaagtggaatctcgcctttgggaaagcccgggcggagagctgagggctcgccgtctcaccttggctgacgtccgcgaggactccctctcggagcaaggttcaggtccaagtaccaaggctctgcgggaccaaggggcgggtcctgcccagaaagggcccctcaccccgcgggcggtcagggccgttcttgagggctgccctccggccgcctgactggaaaaccaggcactccaccccctcctctccgggcccccgtcctcccccggagaatacgacctttcggccatgttagccaggagcgaggggcagggctaaggggccggcggccactcggcatctgggttttagtcaggcagtgctccaggcgcctggctgccaggctacgggagaaaagtcctccgctcggccgcacccgttagaggcgctctccactgctgtcctcttcagctcaakatggtggcctgccgggcgattggcatcctcagccgcttttctgccttcaggatcctccgctcccgaggtgaggcctggccgagggcatcccagacctccgggcagaactcctgccggkactggggtggccccggagccgcgtctccctttcgctgccgcctgccccagcccggagacgcagccctctgtggggatactgccctgggacccggtttcccgtgaccttctgaagagactgtcacttcccctctcacgactcctgcggcgatttcaggcttcctaactccccaactttctgagtctggtgccactcgttctgtcacctttccgcgggtctcttgcgtcgcacttctgggctcacgcccctcatattttcttgatccggagttccaggagaatcgggatccattctgtcgcatctttgtggctccacagcaccttgccccgcaacaagagctgtcttaaaaacagcaccttaccccgcaacaarcgctgtcttgtatgggattaatcagccttgcagatcactgcccctccctgctccgttccctcaaaaccatttttgtgcttactaccccaatcaagtagggagctcaactcttgcagtttcagtaatgtcagtgtgaacgtatagtattttgaatttcagcgggaagttctgcaacttactggaagacacactttaaaaatacrctaatacctctaccttaagcaataaaatgttagatcgttctgagaacgatttgtaatctgatgattcccagtcagcctgtattagctagtgtttttccttttcaaactggcagtgaaagggttaaagtgggtggttgtaggaaacgttgcattttctttccatcccaaatctgtaaagtcaaaagtggacaacgttttattgcatgttgtgcttaataagttacttaactagaaattttaacttttaatttaatttgtaatatgaattacctctcttccctcttccggaaccgctgaagtagtatgctttttttagacaagtagctgaaatcccttactgtaaggggatttttttaatgattgaatatttttctgctcccttttttcaacagctgtttttagtctccacaaaactgtagcatgtatttgccaattataacataagcacattatagaacattgaaatgctgtaaggattgaggaaagagatgaaaaaaaaacgaatcacccattgtcttactactcatatgcttacctacggttagccttcggttatgtttccttacaggtttggtggtttttttcccctattttcacaacacttttgaaaagtaacgtgtaatttttatcttacccctgcattggtttgaaggtatttcttatggatcggcagctgatgtcactcggaagtggtagccagggcacgtggttctagtcactagctgtgttactttggacaaatgccttaaactaaatgggctttattttcctcatctgcaaaatgaatgattgagatgatggatttcctttgcatgagaagtagcatgacagagcaattaataaacattgtttgggccgggtgcggtggctcacgcctgtaatcccagcactttgggaggcccaggcgggcggatcacgaggtcgggagatcgagaccatcctggctaacacggtgaaaccccgtctctactaaaaatacaagaaattagccggacgtgttggtgggcgcctgtagtcccagctactcgggaggctgaggcaggagaatggcgtgagcccgggaggcggagcttgcagtgagccgagatcgcgccacagcactccagcctggtcctccgtctcaaaaacaaacaaacaaacaaaaaaaacattgtttggagtctgacttctgggtttggacctggctctgccttttaccctctgatgaccttgggcaattaatttctgtgtttgttttctcatttgtaaaatggggaataataccaccttgtgtgatgaaaaggagttattttagatatcaagcagtttttcatggagtaagcactcagtaaatattattaactccagcctggaagaaatacgattgtatatatctgagagtttttaaaagtaatttgtacatcttatgtgtgtaataaaaagctaccaacctaatttttctgttttctgtatagaaatatatagacacataaatatatactttgcattgtgttttcaccagtaagaaagtatcattcgttgtagttactgatcccttaatagcaatttataaattttgaaaaaaagtctggaaagtgaatttaaaatgacctgcacccttatattactatttagactcaatagatccttcacagtaaaagtctgtgcaaggctttgccaaacatttaatgagattatgacctttgctggtggatgataaaattctcttgaaaggggccaggcacggtggctcatgcctataatcccagtatattgggaggccaaggcgggcagatcacttgaggtctagcctggcccacatggtgaaaccccatctctaccaaaaaataccaaaattggccaggtgtggtggcacacgtctgtaatcccaactactcgggaggctgaggtgggagaatcgcttgaacccaggaggtggaggttgcagtgagccaagatcacacctggaggacagaatgagaccatatctcaaaaaaaaaaaaattatcttgaaggagacttgtaattcttgaaattttaaagcattccttctctacaagtgctataattctgaatgtgaatatcaaatgaaaatcacttcttgaccagagtatgttgtctaattcccactcctatcctaaatctaaattcctaattaggtatttagtagtaaataggtattagtagtaaaataatttcacaggagatgaatttagaggcaaataccttaatagatggtttttttgtttgtttgttttttcggttttttttttggagacggagtctcactgtgtcacccagcctggagtgcaatggtgcgctcttggctcactgcaacctccgcctcccgggttcaagtgattctcctgtctcagcctccagagtagctgggattacaggctcctgccaccacgcccagctaactttttttttgtttttttttttttgttgttgttgttgtatttttagtagagacggggtttcgccatgtcagccaggctggtctctaactcccgacctcaggtgatccagccacctcagcctcccaaagtgctgggattacaggcgtgagccaccgcgcccggccatagattgtgtatttttaaatttgattctcacttccttaatctcgtcgcttctcccagtgttgaatcttgagaaaagctgttgattattacaaccaaagtaatgttttcaaatttgaaatttatgttagcataatccagctctcttcgctgactgtagtcttatgaggttttgtagttattcttgggttacattacaaagatgattaaaaagtggggcaaaggtttctctctactttgctggcacagtagatgtaggctaaagttcactcagctgccatagggtaagctctgcagttaggtagtgagtaaggctagactccaaaagcaaagctaccttgcagtgtgacttgatttggttgactctggtttggaattattttcgaagtatgttcatgtatatactggttttctatttgtttctatttgtcttgatcttggagaggttttgtgtatgagtgtgtgggcagcataggtaggttagtggacaggagttaaaatggtttaaactgttggctaatgaccactaacctgttatctcaaatatttgatctttaaaactgcaacccagtggggcatagtggcacatgcctgtaatcctagctactccggaagattacttgagcccaggagttcaagaccagcctgggcaacatagggagacctcgtctcaaagaaaaaaaatgtttttgaaatattgcaacccatgctcactctatttcctttttttgcttaggtgcttattttctaacatatttgtgtttcttggtttttccctctcaacctgcattcccaatcagttcattcccactctaatccactttaccctgttttgctagaattacctatccccttcttcccttcccactggaatttctactttgcaggaaaactttttctatgccaggcctattttcacttttcatttatcttcactgagtaggaactgattcttcccagatatcatatcccctgctgacctggaatgtaagctccaccaagacagggatttttgtcttttttgttcaccctgaatgtcctgctgtactccaagtgcctagaacagtgaatggcacatggaggtcacaatatatgtttttgttgaatgaataacagattatgttggaaaagattacaatgtggttggtgaaacacctgctacagatgcagcagttagaggacaraacattaaataataaaataaaaatgcaggcaaggaaaggaaggatcactgtagacagaatccgaagatgaggttttgtggaaaagactggagtcatgatgcaaatataaagaaggaagagtggtaaatacagatgacacagatttcaaatgatggaaaagcaaagcaggaaacatactattagtcaagtagaggcactggggattgaggagatggctggcttctcccatcttaaaacactgaagttcacttgtaagagacttgttcacagtcacacagctagtaaataaacctgatggttgaacacaagtcctttgcctttgcactaagtcggctggcttggattgcttaaagaagaaatgcaggcagaacctgaaatcaccccattctgcttctggtgctaaccacagttttctttctttttttttttttaatgtgtcaccttgcctttccaaccagtataaagctgctattttttgtgccttctcttccctttccataaggaactgggggataaagagaaaatacggaggcagcaagagccttggcaacctactgatgatcctcccctattccactccaccttcactgggttctccagtcagtagttcccatgtgcctcttacattgctatctctttggttctctttgcttccctcttcccttttgtgattacactgggcccacctggataatccatgataaactttctttattaaggccaactgattagcaactttaatcccccctttgccgtgtaacctaacatattcacaggttctggggatgtatatccctttgtgggggccagtcttcctcttttagtatccaaataatcatctgacctaacaactgaaatggaaaaaatatggcagtagtcatatggcctagaatacattgtacagatttggggtttttgttgttgttattawtgtaaattacagctttgttatatataaaaggtactacagaaattgtttcgcaaattaattttgaaatgtcttttcttacaggttatatatgccgcaattttacagggtcttctgctttgctgagtaagtttaatttctttttratgtgtatgcttacattgctttttggatttatgttgcaataaatatgtttacaaataaatctttcttttctttttagccagaacccatattaactatggagtcaaaggggatgtggcagttgttcgaattaactctcccaattcaaaggtatctcatttaatttgcagtttttttctgctaaccgcattatgaatctagtcctgaatgggaaagatstatcccatatttccccaaatctaccaatctggcagtaatcttacatgaatttacagttttgacagttatgttaaactttgacagattgccaagggagccagttttctaaagcagaggttcttgcgtaagaattcctcttgttgaccttaggtgccaccagcctcctggttatagtgtagaatgaggaggtgacttattagagaagaaccagagtacaagctttgtttataagactcaaaatttgcctacccatcttaaatatgaggttgttaatccattttcttcattacttgcctgacataagtcactattcatagtaagttggctgagtgaaatgtggatacttggctcttaagcttcctgagggatctgaatgactcaatgcaattcacatattggaaatcaagttctgttcgaattgaaacttcttttgtttttggcagcttcaataaagtgtgtaacagtaatccattcttttgccaagaagagctttattgtgagagtccatgcttttcccccatctaaatttggtgtattcttactttaaaaatcttgtagccaggctgggcactgtggctcacacctataatcccaacactggatggccgaggcaggaggatcacttcagcccaggagtttgagaccaccctgggcaacatagcaagaccttgtctctataaaaaataaaaaatagttgggtatggtgatgttcacctgtagtgctagctactctgaaggctgaggtggaaagatcacttaagcctaggaattcaaggttacagtgagctatgattgcaccactgcactccagcctgggccacagagcaagaccttgtctctctaaaaaacaacaacaacaaacttatagccagaggcttagatgtaataagacctagatggaagcagttgacaactatcacaaattaaggtaaataagagccattcccctttactagagtaaattttagcactcactaaccaatgattcaagcttaagatattttttcagaattttcttaggttggacatttttcctgaacacaaaagtaatatatgtcaatggtagaaaatttttcaactataaaaaattataaagaagaaaataataaacattcataattcaaacctaaagataaccacatctttttcttggtatcttccatgggataatcacatttaattcagtttcaatgaataatatttacaaaactaagatcatactatatggttttttttgaagatagggtctcattctgttgcctaggctggagtgcagtggcacagtcacaggttagtgcagcttcagcctccccaggctcaggtgatcctcccacctaagcctcctgagtagctgggactataggcgtgtgctgtcaggcccggctaatttttgtattttctgtagaggcaaggttccattatgttgcccaggctggtctcgaactcctgaactcaagtgatcygcccaccttggcctcccaaagtgcagggattacagggatgagccaccatgcctggcctatatgtcttatttgtatttcatttttttcttaacattatgcagattttttccatgccaataaatgtttgtagacctatttgtttatagcctacatatgattcaaactctgaggatgaccctgagtttctcctttgagaaracctatttttaaaggaaggggtgcttgtagtgggccaaagctgcctgaatagaaagctactgacttgctgggagaatgatatttcttactctcttctaacagtatatttctgcyggataagtatatttcttataatcaaaatagcatttgatggtggtacgtacatccagtgcttcaaatttaaacccttacctgtatatatttccctttggcaggtaaatacactgagtaaagagctacattcagagttctcagaagttatgaatgaaatctgggctagtgatcaaatcagaagtgccgtccttatctcatcaaagccaggctgctttattgcaggtgctgatatcaagtaagttttaggaaacttgaagtcaccttttatcttggttaatagtgtgtttcttaggcctaataatttctccttttaaaagaaagtagaagtgctgggcacagtgacacaggcctgtaaaattgaaaatgtacgtatcaggctgggtgtggtggttcttgcctgtaatcccagcactttgggaggccgaggcaggtggatcacatgaggccaagagctcaagaccagcctggccaacatggtgaaaccctgtctccactaaaaatacaaaaattaggcatggtggcacacgcttgtaatctcagctactcaggaggctgtggcacgaaaatcccttgaacctgggaggcagaggttgcagtgagccragatcacaccactgcactccagcctgggtgacagagtgagactgtcttaaaaaaaaaaagtatatacacacacacacacacacacacacacacacacacacacacagagtatatatatatatatatacacacacacacacacacacatcatgtgatctagagaaatctcaccccttgtttataagaaccagtgtacaaggatgtttggtcctgtgtagtgtgaaataatgaagaatttaaaaccaaatgtcagtcagtaggaaaatgggtaagtaaaatgtggactattcacacaatagaatactacaaaacaggtaaaaggaattaactagatccacaatatgatgttagaactcaaaaacataaggttaagttaaaagaaaagcaaattgcagaatgtttcatacagtatatagtttctataaatgttttaaaaccaaacatggaataattcttgatactatttatggacacaatcgtagttggtctggaaggagacactacaaacatgaagatggctgctttggggaaatgaagtgggtggtaggacttgattgttaaaggcagctttacagatgcagctagtattttcttttcctctgctaaatggtggaatgcatgcctacattaacttatttacaattgtttacacatacataaggaggggaaatgatattttagtgtcagtttaataggttaaaatgttaagttgtcaattccattaaaatatgggtatttgttatgttctttgtattttagacaatgatagccagcattgtaggtttagtaatttgtactgaaagtgtaattatttatgtgtagtaatcagtctcttgttaggcacaaataattcagctagaagaaaaaccacttgataagataattttgggtcttctaaaaaattaacattaaacagaacatttataaagtctaacaagacactgatgtacctggcagtagctacctatatccagaggaaaatrcatgtagyttctatgaggccagctgagcaactctcagtgtataaaattacagaatatactagttatccttggtcaaaagtacaaaatccatatcctaagtgtgttcacaaaatagcaaatgaaacaarctgaaattaaaggacattgagtggaacatcattgcacctgatcatttttatttacttatttatttttgagacggagtctccctctgctgtccaggctggagtacagtggtgcgatctcggcccactgcaacctccacctcccaggttccagtgattctctcgcctcagcctcccragtagccaggactacaggaatgcagcaccacgcccagctaatttttgtatttttagtagagacgcggtttcaccatgttgaccagcctggtctcgaactcctgacctcaggtgatccacctgccttggcctctcaaagtgctgggattacaggcatgagccaccatgcctggcctacctggtcatttttattcattagtgggatctgttaaaatgttttagatttctctaaacaacctggaagcttttcttttgcgtcatttttattgctgttaactacctgatagtgaaatgtttaatctgatagtgaagtaatttaccaaagatgattttcccttgtaccaagctttgtaatttaatgatttattacagaagtaaaaataaattatgcaacacatttatgttttctggatccagaatttttttttttttttttgagacagagtctcactctgtcgcccaggctggagtgcagtggcgcgatctcggctcactgcaagctccacctcccggtttcacactgttctcctgcctcagcctcccaagtagctgggactacaggcgcccgccactatgcccagctaattttttgtatttttagtagagacggggtttcaccgtgttagccgggatggtctcatggatccagaagtttaacactctttatggagaaatgatgttgctgctattgtgctatttgaagcaaaatcattcttaaccttctatttgaagatttgtcatcaaatattgatgcatgataggataagtgtatagtgaataagtattgaaccaaataaattatmgttttatctttttctctgttctctacttttatggataatgcagcatgttagccgcttgcaagacccttcaagaagtaacacagctatcacaagaagcacagagaatagttgagaaacttgaaaagtccacaaagcctattgtggctgccatcaatggatcctgcctgggaggaggacttgaggtatagatattctaaagttattgagacactgtccaactcattggtggcattcatcagctgtaaacccttaggctactgctttgcctggaaaaagtttctggaggagaatccgctttgttttttgttttttgctttgagacggaattttgctcttgtctcccaggctggagagcaatggcacgatcttggctcactgcaacctctgcctcctggcttcaaacaattctcctgcttcagcctccccagtagctgggattacaggtgtgcatcaccatgcccagctaatttttgtatttttagtagagatggggtttcaccatgttggccaggctggtctcaaactcctgacctcaggtgatcctcccgcctcggcctcccaaagtgctgggattacaggtgtgagccactgtgcctaaatagctttgtttttagttatcaaacttctggataggtgttaatccttaatccacatgacacagagcaagtggcacaaagcaagtaaatgaaggtgtgatgttttcatttgaactgcatctctaatgtccttttcagctgtaaaaatcttgttcaagtttgcagggcaaagattcagaagtgtgatctaggctcttaagctacttaagtctggttgagacacataaagcataatataagtgctttgtcagtagtaaagacggtaaataatagaagatttgagagaagagatgcttactagacccgaacatgtaggaaagaaaagaaggggaaaaggaaacattcattgagcacttttcacatgctgaactctgtgccagacactttcacatatgcagtcatttaccacataacgtttcaatgaccaattgcacatacagcagtggttctataagactgtaacactacatttttctataccttttctgtgtttagatacagaaatgcttatcactgtgccacagttgcctacagtattcaatagtcacatgcagtccaggtttgtagccccttaggacaggggtccccagttcccaggccatagcctgttaggaactgggccccacagcaggaggtgagcagtgggcgagtgaacattaccacctgagttccgcctcctgtcatatcaacagtggcattagattctcataagagctggaaccctgttgtgaactgcacatgagagggatccaggttgcgcactccattggcctctattgcctgatgatttgaagtggaacagtttcatcctgaaaccactccctcccaccccacccccagttcttggaaaaattgccttycacaaaacctgtccctggcgtcaaaaaggttggggactgctggactaggagcaataggctatcccatatagcctagatgtgtagcaggctctgccatctgggtttgtgtaagtacactctgcgatgttcacacaacaacaaaatttcctaatggtacatttctcagaacatatccccctcattatgtgacacatgactatattaattaagaaaacctgtgcctggtcctaaactataagcagaatttgattaaccagaatatggagggaaaaacaattccgcatatggtatggtgtgagcaaaggcaaaagcaaagccaactaggacactgtaagtagacgtgcttgattggagagtccggggctttttaacctggggtccatataaaattgtgtgtgcatttttctcttgagagcttctctagctttcagtagattttttaggagatctacggcccaaaaagaggttagtaaattagaggaaaagtatgaaaaaaaggctaaaaaggtaaattctagaaattattaaatgccagcctaaggaatttcagtttattctgtgagcacattcctgctttataaataatctttagacccttatccatctcaagttgctactaagttacrttttctaacattctaattttctttcatttgttcaaaggttgccatttcatgccaatacagaatagcaacaaaagacagaaaaacagtattaggtacccctgaagttttgctgggggccttaccaggagcaggaggcacacaaaggctgcccaaaatggtgagtctaacatcccctttgtgaasctataygccctctttagatctgttttcttgtataaaatgcataatatgggcattcattgtagaattaaaaaaccaaataaaatatgagtgtacaggatcagtgacagactttattcctggtacttattttttcaattccacagattttttttttttttttttttgagacaaaatcttgctctgtagcccaggctagagtgcagtggtgtgatctcagctcactgcaaccttctcctcccaggttcaagcgattctcctgcctcagcctccccagtagctggaattacaggcgtrcaccactgcacccagctaattttttatattttttagtagagatggagtttcgccatgttggccaggctggtcttgaactcccgacctcaggtaatcctcccgcctcagcctcccaaagtgctaggactacaggcatgaaccaccatgcctggcctaattccacagaattattgatcaaggtcctttgttagtctctgaggaaggataaagataactaagatgcatgtcttgcatttctggagcttatggtttaattggttccttttccacataataccatcttaacagtttttcaaaaccatgagtcatattaatatttcattacaaatataagaggcagaccttttccctcattgtctgatttggatgttctcactgctgtgttgtatggaaccaaaagaggctcagcaggctttgaattccaaggagaagggaaggacagtcagacctggatgctgcagagcaatcttaatgtcaactcaagggcccactgaaccttatagcttctggcactgtagattcctcagtgaaaacaaggctcaacagaaatactctttgcagggaagttgatctcaattgagcacaaaagaaaacaaggtttatggtgttaattttctaataataataatgtgctttccttcataggaatgtcataaggatttattgaaagaatgaatatgcatatatgtgtatcaaaaatatttgctgagtttctttctttcttcttttttttttcttaaactatagctggtatttgaatgttgctagaagcctttcttctagtatgccatataagcagccctagctgagttctatttttgttaagcttaaaattctttttaaagactttgtcaaaactatcaggtttctcacagtcttctctagtttcaatatgagaattttattttattttatttttgggacagagtcacttttgttgttcaggctggagtacagtggcatgatctcggctcactgcaacctctgcctccggattcaagcaattcttgtgcctcagcctcccaagtagctggaatgacaggtgtgccccaccatgcccagctaattttttgtatttttagtaaagacagggtttcaccatgtcgggccaggctggtctcaaactcctaacctcaggtgacccgcctgccttggcctcccaaagtgctggaattacaggtgtgagccaccgtgcctggccagaattttacatattatatatatgatagaaaaaaacccctcagaataacagaaatgtacaattttaggaaacatgaaattctttaccttattagtataagaatcctatatattgaattaagagataaagacatttttgcttcagctagaggtatctaatccccaaagttacccaagtgtatatcagtatattaaatataacttatctatgctgttgacaaatagcataaacatatggcttgacttttctcattttaatatttgttcatttgatgatttgtaaactatataattatcaccctgatttttttccccctatattctcatccttgcttgcctgttaggtgggtgtgcctgctgctttggacatgatgctgactggtagaagcattcgtgcagacagggcaaagaaaatgggactggttgaccaactggtggaacccctgggtaagtgttagcacatctcagagtcagaccttataaagttacttattttcttaaagagttaacctcttaggccaggcacggtggctcacacctgtaatcccagcactttgggaggctgaggcgggaagatcacttgaggtcaggagtttgagaccagccttgccaacatggcgaaaccctgtctccactaaaaatgattagccgggtgtggtggtgcaaacctgtagttccagctacttgggaggctgaggcaggaggatcgcttgaacctggcggggctgaggttgcagtgagccaagatcatgccattgtgctccagcctgggcaacagagccagactcccatctcaaaagaaaaaacagttaacctcttgaatatcacaggaagcacagagagaagctcaaactcttaagaaatgagtcattattctaaggaaggaagttttataaaatagytaatactaaatcattttcaacatcaccctgatttttattttgctttataattagaacattaggagtacagaattcagtcaagtcattatttttggttcttaaattacctgtatcattatccatgcataaccttccttcagtttcttgtgtctgttttagtaatataataaatgaaacaaccaacctgagaatattaacaataattgatatctactgatgggctacttcctcccattcagtttctttgcctccctttatccaaagaagccactattctgacttgtgtgttcattaccctcttatatttattgaaaatcagcattattgagatattacttacataatagtaaatgtattaattttgtgkgtgtgtgtgtgtgtgtgtgtgtgtgcgcgcgcrcacatgttgggktctcactctgttgctcagactggaatatggtggtgtgaatatagcttgttgcaacctcaactttttgggctcaaatgatcttcccacttgtgccccccgagtagctgagaccacaggcatacgctgctacaccagctaattttttattttttgtagaaacgagatctcactctgttttccaggctagtctcaaactccgggctcaagtaatcctcctccctcagccacccaaagtgccgagatttacaggtgtgagccactgtgtctggtgaaattgaccaacttttaatgtataatttgagttttgaaaatgtatatagctgtgtaaacactgccacaatccaaaaatagccgtgcatggtggctcacacctgtaatcatagcattttgggaggctgaggtgggagaattgcttgaggcctggaattcaagaccagcctggacaacagagcaagatcctatctcttaaaaaagaatttttttttttcaattagctgggtatcatagtgtatacctgtagtcccagctagtcaggaggctgagacaggaatattgtttgagcccagaagttcaaggctgtagtgagctatgatcacaccactgcactccagcctgagcaacagagtgagatgccatcttttaaacaaaaatttttaaacatttctggtatgtagtttgttttaatcttcgttcacttagcataatgcttttgagatgcatccatactgttgcatatatcagcagtttgtccttattgctgagtgttactccattgtagaaatgtaccatagtttgtttatccgttcaccaaatgatgagcatttgagttgtttctaatttagggctattctgaataaagctgctatgaacattcatctttaagtctttatgtgggcgtgactgggcgtggtggctcaagcctctaatcccagcactttgggaggctgaggcaggctgatcacctgaggtcaggaattcaacaccagcctgaccaacatggcgaaaccccatctctactaaaaatacaaaaattagctgggtgtagtggtgtgcacctgtggtcccagctacttgggaggctaaggtaggagaatcacttgaacccaggaggtggaggttgccgtgagccaagattgtgccactgcactccagcctgggtgacagagcgagactctgtctcaaaaaaaaaaaaagtctttatgtggacaaatgtttcatttctgttgggtaagtactgaagagtggattggctagtccatataacagatatatattagcttttgaaaaaaaaagtttggcctgagcaacatagcaagactctgtctcaacaaaataaaaagttttaactagttgggtgtggtggcacatgcctgtagtcctggctactagggaggctgaggcaggaggattgcttgaacccaggagtttgaagtcacatggagctatgatcaggccactgcactccagcctgggtgagagagggagaccttatctctgggaagaaaaaaaaaaaatttagagatgagactttgagtcttgctctgtcacccaggctggcctcagactcctgggctcaagcagtcttcctgcctcagcctcccaagaagccgggattacgaggcatatgccactagtatttgctaggtatgtgtttgcttttctgtcagactgttttcccaaagtggttatactcttttgcattcccaccagcagtgtatgagagttctaggtaccaaccactttgcatggtcaatctttttaattttagacattctaacaggaatgtagtaacagttcttttttctttttttttttttgagacaaagtctcgctctgttgcccaggctggagtgcagtggaacaattttggctcactgcaacctctgcctgccaggttcaagcgattctcctgcctcagcgtcccaagtagctgggactacaggcgcccaccaccatgtccaactaatttttgtatttttagtagagatcgggttttaccatgttgtcagggctggtctcaaactcctgacctcaagttatccccctgccttggcctcccaaagtgctgagattacaggcgtgtgccaccacacccagctggaattagtcatatttcattgtggtttttatattaccctaattaccaaagatattgaatatctgtatatcttatttgataaagaagcatctgttcaaattttttgcccattttcttggactgagtgtttttcctattatcgagttttcagagttctttatatattaggatatgagtcctttatcaaatatatgatttgcaaatatttcctcacagtctctggcttatcttttcactatataagagcagaaattcttaattttaatgaagtctggtttatcaagtttctcttttatggatcatgctattagtgtggtatctaaaaaatatttctctaactcaagatcactaagttttcctgtatactttcttctagaaattttctagttttagctcttacattttggtctgtgatccatttggagtatttatggatcatgctattagtgtgggatctaaaaagtatttttctaactcaatatcactaagatgttcctgtatactttcttctagaaattttctagttttagctcttacattttggtctgtgattcatttcaagtttgtatatggtgtgaggtaaggattgagggccttttcttccctttttgcatatgaatatccaaatgtcctggcaccatttgttgagaagactactatttcctcagtgaactactttgatcccttgatcaaaaatcaactgaccttatctgtttgggccaattggatttcctattcctagttatctatatgtctttttgttaaaccaataccacactgtcttgattattgtatttttatagggaatcctgaaattaagcagtatgagtcctccaactcaggtcccttctttcaaaattattttgctcatactagttcctttgcatttgtgtacaaattttataatcattttgtccatatctacaaaaatacctgctaggatttttattggaattgcattgagtcagtatataaatttggggagaattgacagcttaaaaatattgagtcatttcatccatgaacatggtaaagttctctgtttatttaggtctttaaatttctctcagcagtgtttggtacttttcagtgaatagatcttgaacacattttgttaaatttatgcctaggtatttcatacttgyaggytgttttacttttttaactttaatttctcactagaatatagaaatacaaagatttttggacatggaccttgtatcttgtggtttagctaaattcatttactagttctagtagccttttttwttaatagattcctgaggattttctacatagataattatgttgtctgtaagtaaagacagtttgacttctttctttccaatatagatgtcatttgtttctttttcttgacttaccacaatgtctaagacctttgtacaatactggatagaagtcatgagaacaagtattgtcaacttgttcccagtcttaggaggaaagcattcagtattaagtatgatgttagttgtaggtttttcatatgtgctctttatcaggtttgctgagaatgagtattgaattttgtcatgccttttctccatctacagagataattgtggggttttcttcttttttagtctattaataatgtcagtcacattgatttttgaatattgaactagccttgcttcttggaataaactccattttgttgtcatatattataaaggatttttatgtcatcatgagggataaagtctcaaggataattttcttatgatatttttgcgtggtgttggcatcaggataatgctggcttcataaaatgaattgagaagtgttctctcctcttttttttttttttgagatggagtctcaccctgtcgccaggctggagtggtgcagtggcgagatcttgggctaatttttgtatttttagtagaaacagtgtttcatcatgttggccaggatggtctcaatcttctgacctcatgatccacctacctgcctcagcctcccaaagtgctgggattacaggtgtgagccactgtgcctggcctcctcttatattttctggaagattttatgtagagttggtattatttcttaaatacttgatagaattaaccagtaattcctgggctcctagttttctttgttgggaaaatttttacttatgaattcaattaatagatatagggctattcaggttctccattctagagtaagctacgatagtagtttgtgtctttcaaataatttgttcatctattaacaatttgccaaatttattgcaataaagctgttcataatacttgtcattttaatgtttttatactctatactgatgtctcctcattcattcctgatattgatagtttatcagctgataggactttaatcacttataaaataccttcatagtaacatctaggttaatgtttattgaataactgggctgtagcctagccaagttaacatatctgaagactatcatactccaccccttgtctgtttgacacccatacacatctcctaaagccatacatagtcttcaaataaaggcaatgacaggagtcatactttatcctgacataatgcaattctcctttatacaaccaaaaatacactaatcctttccctagaagaggatgcagagtccttgggtgaaattcactcttctctcatattctgtaacataaatgctatgatataaagttaaccattatggatacatcttatattagatgataaggagatagagaagaaacacaaatatttggttaattatatacattcataacaaaataagaaatcctcataaatagtacagtattcattactgtattcagaaatgaatatttataatatttccagatcagtattcagctgatgtggaaagagaactgagctatcaaatatcagagtaaataattaaacaacccaaaaggaaagtaacagtggagcctttattcacttactktgatagtttacacaaaaggctaaaaaccaaagaaagtgccagctcctttttccccccagtaccgttttccccatggaatggtacactggttgaggatctggtagattagcatacaagtgggggacatctcactgttgtgaaagccctgaacaaaaggttcctgcggctttatggaccctgggtgaggagagtggagtagactgggagaagtgtctttaagatttcccattccggccaggtgcagtggctcatgcctgtaataccagcactttgggaggccaaggcgggcagatcacctgaggtcaggagttcgagaccagcctggccaatatggcaaaacctcatctccactaaaaatacgaaaattagccaggcgtggtggtacatgcctgcattcccagctactcaggaggctgaggcaggagaatcacttgaacccgggaggcagaggytgcagtgagccgagattgtaccattgcactccagcctgggcgacagagtgaaactccatctcaaaaaaataaataaataaataaaagatttccccttcctcctttgacaaggtctcagcagaggcacctgaagaaggcctcagccaaagtccccatataaaaagacctaggaatagaaggcatctaggctaggaatgcacatttgtgtaagagcttagccagccccagagacccaagtccttgactgcagctccctcagatgacaccgcagtgcactggctgtgtaccaggtttggtgtggaaagggtgatatttctactccccttttcatattccctttgccctcaggaagtacctcagtttgtcctagttctttgcctggtggggtgaccttcattcctaaaatgtcttctaggccactagcagtcccatgtgaactgggttgtgatcttctactgactaattagaggtcatgttagtactaagggacaccctaagagatctgccacatttgagacatactcttccttacctctgttgtatagtagcracctaatatccccttggtaatcaggattaatcaccccagccagtacagtacccgccctctgctgcctgttgattccaaggcatgaggagcccaaagtggccagatggcagttttaactaacagttcagtagaatcattgttgtgtctcctggtggaagcattcctccctttggaactgagccctctagacaggcagagcccaaagttgcagggacaagaagcagaaattttgctggtagattagatcactaggggtaatagtgaactgggtaatttctgtttgctctccttgatttctggactcacgaatcctggctgtgggaaaagtagcaccctatactggaagctgacttaaaacatagcagcatcctggaggacattgactctgcaaaatactgccacttagctggcactgtgatggagtcttcagtagtccatcccaccattctgtcaaggcaactgcttcccggtgatgtagtaagatcagtgtttcgtgagcatggcccattgctgcacttcacttactgagaagtgaattccttgataagaagcagtgctttgtgggataccataatggtgtgggataccataaggcactctataagtccacaaataagtccacttaccacaaattggtaagtgaaagtccatattgcctacgcccatgcataacctccacacccaccatcatggccactgttcatgaagcagtgataagagtgactgcggaaagatgctgactgctatccatagaacgagtcatcccatccactttgatcattgaaatcctcggctgaggtcactctttgatgagcatttaatgggacacaagtgttttcacattatttgcctattcagagaggtctatccactgacctattccccaggtgtccttgtatattagtttgctagggctgccataacgaataccagactgagtggcttaaacaacagaaacttaacatgttttctcgcatttctggaaactggaagtctaagatcaggtgttagcaggtttggtttcttctgaggcatctctctttggcttgcagatggcactgctttcttactgtgtctgcacatccctggcatctcttttgtgtttccaaattttttcttctcataaggataccagtcagattagattagggtacaccctaatggcctcattttaacttaatcrcttctttaaaggccctatccccaattacagtcacattctgagatactggaggataggacttcaacatatgaatgaggtaggggggacacaattcagcccataacamcttgccaacagtttttcatctgtgttccctgtaagttccttaccacccaggcaaaccgtttgccacggcctatgaatcagagtagacccttagctcaggccatttttctttctagacaaaatgaacaaccgggtgcactgtcagaagtactgcccactgggaggctatcccttcaccactgtccttaagggatgtcccagaagggactgtagtgttacagctgtgcacttccaggtggtacctgcgtatcacacagaaatatctacaaaccaggcctgagtttttctttaccaatcaactggccatagagaactccccatgaggccataggtgcaggctggaagagacaaagaagaacagggccgtggggtattttggctacttcctcatgcagcttgtgcctttagggtctgtttaagcccagtcttacatataccacttscatttgataatggagtgctaccgtgtacaccccactttatggcttagtaggttagacaacatctgtttcatgatcagcagctcaggtcaccagtaacttgatgccccatggttaagctttgagtctctgtgaagtcccactaacaagccaaacactgtttcccaaaaggagagtagttattcacagaggatggtagggctttttctaaaatcctaagggtctgtgttgtgattcacctaatagagatctattaaagactccagacagcacctctgtctgctgccgacacttcaggcgccatcaggtttgaatcacgtggcccaaatggcagaacagcttctcttgttctgggtcccacttaaactagcagcttttttagttactcagtaaatgggctggaatagcaacccaaatgagtaatatgttgtctccaaaatctgaagcagcccaccaggtgttctccgtgtttttttgtggtaggaggggccacgtgcaacacttaccctttgccatagaagggatgtctttgtatgccccagaccactggatccccagaaatttcactaacatgggaggccctgaattttggagggatttatttcccaccttctgacagacacatgtcttacccccagtatgtctagagtagttaatacttcttgctcaccagatccattcagcataatatcacagtgtaatgaaccagcatgatatcttgtggaaggacaaggtaatcaggctctctgtggactaaattatgatatatggttgaaaacaatacacccacccctaaggtaagacattgaaggtatattgctgaaagcaaactgcttctggtggtctttactaacagataccaagaaaaaaaagcttttgtcagatcagtcactgcataccaggtccaaggatgtatgttaatttgttcaagcaataaaacgacatctggaacaccagttagaattgcagttgccacctgattagatgtacagtaatccactgtcattctataggatccatctgttttctgcactgtccagagtaggcaagttgaatgagaatgaagtgggaatcaccacccctaccgctttcagtccttgatggtgacactaatctctgcagtccctccaggattgtggtgttgctttggtttactcttttctaggtagaggcagttttagtggcttttacttggcctttcccaccatagtagcccttactctacaagtcagagcatatagtgatattactcattgctgagtatgtctgctccaattgtacattctgaaactgggaaaataaccgcaggatgggctcagggacctgctaggcccactgagacagacctgagctaaaactccattgatcacttgacttcataagcccctactctgactgctggaccacagcgaagtttgggtcccctagaattagtgttagttcagaagccagtgtctagtaatccccaaaaaatcattgtttccccttctgcaaggcaaatagccataggtccctttggggaagggtaggagaaagataaacaggaaagtctcctcaagaggacacagcttccctttcattaaggagattctgggtctgtaaactagctcatttctgggaattgcttaaggggccatgactctcttcaggtgattcaaattatacttctgtttaccagacctagaattcttctgcttatacagatcaagtaagagttagtagactgcccatctatttcttttttagggacaccatgatcaaccacccaatgctataggtctcagcaagtcagactattctgattactgctttggctccactatttattatggtaactatgcccaccttgatttggcatggtgctgctacttgggccctgccaccccgggattcctttatccccattgcatttagggatcccagttgatggtagcagttcccactgtaatttctgacctacaaagagaagcaaccacagagcaaagatgctgggcctcacctcacaaattgatttctcacagtggtggtgaagggtgcgtcctctaacccttccagggtgacctgtcagttctttgctccttttttcttcttcctgctttcttttggattaataattttttattggccgggcacagtggctcacgcctgtaatcccagcacttcgggaggccgaggtggrcaratcacgaggtcaggagatggagaccgtcctggctaacatggtgaaaccccatctctactaaaaatacaaaaaattagcctggcctggtggcacatctgtaatcccagctacttgggaggctgaggcagaagaatcactagaacctgggaggtggaggttgcagtgagccgagatcacaccactgcactccagcctgggcaacagagcgagactccatctcaaaaaaatatatatattttttgtcttcattactggccttttactttgcttttcccttttaatggttgctctggggttttacagtatacatttttaacccatcacagtctattttctttctttctttttttttttttttttgagayggagtcttgctctgttgcccaggctggagtgcaatggtgtgatcttgactcactgcaatctctgcctcccaggttcaatcaattctcttgcctcagcctcctgagtagctgggattacaggtgcacaccaccacacccagctaatttttgtatattagtagagatggggtttcactatcttggccaggctggtctcaaactcctgtcttcaagtgatctgcctgccttggcctcccaaagtgctggattacaggtgtgagccaccrcacctggccggttttcaattgataatattttcctgtggtgtcagaaccttaaaagagtatgcatttattttgtatactccccatttttgctattgttgttatacattttactgctacatacattataaattcttgtatatattggtatatttgttttagataattatctcttaaggagaataaaaaattagaaaagatcttttttatagttgcccacatagttaccatttttagtgctttttatcctttgtataggtagatccagattcccatctgatttggttttcttgcaacctgaagaacttcctttagtgttttctgtagtgtaggtctgttcttaccttttgatttgtctgacaaagtctatttcccacttcatttttaaacatatttttcctagattgctaatgtttcttttctctctcttttttttttttgagacagagtctcacccttttgcccaggctggagtgcagtggcacaatctcagctcactgaaacttccacctcccgggttcaaatgattctcctatctcagcctcctggatagctggaattacagtcacccactaccacacctggttaatttttgtacttttaatagagtttctccatgttggccaggctggtcttgaactcctgacctcaagtgatctgcccactgcggactcccaaagtgctgggattacatgagccaccacacctggccggctaatgtttttcttttggtactttataaatgtctccattgtgtttggcttgcataatttctgatgaaaagtctgttgtcacttttatcttggcacttttttgtttgtttgtttctttttgagacagggtcttgctctgttgcccaggttaaagtgcagtggtatgatcataactcactgaagccccgaacttctgggctcaagcaatctttccacgtcagcctctcgagtagctgggactacagtcatgcaccaccatgcccagctaattaaaaaaaaarttctttttgtagagacaaggtcttaccatgttgcccacrctggtctcaaacccctgggctcacgtgatcctcccacctcagcctcccaaagcactggaattacaggcatgagccactgtgcccagctgtcattcttttctttatacttctatatatgatgtgcctttcccttcctctgtctgctttcagattttccttttatgactggttttagcaatttgattatgatgtgccttggtttgttgggattttttttaaagttattatgtctgggattcattgagcatcttggacatatgggcttatagttttcgtaaaaattggagacttctttggctattatttcttcaaatatttttctgtctccctcccctttttggagattccaatttcacattgttaggtcatttgatattgcccaaaaatgaagctctgggttgtttgttttaggtcttctttcattctggttatttctactgccatgtgttcaagtttcctgatgtttccctcttctgtgtatccctgctgttaatccaatcccatgtgattcactttttttttttcagacggggtcttgccgagtctggtccttgagctactgggctcaagtgatcctctcrcctcagtctcctaagtagctggggttgattcacttttatatcttcagtttctcttcattatcgtcctgttttcctctaccttctgtaacatacagcatgaatttacagtagtcttgaacatcacgtctgctccttctatcatttttttcatttctgaatctgtgtctatttattgatctgtctcctggctatgggtcattctttccttgcttcatttcatgccttttatggtggttctttcctcagctgcagatagtttcccctcatgcacatgcagaacaatactcggccagagtttcaaggaccgctctttagagctctggagctctcctgttgtgcagcagctgctctccagcatttcacgtcacagattccagctgccctggcctccctcaggattatgactgtgttaggacttttctggacactgaacttttgtcactccaaagttttgggcttagttattattcctccttccccacacaggttcaaaataggccaaatggtccaggctcggtggctcacacctgtaatcctagcactttgggaggccgaggtgggcagatcatttgaggtcaggaattcaagaccagcytggccaacatggtgaaaccccatctctactaaaaatagaaaatttagctgggcacagtggcatgcacctgtaatcccaggtactcgggaggctgaggcaggagaatcgcttgaaactgggaggcagaggttgcagtgagccragatcacactgctgcactccagcctaggttacagagtgagactccatctcaaaaaaaaaaaaaaaaaaaaaataggtcaaatgtcttaagggagagattggttgtatgtctgctatgggttccctcagttgggattttgtttcctaagtaccacagtactgcacaagattgccattttgaccccagccacctcctccaatgtggctcttacagacttttgattgagagcctggtaggtgtctgttttcacagcactataaattgtgttctttggattccttttaaatagaggtggggtctcactatgttgcccaggctggtcttgagcaatcctcctgtgtcagtcttccaaagtgctgggattataggcatgaaccactgtacttgttcttcagattttttgagcctagctctgtaacctcttgccccaagcaggttcaagatctggcagaggccttgcgtggaaaatcagttgcatattggtttcaggcccccttctccatagaagtaccttatctattaaacatcatgatactatgagagatttcactcaacctctctgagctagccccttcctccttgtgtaccatcttagactttcacaaatgttccttggggaaaactggctttgcacttggtttcttctagcttctaatctgttgtacatgaccaccaaaaactctgatggtttcactttccttctgcttgagtcaagtccagtcttcagtccatgcccaaaagcattacacatccctgaaaagaaaatgatcagcaatcatcagttcagctaagataggctcttgctctctagaattttagttcatgttgtccttgttacttccatagctccccagtgtctttacaaatgatttcatgatttcttcttttttctttccagttttgcagcaagaatgcaggttgcagtagacataatgcattccttttgtgtgtgttacatactacattctactcagaagtggaarccaaatgaaacagttaaagaccgcgttttctacctagagcatattgtttctcctctattcattgtgatttcccttctttgacttcttggtttatgactttgccacctaccagtctccagtctgaaatggaacgctgtgctagggcctttggctttggcaagtctgggtttttcactacctgggactggtctaagcctgatttgcattccagtgttgcattcatttttataggaccaggactaaaacctccagaggaacggacaatagaatacctagaagaagttgcaattacttttgccaaaggactagctgataagaagatctctccaaagagagacaagggattggtggaaagtgagtatcattgttaaagaacaaaggcaaagcttctttcctgagaatttaattttatttgctgtagattcaaaatgaggaagtggtaaatgcattatttactcaaagcataaagtcagccttaggtaggagatgtaacaactcctcaactttacactatccagttaaagccaatttttaaaaccttttttttccttatgatgacccttgagtcatagaaaacttttcattttagaaaatgttaagcatgaacacaaaaagactagataacagtgttataaacactcrtgtacccaaggcccagctttaacattcatcacttagcatgtttaaggtagtgcttaggttgaaatttatattgtgtgtatcagaataaagagcagttcttgcagatagctagaattacttcatttttatagagtttagagcataaactaacaagggaatctaggctctttatagtaaatatctaaaagcattttattttacagaattgacagcgtatgccatgactattccatttgtcaggcaacaggtttacaaaaaagtggaagaaaaagtgygaaagcagactaaaggcctttatcctgcacctctgaaaataawtgatgtgagtcttacccaatattcccacttttctcatatttccttcctttatatagatcastcctccttattgccattctggaccrtgtatgttgagtactaaatttcttaattctgctattaaagtatttaccaaaaataagggaagggcatagcaagctgtaaggactcatataaagtgatatatttggggaaaatcagtgctggacttactcattgattgatgcagttaaatgtatcagtaacaaaccagaaaaccaggaaaggaacctaagtcatatcagtatcacaaagccattagagtgtcaggcactaaccaaaaagtagttgaaacaaaattgatggctctgttctattcttggtcaacatcattgtcagtacctaaaatccctcaaggacttcttcattgctgtaattataaaaaagatgtaatgatgtagagaagctctgcaaaagatcaatgagaataattaaaatgatcacaggattcaagaaatctccaacagtagactttaaaacttagaacttttcagtgtggaaagtccaagattaagagagtatataaccaaagacttcagaattggtgaatgggtcagtcagcaagtatatcttgagtagaaggcaccaaagcacataaaatatgaaacatgcccccacctgccttcgtctcacaggctggactggggaagttagatatatatatgtgttaaggtggatagcctttaagagatataaggcagcataagattaatgccagatgagtgggacagaggaggcaacaattaccatgagacaaagagatcagtaagtgcctcatgggatctgaccccaaccctgaaagctgggtggaggataggtgaaggagggaaagtattgccaaggagggtgggcatttagagcaaagttatggaagctggaaaacaagctcttcaaggaacattagtgagaccagtatttgtgggggataatgagatgttagtctgaagaaaggcagattgaagctggattttagaaggttggtaataatgaattgagaaattttacctttgtccgataaagattctagagagccattttcatggtagtgggtaaaaatggtttcgaaggagagacaaagtagagcagtgaattagcaaaactgtcctgataatccaggcttgagctttgaataaggccctgagatagaatagtaaaaataggaaagcagcaacaggcttgccaaagagaggttatgagttaggttcagatatattgagttcagatattttgggaaattcaagcaacagtagtttagacagagaagtcagagttagagatgtcaatttgcttatttctaaaaatttgtcattctcataaattatgatagtgagtaagtacagggttatttttttcatcttttatatttgccattgtacttaggatagtacttaccccaaatgttacattgaattttgtagagttcattaatgtgataaactaggtcatgcatctgagggagaaagtgtagagagtgaaaagggctgaaagtggaagttgaggatctgcctacatttgaagatcaggagagaagccggaagagtaattcaagctttgtctttccttctcatggccatgttatgctagatttagcagtagcctcaaagatggagaattaagtcagtcgagagcagccagatcctcagtcctcttctctttctcattccagtctagacttttgacttactctttgaggactaacaacactggcaattttattcagcattattgtacatctcgccaatctattccaacgctgagcaagtgctttatatgttttttaggtggtaaagactggaattgagcaagggagtgatgccggttatctctgtgaatctcaggtaaacttatttcctttcaatgttttattatcagttaaaggaaaactaaagatccaatcctctgtataaagctgaaaaaggaaaaaaatatccaaagcctagtaaaaatttttttcttccagtgcttatcatctcttatgattaatctcagtgagcaagtggatgctaagaataccctaatggggccaggcgtggtggtttacccctgtaatcccaacattctgggaggccgaggtgggcagatcgtttgagctcaggagttcaagaccagcatgtgcaacatggcaaaaccccatctttacaaaaactacaaaagttagccaggcatggtggcatgcacccacagtcccagctacttgcagggctgaggcaggagaattgtttgagtccaggaggtcagggctgcagtgagctaagtaagatcgcaccactgcattccagcctgggtgacaaagtgagaccctgtctccaaaaaaaaagaaaaaaaagaaaaaaccctatggtctgcagatgtttgaacttacttttagtaataaggttgtctctacgaagggcaggaacagagttctaatcctttcaaaacaagtcacttgggtgttttttgttccgcacttgggcaggttttattgagacaaaatgaatacaaagacagaaaaatatttttcttacatgttaaggcctagagatgatgaaattgaattttttggtaaattggaaaaggaaaggaagtatcttgtacccactaaaagacgaagacagaagagatgtatgtaccagctttacctgtgtacttttctagcaacttggtgatgttgcagatttaagtgatttgtstttgtttttaagttttaaacgatcatcgaagaatggttgctcttttataaagttgaatatctcttatccaaaatgtttgggactagaaacatttcagatttcagactttgtcagatagtggaatatttgcatatatatgatgagagatcttgggaatgggatcagagtctaaacatgaaattaatttcatatacaccttatacacatagcctgatggtaatatcatacattatttttaataatttttcacataaaacagttttgactgcagctcataacatgtgtaatatcttgcccatgacatcatgttggcactcaaaaagttggattttggagcattttggattttggattttcagattagggatgctcaacctgtaaaaggacaaaaaaaaaaatctgaagagctcaggacaagtaccagaaaaacacttctggtactagatgtctcattgggcatttctgattttttaaaaatataaccaagtgcacataaacatacgtacagaaaaattgaggaataagtttcacgaatcagtaactgtcctgtgtgcattgtgctcagtattttctgtgtattcckctttttatatatgtaatgcttattggcacccactaaatttctgaccattgatgaatcttttgcccatgtttgaaaatcactggtttattagataaaacatcctgtatcaagattagtaaagcattgattgtgttgtcattttatgttcttttgggtcatgaaagcaactttattagagggattcttttgaaatgctctttgtaaccatgcaatcttaccaktatatcctagtgatattaataatagctaaccttgagaccctggtcattttactagtgttctcatttaatcccccagaacaatactgtaaaatgggtattgtttttcccatttttaaggatgaagaaagcttcacaatggggcagtggcagagacaggatctgtcaaatcctagatattatgcctttaaccaccaagttgagactttttctccataaattaagctacttttaaaagtggtaagtcccacgtgggcagcctgctacagtggaaaaagaaccggagttcgaggcgaggcacggtggctcacgcctgtaatcccagcactttggaaggccaaggcgggcagatcacgaggtcaggagatcgagaccatcctggctaacacggtgaaaccccatctctactacagatacaaaaaattagccaggcgtggtggtgggcacctgtagcgcagctactcaggaggctgaggcaggagaatggcgtgaacctgggaggcggagcttgcagtgagccgagatcgtgccactgcactccagcctgggtgacagtgcgagactccatctcaaaaaaaaagaactggagttcagagtcatactgtcttggttcaagttccatttctgccactttgaggcagtatagccttgagcaaagtcactccatttctttggacctcctcttcccaatctgtaaaatgagagggttggtttgagatgattgtggaggctcattttggccctgagactctagttttatgaaaaaggttaccacacctctggtgtaaagaatctgagagcttagttatatccaaaactttcttcaacacagtagttggaaagtgctccagataagacaagtaaagacaagacacatcagtgagagacagacttctgcagcactgaacccccaaactcccccgcatccccagggactcaggcttcacatgcattacctctgctcttcagaggaacctgaactgaaggaatccatataacctagactgtgaagttctaccttttctcattcccctttacttttcagaaatttggagagcttgtaatgaccaaagaatcaaaggccttgatgggacyctaccatggtcaggtcctgtgcaagaagaataaatttggagctccamagaaggatgttaagtaagttaaactctacgtaggaagcccttgtgaattttactgtgtgcaaagttcacagaggctttgaagatctacagagctagatctgtatcttaattcagtcttgccctcaacttctttcctgagcacatttgagcccttatgtctactaaaaactttttggctttcaaagttctgcctgttctgagttttttccaaacccctctggtcattcctatagaggctttcttgtcacatattgatgttgcctagaagtctggtttaggtcccccttcccaaaccacacactccctctgcactgttcaatgatcatctctctccctgtgatttgagatgtcatctctgggaactcacacttcttcctcattaaaaaacataaaacctcattgtaattgttaaaatcttgtccttcttttagcttacaacctamgtattggaaagtctgtttgcctctttcatgtgtattgccataagccagcctttttccatattacgctgcctaatagctcttcagagtctatgtttaatgatgcaacttgtagctctgtggttctcagcgtggacaattttgcctcccagggggacatttgacaatgcytgggaacatttttggttgtcacaactagggagggagggatgctactggcatctgtgggtggaggccagggatgctgctaaccatcctataatgcacagatagtccccaccataaagaaatatccagttcgaaatgtcagtagtcctgaggttcagctgttctagctgaactgctgtgggggatttaagagaagcagctaatgatactgccttctccatcctctcacctttaatgagattacaaatacaaaatacaaaataaaatggataagaagtccgggtgaaacaggtaagattctaaccaagagggctgatttccaattagaatctgaaatacaaccttaactgcttctctcaaacatttagtgactgctatcaatcccatctgaagagccaattgcatttgttccacctaaccttgatagtaccttgcattcgatgagcagggtaaattacttccatgttgcaggaggaaaattatggccacttaaacctgtatctctttacacattctacaaaaatcaacagattaataaggaaaacaaagccacccattccctgtgcacggcataaatagaaggcagagaagcatcctgcaaaattacaaaacctagatacaccaacttctacccctccccaccgtatccctccatgtacacaaagaatgctgtcaattaaagaaactgcactttgcaacagaagagggtactcttaaattaaaaaacctagtgtcttaatttattaactccagactcctcctgcctgagcatttattgtcgtatggaggtagtatacatctccatgtaacaataaaataccccttggaaaaggtggtattgtgtagtcagtatgcaaaaaagaaagacagcacccacaaaaagctaatataagaaaaaaagagaaaatgagaatcagaatactgaagtttatgaaaattctgtcccccaaaaaacaaccacaatgcagaagaagactataacagaacttgatttaaatattcttaaatcagcatttgcaaatcagaaaaaaaactgccttgaatcaaaaattcaaaaactcagaactaaatgggcagaaaaacaggataaatataggagttgacctaacttgggaaagacattgaagaaaaagttagcatcatcttagaaatgaagaataagctataagatacccaaggcaaaatatgttaaactgaaaattgaataatgaacattgtagatagggtgtcccccttcctgctttcccagttatcagtaattcttccactattatttctctaggccccttcccccttgccttggatgataactggaattccttatctattgtctctttacaaattaatctttcatatgaataacgcattccatcagttctaataagtgaagagcagtacttatgaaaaaaaatactgagctacaaattagtatacagacaaggtaccatgttatgcattcctcaaatcacaacatttctgtgtaatcaaccctcaaaagttcatgtcacccagcagttggcttataaagcatcgtgcaccatagatgttagcctgctgggtaattacacaagtgggtcatttcaagggtgctgaagatgtttattagaaggattccgtagattgtgaagtgtgttaatttaactctacattgttgtagacaaatattaaacaactataaagccatcatgaaaattttggtgttaatgaagcggagcataacagttaagaaatgagtaatattttagctgtggattctgttataccaaaaaagctttaaacacagttttagattttactattattgttattaacagctaaagttaacattccagcaaatgccctcccaccaaaaaaaaaaaaaaaaacctactaaataatgcattctttttctcctttcaaaaaaattatcataaataagattataagatactcttttgtgtttatgggattttttttgttaggggaaaggggtgggtttgtttttttagagacagggtctcattctgtcaccccggctggagtgcgatggcataatcacagctcaccataaccttaaactcctgggctcaagcagtcttcccacctctgtctcctgagtagctgagactacaggcacataccaccacacccggctcattttcaaatattttgtagagatgagttcttgctaagttgcccaggctgatctcaaaattctggcctcaagcagtcctcctgcctcatcctcccaaagcactacgattataggcatgtgccaccatgcctggcctatacttatggtatgttttaacataaaaggaatccttctgtatggatcctgtagcttgcactttttactcagtgatatgacttggagatgtagattagtacatatcaggtaactccttccttttaatcccctgttgacgaattactggctgttacaatttttcattacaaacattattatatagctgttcatcacagcatgtcatcttgtgtataagtccatctctgtaaagtagataatgacgagtagaattactatgttatacagtatgcagttcttggttttaacaaaaccaaagaacccccccaaaagtaggacaaagtatacttccgtsaaccatgcatgaactaattttttgtacatcctaactgatactttaaaatttttggccaggtgtggtggcttacgcctgtaatcccagcactttgggattccgaggtgcgtggatcacctgaggtcaggagttcgagaccagcctggccaacatggtgaaaccccatctctactaaaaatacaaaaattagctgggtgtggtggtgggcacctgtaatcccagctcctcgggagtctgagacaggaggatcgtttgaacctgggaggcagaggttgcaatgagctgagatcgcaccattgtactccaccctgggcggcaagagtgaaactccatcttaaaaaaaaaaaaaaaaaaattgccagtctgatgcatctcattttaatttgcattgccccagttattagggaaattgaacatctttttattattattattattttcataatagagatgaggtctcactgtgttgcccaggctggtttcaaactcctgagctcaagcgatcctccctcctaggcctcccaaagtgttaggattacaggcatgagctaccgtgcctggctgaaattgagcatctttactgacaatttgttttgttcttttatgaattgctttatatcccttgcccattttatttcgttgtctttttaaattgatatatgcatgttctgtttttccagtagtatcctttgtctgctgtatatgtcacaaattcttcccattctatggttgtcttaattttgtgggttcatttgtcaaacagaatttttttttttaaaaaaaatggagtctcactctgtcacctaggctggaatgcagtggcacaatcagctcactgcaacctccgcctcccaggttgaagcaattttcctgcctcagcctcttgagtagctgggattacaggtgcacaccaccaaacccagctaatttttttatttttgtattttggtgaggttggtcttgaactcctgaccttgtgatctgcccgccttggcctctcaaagaaagagctgggattacaggcgtaagccactgtgcccagccaaaacagaaatttttaattttgatgtagcaaatgtatcagtcttttttttcagtccctattttttgtttctctactgtattttctcattgtcctgcaattacttatcactcaccatataaatatttgtaccattacaaagctgcatttagaagatgctcctaggacttgaagttagatttccttttcaggactttagtatgatttttgaacattacaatcagaatggttaagaatgaaactttatccctcatttcaactctaatttggataacartgctgtaaacttgggcttcttttatgaagagattctttaaaaatttttcttagttatttactatgggaatatggcaaattattccagaactatagggaactaaaatgaataagcagatatgatctctggtcctcaaaaggcttagaatttaattgaggagacaaataatggacacgaagccattccaggatactctggggtaaatcaagtcgtcctgagaagttctagaggaattcaggggcaaaaaaaggtagcaatgtgcatatgtggaagtgtttaaggaagggataaggtctggaagcaaagagaccatggaggagactttgaattcatccagacgaggagtgataaaggcacagattttgggggaaatgaaagattacacgatggctcacacctgtaatcccatctctttgggaggctgatgtgggaggatcatttgaggccaggccaggagttcgagaccagcctgggcatcatagtgagaccctatctacaaaaaaacttaaaaattagccaggagtggtgatatgcacctttagtccgagctactcaggagactgaggcagaaggatcacttgtacccaggagttcaaggctgcagtaaacctaggattgcaccactgcactccagcctgggtaagggagcaaaaccatgtctctcaaaaaaagaaagaaagatgactggcagatagtcaaaatcactaacaaataagttgttcaataagaaaagaggttggtctttttgttcgaaaaacaaaaatactcatgttgacttaaatgtaaactggttgttttgatttcagtgatttcgaagcatgattgaagattagtataattctgtcttcttgggtagaccagttcttttagacctggtgggtttttgcacttaacttttaagatcaatcatttattaaagctgtgtttttaataaataaaaattatttgaaacaccttatagttgtgcctgcattagttggtttattgaataacttaggcaatcttccactttgactgaaatgattaagatcagtttaccgaaagtcatttcatccttgccttgcaggcatctggctattcttggtgcagggctgatgggagcaggcatcgccyaagtctccgtggataaggggctaaagactatacttaaagatgccaccctcactgcgctagaccgaggacagcaacaagtgttcaaagggtaagcctgctctctctctttgcaagagttagaatgtcctttgtttcttggttagttgttttttgtggtggcttggtgggtttttttgtttgtttgttcttgccatcacggattcctttttcctgaacataatgagttctagatactccgtagtgaagccaagtttcttttgatttttagaaatgccaattccttctttgacttcgttttgttatagatatcatagacaattaacatccttggagtctgtagtctttgaatgcagaagggaaaatcttatctagtagatacttgttaatgccattttacactttcgtatcaggcctgcggattttgatatagtttgcaggtaattgctctattgttaaggattattcaaacagcatgactgtctctgttgagaagactgagtgaggttaggatgtaaggaaatgggcagtaactgcagggggaaggcagggccgggatcaggactcttcagacttttatttcctgactggcattacagagagaagccatgaactgatycctccacagtgtctggggctttacagactatctccatcttacctctgaattaataaagggggaatattattccccttcctcaccacctgcctctctcaccatcacacacatgctgcctgttttgcagaggggaaggtggagcagcagcttggccaaatggagggttggtttgatcagttttctgctcacatttaatggacaagctggctgcacttaaagcatcctgcatgtgacttttagctgagtgagcttttttgtttcttaaatggattagatagcttaagcatgttgttatcccttttctgcagagaagctcacatattgctgccataatgctaaccaggacctggcaggtttcatcgtgttggcagattattgtaagataacaagttgtagtagaagattctgaccaaaaaaatgatgtgtgctagatagcagcagtgccctgaaactagcatgcaagcatcccaaacagcattccataccatcaccaaagtaagaaattgttgctctaaaatagtttcctcccccagtctctcttgaatagtgtcctgggttccccttttcgtcttagaaacatcaggttctggcgagtgccgctcaccacactgctgacttgggacaatagttcctgtcctctcttgggaatagtttaatcaggcattagaattagagcaactgataatgttttgaatgctgacaagtatcttgtttgctgactgctgtcatgattgtcaaaaacaaaagctttgagcccatacttttaagaccttatttgatgtttttgtttcttttgagacagtctcactctattaccgaggctagagcacaatggtgcaatcttggctcactgcaacctctgcctcccgggttcaagcgattctcatgcctcagcctcacgaatagctgagactacaggcatgcgccaccatgcacagctgatttttgtttttcttatagagacgggatttcaccatgttggttaggcttgtcttgaactcctggcctcaagtgatccgcctgctgcagcctcccaaagtgctgggattacagatgtgagccaccatgcccagcccttaagaccttctttgaatactcctttgtatttatcttgtggccttaattttgcttttggttaaggaaattagtgaatggggtttagcttcattcttcatttagaggaaaactgtaggtaatttattctgaaagtgtggtcagacggaatctaagagaacctgtttcccttggcgacgaaaaataatcagttgaatgtctgaataacaggaatccttttctgctccctatgggaaaaaagaaaccttgagttaatattttatgtaatcagtgcaatgtgctactaggtaatgagtgggaagtagatggagaatataggaaataatgcttggtctctgttctttagaagattacaaccacaggctgggcgcggtggctcacgcctataatcccaacactttgggaggctgaggcggatggaacacgaggtcaggagttcaagaccagcctggccaagatggtgaaaccccatctctactaaaaaaaaaaaaaaaaaattagccaggcgtggtggtgggcgcctgtaatcccagctactcaggaggctgaggcagagaattgcttgaacccaggagacaagaggttgcagtgagctgagatcgcgccactgcactccagcctgggcaacagagcgagactccgtctcaaaaaataaataaaaaaaaaaaaagattacaactacagaataacataaaattatatatttgcgataagcaaatataaaccatgtggtctcagacacackttggctgcttcccctgtcataggtagagaattaccagaactcctcttttgttttgccattctagtrttcatgttatttactcctcttggcaaatttaactggtttaagagtgatttagtttacgtaaattgggcatttggaggcattctatggtagaaagaatgtgtacttgggagttaacatgtctttgaatgctagyaccctcccttatcaagctatttgaccacaggtccctctaagactaaacaacttgaaagtctccctcaaaatgggagtaatagaataactacctcacagagttggtgaaaaacacaggtgtgctctggcccatggacattcaataaacgttagtttccttttcttcccatctaactaggaatgtgttttttctagattgaatgacaaagtgaagaagaaagctctaacatcatttgaaagggattccatcttcagcaacttgactgggcagcttgattaccaaggttttgaaaaggccgacatggtgattgaagctgtgtttgaggaccttagtcttaagcacagagtgctaaaggaagtagaagcggtaagcaaggggctgttgtacttgaatcctagtgtagtgaacagaaaacacagagattttttttttaaaggagctataggaaactcatgattgcttttataaaaaggactattcaaaggctgggcatggtggctcacgcctataatcccagtagtttgggaggctgaggtgggcggatcacgaggtaaggagttcgagaccagactggccgatatgatgaaaccccatctctactagaaaatacaaaaattagccgggcatggtggcacacacctgtagtcccagctatttgggaggctgaagcaggagaatcactggaacctgggaggcagaggttgcagtgagccgagatcaygccactgcactccagtctgggtgacagagcgagactccatctccaaaaaaaaaaaaagactttttgttatcaaacgttaagtttttatgtgtgctcatgcacactgcatatgttataaaggtcaaatctaaattctaaaggaagaaaatgagggtgcgttcaccttattcatgtaggagctctgtcacccaaacatacagataacctcacagagtatagccagatgctttgagattttttggttagcygaaagccaaaaacaaacctcttcaggtctaaggctgcaaaggaaatagggaagacagttcgtccagatgcttgttctgtggaaatgctgctttggcccagctcccaaatgttctccataggcacttcttgagatgggctgacatgaacaaaacaagtacttgaagtggggagtaggaagagtaagccccgagaaggagtaatagcagtaattcagggatgaggtaggaccaaggcctaagctagtctacagttggataaacagaatgtgggttactgaaaggtgaacatgaaatgattctgacttggcaacatgctggatataatgagcagtgagctcattacaaaaaataagagtaccacagagcaaaactccgtctcaaaataaataaataaacaaacaaacaaacattatcttctcttattgcccatagagctaacaaaacccattccttggacaatcttccacaggcatgatctctagaccaccccgtttcggttgtcctctctagtatcttcctcatgtctccgtgttctactgctgtgtttacaactatcttttcacaattctgcaatctgggcagggctctgcagagacagtggtgcttaagtccattgatttcaaggctggggtcactcctgggctgcattccgcaggaagctcggttggggcacctcactgcttcccccacatctctcatagtccatcctcacttagtcgtctcaccacaacttctttgtagcgtggctgcaggcttccaagagaacaaaagcagaagctactgagcttcctaagtttattgtcaggaagaaaaaaagataaataatttaaaaaataaaaaaagaggctaccgggccccacaggtctaggtaggcctggaactggcagggtaacttctgctgcattgtgttgataaaaacaagtcacaagaccagcccagattcaaggagaagggaaacagactctacttctagctgggagaaaagacatacatgtccaaggaagggaagaatgtttgccagccagctttggagacattagtttgctcttcagaaaggatttcaccaccagcattagacactatattactaagaaagtaacctgacactacgtaagctttctgacagtcatgctgtactgtcaattcattccacttttgttttgtttttttgttgttagagacagggtctcactctgtcacccaggctggagtgcagtggcatgatcacagctcactgtaaccttgaactcctgggctcaagcgagcctctcacttcagcctcctgagtaactaggactatgggtatgtaccaccatgcctggctagttttttaaagttattttttgtagggccgggcactgtggctcacacctgtaatcccagcactttgggatgctgaggcgggtggatcacgaggtcaggagttcaagaccagcctggccaagatgatgaaaccctgtctttactaaaaactacaaaaaaattagccaggcatggtggcaggtgcctgtaatcccagctactcgggaggctgaggcaggagaattgcttgaacccaggcggcaaagcttgcggtgagctgagattgcaccactgcactctagcctgggcgaaaaagcaagactttgtctccaaaaaaaaaaaaaaagttatgttttgtagatatagggtctcactatgatgccgaggttggtcttgaactcctggcctcaagtaatcctccatccttggcctcctgaagtgttgggattatagttgtttagccaccatgcccaccctccactcttgattaactaaaatcatgggatctttatcacaaatactgccaagccaggtcttgtccttcaagtacctatacagttcttttctttccttttttttttaaatcttaaggcagtactttacttttattgcattataatcttattttgtactcagcttttcagtgtgttgaatgtgtcttcctccttgattctcatctctgttaggattctgcctgttccagatttgcacacatttgacaggtgtcccttccacgtttctcatccaaccatctgaataaaaacatgaataactgggaggcggaggttgcagcgagcctagattgcaccactacactccagcctgggcaacagagcgagactctgtctttaaaaaaaaaaaacaaaaaaaaaacatgaataagttgggatcgtggccagaatgcggagacaatctgcattagagactattctccaggtggataaagctaatagttaatagtatttgtgtactgtagctgcaactatagtggtatgccgttttttagtaacacactgtataaaatgagacaagcatgcacattttggcttgttcttataaaggtgaagcggggagtgattcagggcagatccaaacaaaagaggaggtgacacccatgctgggtgttgaaatcaatgaattgcaattcaaggccgtcttttcagtgttgttctaagctgttttattgacccaactgctgagatgtagtctccaggtcaggataaggtgaccttatgatgggccataactagaggaaggcagaatgggaaaaggaacaaggtcaacatattccccgacacaaaascccctaggtgatccgtcaatgtctgggtgagtgacatctactgtctgagcagttgtgggrgacagagtgggctgggcccaggtgtcactcattagctttgmtgtggcctctaatcatctcccaggcctacctgacacaytgttaaatgcttttcccctgcaggtgattccagatcactgtatctttgccagtaacacatctgctctcccaatcagtgaaatcgctgctgtcagcaaaagacctgagaaggtaaactcggaacagagaaaaaccctgagatgttttattgcttcagattcactgataaaggcttacagcttgagtacagaagagacagtggattacggagtggatgcgggtggttcctaaacactggacacaataaatgctaataccatgactagtgtgagatgcaggagtaagttaagtacaacaaaaaatatccttttcaaggatcccaaatgggcattatttttcaggttcaggatataaagcccacctgtatcctagaattaggcattgaaggataggccytaagaaaggatgctccaaaataccagtttggctacagagcagagtcagtgactgtttagaacaggtttggttccacctccagatcagggaatggcaggaatggtgggatgtgtctgcccgtgggtttgcttacaccttctaccccgggacatgaaagggctgggtatagaagcactttctgtgagtatttggaatgatgcccagaaatttatttttgctctcaaccagagtaattaaggggaagtgaaatcattcaaagagaagtaaaacaactcacttctctggaggataccagttagcctctgctaaccagaaccagccgaaggtaggcaggaattataaaagaactttaagcagctgaaagtgttaatacaaattctatgtactgaaaacacaaaagcctatttattcctactcttctagcttgctaatgcaaggtaatctagtttcctagcacacagcagattagaagtgatgcggggacctgacagaggcaggctcaatgatggcaggctaaaggtcatagggagaagttgcagccgatagtctacagatggacagtctggccatgtcatatcactcaagacatctgtgtggcatctaaaatcagtacaggcgatgccgttgctgttcatttgatggtaacctctccccgccatcggagcagagcaagcatcacactttgcagttctgccctccaagtatctaggacagcttttctcacctgcttgccttttgtcattcatttaaaagtaaggccaaaaagacaaaatagggtgaccaaccatcttgrtttgcccgggagcaagggatacaggaccctcagtgccacaaattgggaaatccccagccatccaggatgagttggtcatctttggcacaactttctgagtgatgtaaatatattttgcttgggttagtgattatatggatgtatatacagttgtcaaaactcattgatgtgaacacttcaagatctgtgcattttattatatagaaattctacatcaataaaggctaattccttttgctcaggagtactgagtctgaatcaggtcctaagtatttcagatgtaagtaaaagaacactttaggggttagaaacaacttttggattgataagtttacataacatttacttgatctgtgtattacataatggcattggagatagacagacctgtgatggaatcccaccccgtcatatgctgactgactctgtactactaacctcttgataccttttttcctcatctagataattaggctgaccagttcatagggttgtaatggattaaatgtaaggaataagtggtaaatgtattgaagagcaggtagataatgagcagccaaaaattacagatatcacttgttgtaccttatagctaaagtgagagggagaaagcaaaactataaattaatgaattagacttctttcaccacagttctgttgggaagactatgtaactgttagctcaatgaggggkttctctgaaaccttagcacgcatcagaatcaccaggagggattattaaaacaaatctgggccccacccatggagtttctgattcagtagggctgggctaggcctgagaatgtgcaggcctaacgctcccaggtgatgacagtgcttgttgggtccgggtactacacttggagaactgctggtttaatgagtcttaagtgcatctgactgttgaggagtgttagttaaacctagtatcctggtggtgagacccatctgtgtaaaatgcaaatacttctctgacagcccaacacattaattcttctgcctgccccacccccgcccaaaaaaactggatcctcttatctaaaccatcagtatcattaatataagtggaaccttcatccgtcgttccccaataaatctagtttggcctcgagctgtggttttggcactgattgttgggaggatcagatgtctgtagtgaaaaaccttagaagcaaatggaagaggaggattccaatgtgctctccctaaacatactaaacttttatcaaagacccatggaaccaaaccactcagctatgtcaagcagtattcctatatcacagccacctttctttctagtgttttcctagcagagaaggaatgctctcaggttcctcacccgcattctccgatctgttgrcttttggttccccttgccaggtgattggcatgcactacttctctcccgtggacaagatgcagctgctgsagattatcacgaccgagaaaacttccaaagacaccagtgcttcagctgtagcagttggtctcaagcaggggaaggtcatcattgtggttaaggtaaggggctstataacagagctgcagagtttttgaaaagttctaataagactccttttacctccaggcttgtttataaatattctggggcaaatgaccagactttgatatgattttcccctgggttgtctycaggatggacggtggtattgactgtcccactgagtcaaggtgggagtggggagtatctaggatgtggcagggttctcccagccatcccagaccttgaaggtgaccatgaaactatctgctgtactgtttgattcaagccaggctacccctagtacggcttcccctgcaatttcatttttaaggattctgattgagattttaagtcaccttaagttttacagtgactttcaaatgactttgaagtgaccctgggaaaggtagagtgtttcagactcagtcccagcagcagggccagkgagctcatgttctcttccttggcaggatggacctggcttctatactaccaggtgtcttgcgcccatgatgtctgaagtcatccgaatcctccaggttggtattgctctccagagtgtttgcggcatcttccactccttcagtcactctaaaactcatgatgtcaagataaggaccaagcttccttctgatacaccaactcctgctcttgtctaggaaggtccctggtgccctctctctgcacagcagtcggaagttgggcttatactgcactgaaaggggcagagctttccctctgccccacagcctcctcactgttccagcaagctaaaggcaccccaccccccagcatgtcttctatgctgtttctgcacctctctgaggcagggaccatccagaacagggcccgcttggttcaactggtgctgcatctgtttccrcagcacacagacctctccagtagccatcgaggtcattctggcaggaaaggagagggatcctcctcgctgggcacttacccagacttggggatcacagggctctgagtgctcctctttgatgatgtttcttctgttggtcatgacacactcagccgtctgtcatgcaatctccttattattgagattcagaaatgcaaacaagaagaaaatgaagaatttagtcatctctaaacgtccttaaagtgctgtagattagagaaggctcagactttccacttgtggccccaaacttctttgtgcttccctgaatgaaatagcaccagtcctgggcctggtcaggtgacactcagaagtgggttttacacaaggcagtgtttggagccagtacagggagccctttggggggatttgggctgcccttcccctgaggtccctgcatcgcttcctgttcaggaaggagttgacccgaagaagctggattccctgaccacaagctttggctttcctgtgggtgccgccacactggtggatgaagttggtgtggatgtagcgaaacatgtggcggaagatctgggcaaagtctttggggagcggtttggaggtggaracccagaactgctgacacagatggtgtccaagggcttcctaggtgagtagcctcaaggaaacataactagcaccattagttacaaagttctaagcagttcctgagaccaaagagttacagaagccctcgtggaagaaagttttctaaacacagagcccttatcactggcgatttcaaaaatgatttyatgagtcaggtgcggtagcaaccacttatggtcttagctgcttaggaggctgaggtgggaggatcgcttgagcccagaagtgtgaggccagcctgggcaacatggcgaggccccttctcaaaaaaaaaaaaaaaaaaaagatgtcatgtgaaccttctaagggctaggactatagattatggacaaaaggcagagttctacccttctggggctctagcatcacctggtccaagttatgccagatggacaagcatttttatcccccmgagatgaaatctgcaatagtgcagaagcaagctctgcatccgggctttaccatgctgtctggccacctgtgaggagaatgtataagctcaccatacacagtatacagttgaggcccacagagargtgactttctgtctyggcaaaacagcaaaatcagcattacaacctgggtgttctaggacccggtgctgcatatggggatgttaaaactcacccaggtggcctttctcatccatgtacacagatgcccaagctccgggtcacaagatcttctttccttctctgcccactcttctgacaaagactaatttgctagggttagctagacatacaaattcaggaattcagaagaggccagagctttataatagaccaacagagacaagaattctcaggtcagggtcttttttgtttgttttttgtttttttttgasacagagtctcacactgttgcccaggctggagtgcagtggcataatctcgtctccacctcccgggttcaagcgatcctcctgcttcgcccagctaatttttgtatttttagtagagatggggtttcaccatgttggccaggctrgtctcaaactcctgacctcaaatgatccycyrcctcggcctcccaaagtgctgggattacaggcgtgagccaccacgcctggccaggccagggttctgagaacaaayagtaacactccctccctgagaacaaatagtaacactcccttttcttgcctgttttaggtcgtaaatctgggaagggcttttacatctatcaggagggtgtgaagaggaaggatttgaattctgacatggatagtattttagcgagtctgaagctgcctcctaagtctgaagtgtaagtccgtttgagtggctaatgcctggaaattgactttctctgacagcccaaagcttcccagcccctcttccatttttttttkttttaatactttaagtcctgggatacatgtgcaggtttgttacataggtatacacgtgccatggtgctgtcttccattttctttgtgaccaccatacctgaacaggaggaccactcctgatgctggcatggtgctttccaagtggaaggccctcgcacgtgctccttggtctctgcccagcatctaggtgagaaccaggccacgtctggtgaaggccctcccctgctccagccttctctggcaagktcccagagagccgctggaaggacagattctccttggccccttcaccctcccagatctttattatcatttgtgagcagctgactgttgctgatgtcaaagagatactgattatcttctcggcaccaggccctgttctaggtgctcagtttcatgttaattagggcaagttactctccactttttccatgggaaagtttggttcacccaggcagcatcttctctgagggccagcaccaaccggcccacagagctccccatgcacccatcccgacttccattctgcatctgcggctctggctttcctccccttttcctcttcttctacctaaacatctctttctgttggcagctcatcagacgaagacatccagttccgcctggtgacaagatttgtgaatgaggcagtcatgtgcctgcaagaggggatcttggccacacctgcagagggagacatcggagccgtctttgggcttggcttcccgccttgtctgggaggttggtctcgcaggttgggaaggaagctcactttagcctggagcccgtgttgcgtctccttcaacgaagtcctctttctctattcagggcctttccgctttgtggatctgtatggcgcccagaagatagtggaccggctcaagaaatatgaagctgcctatggaaaacagttcaccccatgccagctgctagctgaccatgctaacagccctaacaagaagttctaccagygagcaggcctcatgcctcgctcagtcagtgcactaaccccagctgccggcagtgctggttctccaacagagtggtgtctagatttatcagagtaackagaagacaaactccggcactgggtttgctccctgattaaagtgccttcagccaagaccatctctccctcctggtgaagtgtgacttcgaattagtttgcacttcctrttggaaggtagagcccmmtgctcattgtataagccccgaggcctagagtggcagccaagagccatctgaagccacctctytgcctgttcctcccaaragrccagggtggccaggggtggtgagggcagttytgcmcccagccaaacacataacaataaaaaccaaactctgtgtcagcatctttgcccttctggtttaaacgcctccttcaaaaagcaatctggaagaaagccctgtgctttgggggagtaagaatgtgtgtgcagaattctaggcagcaccttagggagggactgggatgagagaaagtgggacctggtgggctcaaccacacacacctgtctgtgcagatgctttgcccaggcttctcaccacggtgtaccgggatattaaacctctttccccagcctggatttcctcattgtgtgatcttacccatttcttttctgggtgtgcctcattcataggtgcttcttgggatggttgtgggaacgttggtgctaagcagaggcgctgacatctcccttgatgttcggagatcctgcatagcagggctgccccagaaatgcctgtgcggtaatcaggcagcacgggagcagcatgaggagtgctgacccccacagcacctgcactcccccaaagcttcagcccctccccaccccacyccctgggatggaaagttcctacagaagcagtgcccagtctgggtaaacagcactggggctaactgggtctggcagaaggatccacgctgagtgtgtgcggaatcgtaattccagtcccatcacattctgcattctaaattgtcagatattaccagttactcctgcctctgctccagttgtacttcaaatatgtccctggtcccagctctgtagctgggactggcaggcaaggagatcaggtctggctctgcttggtcactaggaagccagactctaaaaccaagtcacctctgagttgaggttttcagatgaccagagtagggagctgatcccttgcaccaaagccattaaccggtttccaaatttggtctgagagagcctgaagccggcattctgccaatgcaggaagctaagcttgggccctggctggtggcattcagctttgagcctgggtctttcccttcagtaacaccaggtaggtgtgaattatgttgaaactagtggaagctggggtgggggttcttgaagggtagggaggggctggcgagggccctgcagaagggaatgaaggctgccaccagccgcctccacagacatgggaatggccacacacccacatcattcctccatcagtcctctcctgccagaaggcatatacactgtgcccatgggtccccatggccttgttttcaaaagaagaaagcagctggcacccagaatgccacttgtactcatcttcagcagtctagcatttatttcattagtccttgaggattcattaaatgatctgcaagaaaaccaaatgtccccacatcacaggttctgtgctctactctctgaccacttctctgagctgaggcagcctgcttggagtatgggcaccagcatggcttagctacttttaagataaaaagtggaggaaataaataggtagactaggtaaggcagaagagaaggctggcactttgggccctgacactagtgggcaccctgtggttctgggtgagatggaggacacggatggggtggggtgtgtggttggacacaatgaccagagctctgggtaccaagcagatccccatgtttgagattcaagggcacaaaggcctgctgtgaggcacgtgaacaaatgcaggactgagctccaggaacgcactctcccaactgtaccctcctgtgccagtgacagaaaaccagggaaaaacaccaagtattgtcagagacaaatgatgggggcaagagattggcggaattggaggtggttgactaccgcttgcttctagaatcaaggagaagctgacctaaatcaacctgctcttccacggaatcagtattctgagactgaacgccacctgacrgatggatgactagctgcagtaaagtcagagcagaagccagggtgctagagtcatctgggcagtgtctggcttcctaactagataagtgggtcgggtcaattgcagagctgtgctcttccaaagttgtcacccatgaaccaggacccacaggtggagcctctgaggtgccatgggttaggcttgtacacgactcacctgtgtgcggggccaggccccaccyccctcaaccacggtggagcagagggggaagggaaaggcatctcacagacacagacatctacaccctcactctggggcagctttaggccaaaagccaacagagcacaaaggagagtgggcacttgggaaatcggtgcttaaattaccagccatcttcttgtctctaaacagagcctacaggcttcagcagtggaagtcgtttgtgaaggtctatagcagggcatgaggtggtgttaggtcaccctgaaggccagcttttgaccccgttgtgggaatcacggcaaatgccttactgggcccaggtacacagtggtgcccccagccccttccccatgtactctgcacactcaaaggcaagatgtcccgtgcaggggtctgaccccagaggaccacatttccacatgcatctcccctggatccacccagtggctgctgagcagcctcagtctcgacatagatccttcttgcaggcagcacctgctcctccggagtgctgtacctggggcccccataccagcattccagctgtgcagctccagctgggcagttcagatcttgggcctccagcctttgatgaactgcatgatcttcttgacctgcagcttggtgaggtggaagtcatctgccaggatgtcctcactgagctgcacaaagatgctaccatcgatgcgttctcgggcaaagaagctcaccacatcctctgagagcccgatgaaacgcagactgcgagagacctcctccagggagagtgcagacaggtcagcagggggctgccaggaggaggcatctcggactccaaagcctgtggctccatcccggggactggcaggaggcccttccaggcgcccttgggttagaaaaagtgctcctcccgcctcgggtccctgcagagcagctggtgacagtggggtggggacctggtgcagcaccaaaccttcaggctcaaaggccttggaggggccaagtggtgaaaggcggggtccaggcccaggtgtccccactgctctgggctcctgagaacgcagcagctcaggctctggagaactgccctgccccagctcaaagggatcgaagggctccaggactggttcctgccattcagaagargaggaggaggagggggcgcaggaggaggggggagcagctgaataggcctggcctggcgaggctgggcctggggaatacgcagggccagaggtagccacaggacccgaggtggttctgggcccagaagacaaggccgctgaagggcctgaggggtaggcaggcccggaaaaagggttgagagctccaaacggagcaaagcgcttctggggatgtgagggcttgaatagaggagggcagctgtggtaggtcttaacaggggtgtcagcccccagaagggaggcggctcgaccgctcagaggctctgtgagggcccgggaggcctggctgggctgtgtggttgagggtaggggaccrggggctgggcggctagaggactcgcccaccttgcagtctccccaggtgcatgggtagcaatagagggagtaggtgtccggcgatggggagccactgccactgcgggaacccgccctgtggacagagacagacacacacacataggacaggtgaggctgagagggaatccgatagggtcacacatgcattgcaaccaagcaccactatgacctcagcaacacgggcctgcaccccagccccagcccaagaccctccggaatggctgtgttcttccttccagcatcccccagcccaggtcagaaaacacaggggaaaaatgaaacgaaactgaaattaataaaaatattttctttcaattttttttcttttgagatggtgttctcgctctgttgcccaggctggagtgcagtggtgcaatcttggctcactgcaacctccacctcccgggttcaagcgattctcctgcctcagcttcccgagtagctgggattacaggcatgtgccgtaatgcccggctaatttttgtattttagaagacatggagtttcgccatgttagccaggctggtcttgaactcctgacctcaagtgattcacccaactcggcctcccaaagtgctgggattaccggcatcagccaccgcacctggcctgaacttaatcaaaatttcaaaacagcaaggagctctcttctctctatcctgcagcaaagtccccaccttgaggggaccagggcaatgctcccatccgttcctcaacatttaagagagaaagaagctgaagtgggcagaacaggccactgggccccaggccccaagacacccagacagcagtgccaatccctgagccactgcacagggagctgcaccctcgggaatctcccaggcctcaagacttcctcttcctcagcactgtagttccccctcctcacccttccctgccttgatctaccttagaactcaggaccaagggaaggcagggactcacccatcctggaggccagaggagtagtaggagaggctggagctgggggaatgtaccggctgcagcttggggaagcgagggggaaccggggggctgctggagagccggccgctgccattgccaccccggggaggcactggaggggcattgagcaggcggcactcctccttcacctacaagcagagggcggtgactccacctcgactccaaacagctggcactccttatcttccccttcccaagcagctgggcgagggggctgtctgggcctgacatttgccccactttgccaataggctgccttgcaccccaactgctcatccagtcagccagccaccccacccttcctagccttcccagcctatctcacgcacccacaccctgtcccacagcctccttcctgttccttggaaatccatcatggatgttaagaaaaagaacacaaaggtagatcaaaacaggttaagcagacgtgctccctcctcaaggaaaaggagagaaagcagaggacaaaggaaagccgaagggacagagggaaggaagcgtctgccacctgcatccctccctacaagtcgtgtaccccaaagaggactccatgggatgctgacgggtgttacgggcagggagaaaatgttctgataaacaggattccttagtgcaggacttctcagagcctttaatctaccaatgctctgtgactccaatatgaggagggaaaaagggctgggaatcattcacagcatttctaagcttacttcgccaaggaaccttcttttcacgcaacaacttaaaggacccctgttctgtggtaccttctgggtaacagtgcttcggggctcctctcaaatcctctgaggctggggacctacacgcatctctgtcccacagctctcccgccaccgcccgccccagtgccccttactacaaatgcttttgcctggcatgcctctgccctttccttctccccttccccaccccgccgaggaagacacctcgtctgccacatactccggggccggggcccaggagaacgggctttgggccctggctggacccgggactcggcccccagcgcgctcactcaccgcctcggatttgggagggactggaggcggcggcgcttccggctcccgacgcggcggtcccgcggccccgaaggagatgaggtcgagccctgggggcggccggacgaggccctcgggcccctggtgcgcccacaactcctcgtaggggatctcggcgggcggcgcggcgggctcgggcgcggctgcccagtcggggctcacgtactcctggtcgccctcgccggcgggagccggcgctagcgggccgggggcgcgggcgagcccgggggcgcgcggcgcgggcaggcagaggcgcgcgcggcgcgggctggcgcagtcttcggcgagctccgctggcgcctcgcgcacggccgtggagtactcgtcggggtcgaagcgctcgcggcagtaggaggcgctgtcgcgcaccaggcgctcgacgcgcgggtccccggccagcaggccctgcggcagcgcgaagcgcggcgtgtccgtgagcagcaggaagtgcagcggcgccgggccctcgcggcgcagcgccagccccagcaccaccgtcttggagatgatgctaaccagcttgtagcaatgaccctcccgcaccgggtgcaggtcgtaggggttgcgcggcggccggctgggcaccagcacgttcaccggcagcctc

SEQ ID NO: 95117 - DNA, 58046 bp, Homo sapiens
  misc_feature (1)...(58046): n = A,T,C or G
tgccaaaaacaaaagaagtttcaattcgaacagaacttgatttccaatatgtgaattgcattgagtcattcagatccctcaggaagcttaagagccaagtatccacatttcactcagccaacttactatgaatagtgacttatgtcaggcaagtaatgaagaaaatggattaacaacctcatatttaagatgggtaggcaaattttgagtcttataaacaaagcttgtactctggttcttctctaataagtcacctcctcattctacactataaccaggaggctggtggcacctaaggtcaacaagaggaattcttacgcaagaacctctgctttagaaaactggctcccttggcaatctgtcaaagtttaacataactgtcaaaactgtaaattcatgtaagattactgccagattggtagatttggggaaatatgggatagatctttcccattcaggactagattcataatgcggttagcagaaaaaaactgcaaattaaatgagatacctttgaattgggagagttaattcgaacaactgccacatcccctttgactccatagttaatatgggttctggctaaaaagaaaagaaagatttatttgtaaacatatttattgcaacataaatccaaaaagcaatgtaagcatacacattaaaaagaaattaaacttactcagcaaagcagaagaccctgtaaaattgcggcatatataacctgtaagaaaagacatttcaaaattaatttgcgaaacaatttctgtagtaccttttatatataacaaagctgtaatttacattaataacaacaacaaaaaccccaaatctgtacaatgtattctaggccatatgactactgccatattttttccatttcagttgttaggtcagatgattatttggatactaaaagaggaagactggcccccacaaagggatatacatccccagaacctgtgaatatgttaggttacacggcaaaggggggattaaagttgctaatcagttggccttaataaagaaagtttatcatggattatccaggtgggcccagtgtaatcacaaaagggaagagggaagcaaagagaaccaaagagatagcaatgtaagaggcacatgggaactactgactggagaacccagtgaaggtggagtggaataggggaggatcatcagtaggttgccaaggctcttgctgcctccgtattttctctttatcccccagttccttatggaaagggaagagaaggcacaaaaaatagcagctttatactggttggaaaggcaaggtgacacattaaaaaaaaaaaaagaaagaaaactgtggttagcaccagaagcagaatggggtgatttcaggttctgcctgcatttcttctttaagcaatccaagccagccgacttagtgcaaaggcaaaggacttgtgttcaaccatcaggtttatttactagctgtgtgactgtgaacaagtctcttacaagtgaacttcagtgttttaagatgggagaagccagccatctcctcaatccccagtgcctctacttgactaatagtatgtttcctgctttgcttttccatcatttgaaatctgtgtcatctgtatttaccactcttccttctttatatttgcatcatgactccagtcttttccacaaaacctcatcttcggattctgtctacagtgatccttcctttccttgcctgcatttttattttattatttaatgttctgtcctctaactgctgcatctgtagcaggtgtttcaccaaccacattgtaatcttttccaacataatctgttattcattcaacaaaaacatatattgtgacctccatgtgccattcactgttctaggcacttggagtacagcaggacattcagggtgaacaaaaaagacaaaaatccctgtcttggtggagcttacattccaggtcagcaggggatatgatatctgggaagaatcagttcctactcagtgaagataaatgaaaagtgaaaataggcctggcatagaaaaagttttcctgcaaagtagaaattccagtgggaagggaagaaggggataggtaattctagcaaaacagggtaaagtggattagagtgggaatgaactgattgggaatgcaggttgagagggaaaaaccaagaaacacaaatatgttagaaaataagcacctaagcaaaaaaaggaaatagagtgagcatgggttgcaatatttcaaaaacattttttttctttgagacgaggtctccctatgttgcccaggctggtcttgaactcctgggctcaagtaatcttccggagtagctaggattacaggcatgtgccactatgccccactgggttgcagttttaaagatcaaatatttgagataacaggttagtggtcattagccaacagtttaaaccattttaactcctgtccactaacctacctatgctgcccacacactcatacacaaaacctctccaagatcaagacaaatagaaacaaatagaaaaccagtatatacatgaacatacttcgaaaataattccaaaccagagtcaaccaaatcaagtcacactgcaaggtagctttgcttttggagtctagccttactcactacctaactgcagagcttaccctatggcagctgagtgaactttagcctacatctactgtgccagcaaagtagagagaaacctttgccccactttttaatcatctttgtaatgtaacccaagaataactacaaaacctcataagactacagtcagcgaagagagctggattatgctaacataaatttcaaatttgaaaacattactttggttgtaataatcaacagcttttctcaagattcaacactgggagaagcgacgagattaaggaagtgagaatcaaatttaaaaatacacaatctatggccgggcgcggtggctcacgcctgtaatcccagcactttgggaggctgaggtggctggatcacctgaggtcgggagttagagaccagcctggctgacatggcgaaaccccgtctctactaaaaatacaacaacaacaacaaaaaaaaaaaaacaaaaaaaaagttagctgggcgtggtggcaggagcctgtaatcccagctactctggaggctgagacaggagaatcacttgaacccgggaggcggaggttgcagtgagccaagagcgcaccattgcactccaggctgggtgacacagtgagactccgtctccaaaaaaaaaaccgaaaaaacaaacaaacaaaaaaaccatctattaaggtatttgcctctaaattcatctcctgtgaaattattttactactaatacctatttactactaaatacctaattaggaatttagatttaggataggagtgggaattagacaacatactctggtcaagaagtgattttcatttgatattcacattcagaattatagcacttgtagagaaggaatgctttaaaatttcaagaattacaagtctccttcaagataatttttttttttttgagatatggtctcattctgtcctccaggtgtgatcttggctcactgcaacctccacctcctgggttcaagcgattctcccacctcagcctcccgagtagttgggattacagacgtgtgccaccacacctggccaattttggtattttttggtagagatggggtttcaccatgtgggccaggctagacctcaagtgatctgcccgccttggcctcccaatatactgggattataggcatgagccaccgtgcctggcccctttcaagagaattttatcatccaccagcaaaggtcataatctcattaaatgtttggcaaagccttgcacagacttttactgtgaaggatctattgagtctaaatagtaatataagggtgcaggtcattttaaattcactttccagactttttttcaaaatttataaattgctattaagggatcagtaactacaacgaatgatactttcttactggtgaaaacacaatgcaaagtatatatttatgtgtctatatatttctatacagaaaacagaaaaattaggttggtagctttttattacacacataagatgtacaaattacttttaaaaactctcagatatatacaatcgtatttcttccaggctggagttaataatatttactgagtgcttactccatgaaaaactgcttgatatctaaaataactccttttcatcacacaaggtggtattattccccattttacaaatgagaaaacaaacacagaaattaattgcccaaggtcatcagagggtaaaaggcagagccaggtccaaacccagaagtcagactccaaacaatgttttttttgtttgtttgtttgtttttgagacggaggaccaggctggagtgctgtggcgcgatctcggctcactgcaagctccgcctcccgggctcacgccattctcctgcctcagcctcccgagtagctgggactacaggcgcccaccaacacgtccggctaatttcttgtatttttagtagagacggggtttcaccgtgttagccaggatggtctcgatctcccgacctcgtgatccgcccgcctgggcctcccaaagtgctgggattacaggcgtgagccaccgcacccggcccaaacaatgtttattaattgctctgtcatgctacttctcatgcaaaggaaatccatcatctcaatcattcattttgcagatgaggaaaataaagcccatttagtttaaggcatttgtccaaagtaacacagctagtgactagaaccacgtgccctggctaccacttccgagtgacatcagctgccgatccataagaaataccttcaaaccaatgcaggggtaagataaaaattacacgttacttttcaaaagtgttgtgaaaataggggaaaaaaaccaccaaacctgtaaggaaacataaccgaaggctaaccgtaggtaagcatatgagtagtaagacaatgggtgattcgtttttttttcatctctttcctcaatccttacagcatttcaatgttctataatgtgcttatgttataattggcaaatacatgctacagttttgtggagactaaaaacagctgttgaaaaaagggagcagaaaaatattcaatcattaaaaaaatccccttacagtaagggatttcagctacttgtctaaaaaaagcatactacttcagcggttccggaagagggaagagaggtaattcatattacaaattaaattaaaagttaaaatttctagttaagtaacttattaagcacaacatgcaataaaacgttgtccacttttgactttacagatttgggatggaaagaaaatgcaacgtttcctacaaccacccactttaaccctttcactgccagtttgaaaaggaaaaacactagctaatacaggctgactgggaatcatcagattacaaatcgttctcagaacgatctaacattttattgcttaaggtagaggtattagcgtatttttaaagtgtgtcttccagtaagttgcagaacttcccgctgaaattcaaaatactatacgttcacactgacattactgaaactgcaagagttgagctccctacttgattggggtagtaagcacaaaaatggttttgagggaacggagcagggaggggcagtgatctgcaaggctgattaatcccatacaagacagcgcttgttgcggggtaaggtgctgtttttaagacagctcttgttgcggggcaaggtgctgtggagccacaaagatgcgacagaatggatcccgattctcctggaactccggatcaagaaaatatgaggggcgtgagcccagaagtgcgacgcaagagacccgcggaaaggtgacagaacgagtggcaccagactcagaaagttggggagttaggaagcctgaaatcgccgcaggagtcgtgagaggggaagtgacagtctcttcagaaggtcacgggaaaccgggtcccagggcagtatccccacagagggctgcgtctccgggctggggcaggcggcagcgaaagggagacgcggctccggggccaccccagtmccggcaggagttctgcccggaggtctgggatgccctcggccaggcctcacctcgggagcggaggatcctgaaggcagaaaagcggctgaggatgccaatcgcccggcaggccaccatmttgagctgaagaggacagcagtggagagcgcctctaacgggtgcggccgagcggaggacttttctcccgtagcctggcagccaggcgcctggagcactgcctgactaaaacccagatgccgagtggccgccggccccttagccctgcccctcgctcctggctaacatggccgaaaggtcgtattctccgggggaggacggrggcccggagaggagggggtggagtgccyggttttccagtcaggcggccggagggcagccctcaagaacggccctgaccgcccgcggggtgaggggccctttctgggcaggacccgccccttggtcccgcagagccttggtacttggacctgaaccttgctccgagagggagtcctcgcggacgtcagccaaggtgagacggcgagccctcagctctccgcccgggctttcccaaaggcgagattccacttccttccccgcaactgtcgccggtgcccccggccccctcccctccctgggaaagtgggagttgagggagcggaaggaaactcctcggacaaggtcggcagtgctagctgcagttaggacagtgacttggactagcgttccagctgaagttcgggacagtagtgtcacctgcgccctaatttatcatcacaagttaacgaagtctgggggtgtgggggtgtgtgtgtgtgtgtgggtgtgtgtgggcgtgtgtgggcgtcggccttaatgtaaccctggtctgcgtagaagtgtgtgttgtttcgcctgcttcccctgtacccaggtcggcggctatagagattgtggacggcgccatgggtttgcccgatttctgctgtaaagaataagactaggtcaggtgacctttcggggcttgagtgtgggaggaacggagacaatcctccatccsgctccgttatccagataatcctgcgctctcgggggttttccgatctggatgattatctatctggtcgttcacacctcagctcacttaagcggtgaagaaactgcctacgaatcagagagagtgattttacccatggccatatgtagtagaaataagactggagcctaagtctactaactcctagtgaagagttcttcattgcatggtagctgtttttgtgctggaatgatgggctggagtcctggaataaagtgattgatttcaaaaggaagtcacattgagagcctgctgtgctctggtcaccttcatacctttttgtttagtcctcacattccccaaattattatcatttgcattttctagatgaagtttgggaagctcagaatatatacattttctagtctgtgacagasctagcattcagacataagtctgagtctcactactcgccagactgacagctctgcaggacaggaaacaaggggcatcgaagttaagactgaaatgagtatagagacagagtagagaggtttctgtttaaagctcaagttgcatagtgagtgctcatcatgtgagcactttaagcagaaactggatgacctgaccacttctgaataaattgcaaaaaggattcttgataatcttacaaggtttttacagttcagagcctgcctcctgcccatgtaatgctttcttcaacacctaactgcgtgtaacacttattatttaggtcagaagtggtaaattttgttgttgttgttaaaggtccagacagtaaatagttcaggatttgcaggatcactttggtctctgttatatattgtttcttttgttttgttttgtttacaacttttttttttttttgagacagttttgctcttgttgtccaggctggagtgcagtggcgcgatcttggctcactgcagcctcctcccgggttcaagtgattctcctgcctcaggctcccgagtagctgggattacaagcgcacaccaccacgccgggctaattttttgtatttttagtagagacggggtttcaccatgttagccagcctggtcccgaactcctgaccttaggtgattcgcccagctctgccccccaaagtgctgggattacaagtgtgagccaccacgcccgaccttacaactctttaaaaatgtgaaaaactatttttagctagaggcccgtgtgttgtagtttgccaatccctgatttagatcactcatttggctccatttttttgctccctgtgctttctctacaaaactaagctccatcagggcagaaatgttataatgtttctttgatccctaagcactttagtccaatggtttatatagagggaaacagtacatttgtatcaccatctctactggtaatagcaaacacaggtatacccctaactgtgtatcaagcactattttaagtggtgtgtgcacgtgggtgtgcgtgcgtgtgtgtgtgtgcgcgtgcgcgtcctatgtggttaagtaactggcttaaagtcatacagctagggtgaatcaggatttggacatagtctggctttagttctcttaaccattacgttgtgtttcaaagttgtaataatgagctgttagagccaccccatcttgcttttgttttcattacttgcctagactcttcttcctttcccttgctcccaggtgcctgcagcttcgtgtatctttccatagttcacaccttactcaggcttaccctaaccaactcgatcctaccctaccctaccctggagtttccatgctttgaatatttttaccaaaatttctgttttctgaagtttagcaaatgacagaaaggtcagctctgctataggataatttgcttagtccctcttacttttgaaatctctattttttattaactattgaaggaatacatattccatgtaattttttattcagaaactacagaaaagtctaaagaaaatctgtaattccaccacccggagataactacttttaacattttgatgtgtatttttctggactttttaaaatgcatttgtatatttgtatatatttatataagatattgatgtacagtcggcccttggtatctgtgagttctacatcctcagattcaaccaatgtctgagtgaaaatgtagttaggcctacagtggtttcatttgtcctgaacatgtacagactttttttctcatcattattccctaaacgatacagcataacgactatttacatagatttacattgcattcggtattgtaagtagtctagagatgatttagagtatgcatgaggatgtgtgtaggttctttgcaaataaatactatgccattttatgtaaaggacttgagcatccttgaggtttggtatctgaggggggttctggaaccaatcccccttggatactgaggaacaacagtatatatagattttaaataaaactagaattatgcataagtaaaatgcttattttaaaaaaattaaagagaacagaagaatattaaataaaagcctttctttatccttccatgtctagactcatagcttcagggactttcttttctctttctctctttctgtcacaaaatggttgttgtagtagggtttacttacccatttccctattttccagttattctaatctattattctaatttctaatacacattgttctgtagcttgctttttcatttaatatatattatggacatttttccatgtcagtatatatacatgtacatcattttgtttcattttcttttccaaactgccaaacagtattccatggtgtgtttatactataacttacttaactgtttcctactgatgtgcatttagattagttacggttttccacaaatataaacagtgctatagtgaacaccttgagtatttctttttttttttttgagacggagtctcgttctgtctcctaggctggagttcagtggcgtaagccaccacccctggcccaccttgagtattttacgctagagacctatatatgctatacatacattttgaatatttctataggttagagaccaataaaaggcattattggactcaaaaattcacattttaaattctgatctataactacaaaattgtcatcccaaaaggccttagcattttacatgtcttctagtgtatggaagtgmctatttagttagatgcattcttactagaattatatattaaccatattttcaatgtttgccaatctgaaaaccacaaaatgataccttgctttgatttaaaaaacaacaacaacaacaacaaaaaggctggrcgcagtggctcatgcctgtaatcccagcactttgggaggcagaggcgggcggatcacctgaggtcaggagttcaagaccagcctggccaacatggtgaaaccccatctctgctaaaaatacaaaaattagacaggcgtggtggcacgtgcctggagtctcagctactcgggaggctgaggcaggagaatcgcttgaacccaggaggtggaggttgcagtgagccgagatcgcgccattgcactccaacctgggggacaagagtgagactttgtctcaaaaaaaaaaagaaaatcacaactttttgttagtgaggttgaacattatacattttgtttatttggcattttaatttcttctgtgaatggcttgttttctcattcttgcttttggtcatgtatcaggaaggagtctttcagttgcaaataacagaaaattcaaatcaaattggcttcttaaaggggatttattagtccgggcgtggtggctcacgcctgtaatcctagcactttgggaggctcaggagttcgagaccagcctgatcaacacggtgaaatcctgtctctactaaaataaaaaaaattagcctggtatggtggtgtgcgcctgtagtcccagttactcgggaggctgaggcaggagaattgcttgaacccaggaggcagaggttgcagtgagccaagatcgcgccgctgtactccagcctgggcgacagagtgagactccgtctcaaaaaaataaataaataaataaaggagatttattggctcacagaactgaaaagcacaatgagaggttgggtttcagatgggattcggccaggactcttctttttccagaattctcagctccgtactcttctgcttgtttggtgttagctctatcttagcctagctttgttaatgtttgcaaattgctgtagccatgccaggcctcagaaggaaagatttgtgttccagaattataggcagaagacttgagtgttaaactgatgaaaccatccacaaatcaataccagtggtcaaggcaatgccgtgcatggttgtttgaggccttggtacctgaatcaatgatcttggcagagagaatgagattattctgattggtttaaaccctggagttgggctggattcaatcccatgtaagccacatacagcagctacatttgggtggaatggatattagagtacaaactacagattccatgatagattgtttctgtttttctttttctttctttttttggagatggagtctcgctctgtcgcccaggctggagtgcaatagtatgatcttggctcactgcaacctccgcctcccgggttcaagcgattttcctgcctcagttcccaagtagctggcttacaggcatgtgccaccaggcctggctaattttgtatttttattagagatgggctttctctatgttggtcaggctggtcttgaactcccaacctcaggtgatccacctgcctgggcgtcccaaaatgctgggattataggcatgagccactgcgcctggccttatttttcttataatttgtacaagttctttatggattatgggtatcaacccttttctgttttacatgttacaaatattttctctgaatctatttgccttttaacttgattttagtatattttactatgtgtatattttgaatgtttatatgatcagatctattagttattattttctgttgtacttctgggttttgtgccatatgttgaaatcccttctccatctaagtgataaaaatattctctgaggctggatatggtggctcatgcttgtaatcccagcatgttgggaggccgaggtaggaggattacttgaggctaggagtttgagactagcctgtctctaaagtttttttttttttttttaattagccaggcatggtggcatgtgcctgtagtctaagctactcaggaggctgaagcaggaggatcccttgagcccaggagttccagattgcagtgacctatgatcataccactgcactacagcttgggcaacagagcgagaccctgtctctaaaaaatacatacacgtgtgtgtatgtatatattatattctccgatgttttcctctagtacttttatagttagaatatatatatttaaaatatatacatttaaatatttaatctgtctggcatttatttgtgctttcgctgtgagctgcgaacctaaaattttttccaaatgtttagccattttcccagtgaattcatggaataatttctttctctcagctaactcaagtgttatatttattatacactaaattcttacatacatgggtctgcttctgaactgctacatcctgttttgttgatcagtgtcgtttattcctgtgctaaagctgctctgttttaattattggttctttctagaaagtgttttgtttgtttttttttgagacaggatcttactctgttgcccaggcttgagtacagtagcgtgatcatggctcactgcagcctcgaactcctggctcgggtgctcctcccacctcagcctcttgagtagctgcgactacaggcacatgccaccatgcccagctagttttttgtattttttgtaaagacagggtctcactaggttgcccaggctggtctcaaactcctgggctcaagtgatcctcccacctcggcctcccaaagtgctgggattacaggtgtgagcctctgtgcctggcctagaaagttttgttatctgttgcaacaaggttcccccttttgtttttcaacattttcttgacaattttcatgaattttatttcaagatgaaccttacgtaagggaacttgtagcccagacccttgtggcattgtaagtagcttctgagtggtgcctctctcatgggcctctttgtgtttctctggccagagtcctttgaatatccctaggctggtgatcctaaagcttgggcttctccatctctttccaatccacatgtttggaacatgttttgtwtttttcttttcggaagctataggacctccttcttttagtctctaaagacccaagagaagttaaaccttaaagcttttgtattatctatttctgtgtagccaattaccgccaaatgtagcagtttaaaacaatacatgtttaccatctcatagtttctgaaggtcaggaatcaagggcactttagctgggttgctctgagtttcccataaggtggctgtcagaatgttggcagggctggagtcagctgaaagcttgcctgcgctagaggctccgcttccaagctcactcacatggctgttggcaagaggcatcagttcctcaccacaggagcctcttcataaggctgctcaggacatgccacctggcttctctcatagtgggtgagctgagagagagaccacgacagatgctgcagtatctcttatagcctatctcagaagtggcataccattacttgtaacatactttttggtttatacattctgtgatatggagagggaggcagctagacaaggatgtgaataccaagaggtagagattattggggggcaacttggaggctggctaccaaagtctttgttggtaaatcttgtgggatttttttggttttgattttttgttgttgttgttaaaacatgcttcaaaattaagaaattataaaaggtgtgtgatgacaagtcttccacccctgacccctagttacccagttccctttcttccagccaacaattatttttaacatctttattatacttccagggggattttatactgatacaaggaaatgtacataatatttttcctcttttaacatgaatgatagcatgctgtacagctattttgcaccttgctttcttcacttaatgatacagcttaaaatggttccgaattggtgcataatcatttccttaccttttacagctgcatagtatttcacaggggtgttgtagcatggtttacttacccattttcctattttttggttattctaatttttgactattacagtaacaatatggattatgtcctgtgtgtgagtaatatccatgaagtcagttcatggaagtggaattgctggttcaaacattagtttcagttatagttttcatggataattaccaaattgccctccccatggactgtgccagttctcttggcagcagtatatgagaatatctatttgcacatactcttacctacacagagtatatatcaaacctttgaatctttgctactttgagagacaattatatctgtggttttaatttgaattcttcttatgagtgaaattgaacatcttttcatatacttaagaaccatttgtatttccttttctgtggtctgttcatattctgtgcctatttgtctgctagtgttttccttagtaatctgtaggaactcattgttagaaatttagtcttttttggaggggtgggggaaagttgttaatatattttacatattttttaacatatagggttattatatgttttacttttttattgttttgaaacaatacagtatcaaactttgaaaaagttgcaagtgcagtactacaaactttttttagtagcagttgagattaagttgctgacatgatgcttcaccatccctatttagtgtatattcccttcagatacaaacattccacaaagccttctacataatcatagtacagccttcagaatcgtgaaactaatactaatggttttattatcacgcctagcagtctctctgcttctttgaccctaaaggagaggagcacacactctagaggtagacttcctaggttcaaattccagctctgggcctggtgcggtagctcacgcctgtaatcccagcactttgggaggccaaggcgatggatcacctgaggtcaggagttcgacaccagcctggccaacatggcaaaaccccatgtctactaaaaatacraaaaattagccgggtgtggtggcacgtgcctgtaatcccagctactcgggaggctgaggcaggagaatcgactgaacctgggaggcaaagattgcagtgaaccgagattgcaccactgtactccagcctgggcaacaagagcaaaactccatctcaaaaaaaaaaaaaaataaataaataaataaataaataaataaataaaaattccagctctgccactcactagttgtaggtcttttggcaagtcactcaatcctactatgcctcaatttccttatctcttacaaaggatgtaataatcatgcctcctttgtaggtcattgtgaagattagatggttaatgcttagaatagtggttgctgcaatgtgaaaaccatgttggtgttcctatcataataatattattggatgaagaatagttgataagattaagttttaatgttttctagtagccatggatgaggttatcagagttcatagactacaatgtaaactacaaattgttcagctaatccaggatatacttttgttcttctctttttagattccagaatgactactatcttgacttacccctttaaaaatcttcccactgcatcaaaatgggccctcagattttgtaagtttattattatttttttatttttagagattggatttggatttataaacatctygcacagatactgaatggtattgctttttgtaaacagtttattttgtcttccagccataagacctctgagctgttcctcccagctacgagctgccccaggtacagtaatttgtaaaataaatatttctgatttaaatgttagattccagattctatagtttgtgaactctgaataaaaaccaaaactaatttgctaattctcccctttttatgagcacatgaacatctctgttgccttcaaattaaaaaattataggtccaatcaataatgatactacattatttaggattaggcttgaggatgttaatgggaggctgttttctgggatttgaacctgctggagtcatggaggttccataaacctcgttggtcagtttatttatcctcttgctgtccgtcctggagrtgaatggcatacaaatgctcttgagacctgctatggaaccaaaagttaactttaaatttgcaatttgtgaaatgcttctctattgatgaatatcttcttctcccatgtgcaagagggcccattcctgaaatagaagtgattaggaactagttaataacagaaagttgtttagttaatatgaaatgaaagagtaaggaaatgtgttgattttatatggtcatttacacccttagtaaacccaatgaattaggcttctttactgcagatttttgtagaatctgctgtaggtttttatcttcactggctagtgctaaaaacaccctgacaaattcttaacatttttctccttgcctagattctgtattgacccatgcctttgattttggttttattatggtatttctacctgtataataatagaaaaaataccttccaggctgggtgcgggggctcacgcctgtaatcccagcactttgggaggctgaggcaggtggatggcctgaggtcaggagtttgagaccagcttggtcaacatggcgaaaccccatctctactaaaaatacaaaaattagctgggcatggtggcatacgcctgtagtcccagctacttgggaggctgagacacgagaatctttgaacccaggaggcggagcttgcagtgagccgaggtcacaccactgcactccagcctgggtgacagagcgagactccggctcaaaaaaaaaaaaaaaagaaagaaagaaaaaatcctgggatttggttcccaggattcagaagacctgtactctcttccagctctacctctttctgggcagtgtggccttgaactggtcactttacttccctgtgcttggtttcttcatctaaaaaaggaatatataataagtctagtcttgtcagcctcatatagttatgagatatctcaaagcactttaaaaactataaattcactgtaagtgcaagatggtatttttctattattgcctaatcccaactagagaagtttcatattgtcatataacaaatatatttcctgtggcctttacattctaactagaatataggtttgtagtagccccataaataattcctgtctgtcttgttttgccttttccctaattctaatgttgacccaggtctttgctttgcaaagtcacacaaatagacctgatccttgccaagtgggagaaggtcattctgaataccagcagaggaaaccaagtatctggtgtttaaactattccttatattgctctgtaactgtttctgatgtttgtgtctccccaactgtattgtaagccctgtgagtctttagctttttggtatccccagtgtataacatggtgttccgcaaatataacagtgtcccacaagtaacttgcattaacgctgatgatgatagtggtaccagaaggcacgtgataaaacaatgggaagtggccagctgatttgagggaggaagcaggcatgtgcctgtgctgagcaggttttaggttgcagtaattttttttttgttttaactggcattctggtttgaagattgcagtaattttataactaattcctcttgaagcttgtgtgaatatctcttcttgacagagctgttaggatgaaggaattaaaatagaggggtacagaatttatggatgtttttagtcatctgatggactggaaatgtaagtgtctgatggaaattttgactgatttgatggttatgtctatgtatagatgtctttctctctgtgtatatatatatatatatacacacacacgtgtataatagttgtataatacatgacacatttattatcttctttgattttaattgtttttaaagagtatacaatgtatatcagtcagccattgaattgtaggttttggagttggttagagcctttgaggtcatctagttcagctctaatatttgcaaataagaaaatcgtggcagagtaggcctacaacccagatattttagctctcaattcagattcttataattcattactgctgtgtgcccagagcactgtagaatatataaaatggagctgtattgtcttgagaaaattttgatgtgcttaggagccagtgtgcacatgaagcagaatgagagtccttaggtgactattgaatacataattggccattattagaaaggggtcatatggtagttttctgctgtggcctcaatcagtcctctcgtaaatgtgctagtggctctgttttctctaatgctttttcttatttatttataagtgttgaaagtaatgggttcatgtacctgattgccttgttgatcttgcgtcactgggaaggctaagagctccccttctttttttttttttttctttttttttgagacagagtctcgtgctgtcrcccaggctggagtgcagtggcacagtctcggctcactgcaagctctgcctcccaggttcatgccattctcctgcctcagcctcttgagtagctgggactacaggtgcccgccaacacacctggctaattttttgtacttttagtagagatggggtgtcaccgtgttagccaggatggtctcgatctcctgacctcgtgatctgcccacctcggcctcccaaagtgctgggattacaggcatgagccaccacacccggccaagagctccccttctaatgctgcttgcctaagacagggtcccataactgtagtatatccattgtcttcttcccagtttattgggggagggggctcaggaaaaacctctgtctcctctgtggcacctttacccagtaacggyggggctgagggaggaggaggtggtaaggtaggtgatggttcctcttcgcttctctttttaggctcttctgtgtagagcagggccaaagcagccctaactaaggcccacaacgttaaagatgttactgggacctgttgcccttgtgcatgatgtcatttaagatttcttcccacttgtggctgggcgtgatggctcacacctgtaatcccagcactttgggaggctgaggcaggcggatcacgaggtcaagagatggagaccatcctggcaaacacagtgaaaccctgtctctactaaaaatacaaaaaattagccgggcgtggtggcgggcgcctgtaatcccagctacttgggaggctgaggcagaagcatggtgtgaaccctggaggcagagcttgcagtgagccgagatcgtgccactgtactctagcctggggacagagcaagactctgtctcaaaaaaaaaaagatttcttccaacttgttcccagaactctaggtctagtgtgccttcttctgggaaccgtgggttatggaaaacaacagtttgcattaggtcccttaactgagcctccgaaacggaggctgtgctagcttcaagcagctgtttcaatacttttatgtactgttgctgttgagctgataactcaagtcccattgttacgggtgggcctttgttcttagagctcccaagatggggcaggcggctcccaagatggcggcaagcctttttttctctgacctgaggctcttggcctcatggattccaaggaatggaaccttgggccatgcagtgagtgttatagctctattagaagccatgggtcatggaagagaatcgtggaacccagcgactagcgttgagctcgattaggacgaacctgggcacttggccgcacagaaacaatggcgagcctctagcccaaacaggaatggcactgggtgcctcgctggatcagaaacgcagcggacaccctgccagatccgaggggtggaagtcaacagcgggtctgcgacggtggcgaacagcrggtctgtgacagtggcgaacagcagtggtggaaggtgagcaaaagctcagctcgagccagaacaaacatggaccagaagagtgtgcagttgcaagatttaataaagtgaaaacagagctgctatacaagggtaggggatccaaagggggttgcccctccttgctcaaatgcctggggtttatatcccaatcattgtcgctccccctgtgctctcagatgatagatgatttgagtatttctttacctcctgcttttaacctaattgatattttagtgagccttctttaccacctgattggtcgagtgtgagctgagttacaagccccgtgtttaaaggtgggtgcagtcaccttccccagctaggcttaggaattcttagtcggcctaggaaatccagctagtcctgcctctcaccatgatgaaaccctctcaccatgatgaaaccctagcttgaacatcatgtcccatgatgaaaccctagcttgaaaatcccctcgaasttggaaatcctgagtgggcaccaattacttactgcacggtcacttcactttcattttcaagggttctgtcgtgatccattgcagcatgtctcacacggggcaccacctgccgggtctgtcccacagaccctggctgactgacagatgaaatgagtactcagacacaggtatgcagtgtaagagcagctaggggtctgcctggctctagtggccaaagtgcagcagccctgagaagctggagctccttgcttttattcagtgtaggcacagtgatgaaagcctggagcaaacacaatctgtgggtaattaacgtttatttctccccttccaggaacgtcttgcatggatgatcaaagatcagctcctggtcaacataaataagctagtttaagatacgttccsctacactcccttgtacctactccttgccctctgcctcagggttatagaacagctgccttcagctattctcccccagggctctgcagaaccttctgaccttttagaaggcctgcatctttmcctatagtttctcccaccactccgactgatctcctacatataataatgaatattttttaaatgtgccttgtagagttagtttaattactttataatatgctaaattatttggaatggccagtgtgccctagaggttgcccagaggtttagaggcaggaatcatcagtaactgtagttatcagggaaggctttactaggaggtagaatgtgaacgaggcccaagagacaggtaagaattcgatgggcaaaaaaggggccaggcagatgggaggtccataagtaaaggcaaggaggctgacctgagcaaagctgtaaaggactgggggctggctcatcttgttctattttgagaagtagtggaaaatacttaaggtggaaccgagtaaaacaagctatttgttagaagagttaagaatttgaattttatctgaaagtatataaaaggaatatatggtcagttttttctggttttttttttttttttttgaggcagagtcttgctctgtcacccaggctggagtgcagtggcatgatctcagcttacggcaacctccacctcctgtgttcaagccattctcctgcctcagcctccccagtagctgggattataggagcgtaccaccgtgcccagctaatttttgtatttttagtagagacggggtttcaccatgttggccaggctggtcttgaactcctgacctcaaatgatctgcctgcctcagcctcccaaagcggtgagattacagcgtgagccagcacgcctggcttggttagtttttaaaatgtggaatgacatgatggtgtaccattcgacctgtcacctgcaaggtcagtcatgaatagtgtgcaaatcttcaaatttagtgacctgttttctgtctgctcaaataaggattttccttgaggaccgatgcatttaaccatcttgttctccttgacactctcctgcctttgatcttgtgtactgttctctcttgattctcctactacctctcaagttactgtttgtctcacatattccctcagccttctcattgtagggacatcacaaagctaagggttttttggtgtagtaatggaccctcaagttaaggatgagaaggtttgtgtgtactacagctggaaaggtgttaggaaccaagcaagcagctctaggggccagctactttgtctcacacaccacatggtatgtccctttcctggtctttctgcttctatcattcttcattctggctggcttatttgctcacttatggtttacaaactctggcttacgaatgacatcagtttaccatcaacctgttcttcctcatggcatctttttagcttcaactaattggcatttctttccatgcttctttgcctagagagagaatctgaccaacacagttgatcacttgtaggtagatgacactggtttctggttggctcctatatggatggatcattggtgagtccagtacctactctgaatctaatcagcttttatattgacttagggatgtgtctatggcttcccctttggcagggactgtaagcagggcaactccctttagaggggcctgtgggatgtccaaaacaacaacaacacaacaaataccccccccccatccagacaaacaaaaaaagtatcttttattgttaaagaggaaataggaaatttaaaaataaaagaaatagagggggctgtgggagaacaggcattgcagaatacatctctgctttccttctgtattctaagcttcaatatttcatgactttctaatctacactcatttctcttcagaggttttgctttgcatcttctagctaactgtggaattaacatatccacctggttgtctctctgtcacctcaaagttagcgagtttaaaaatgaggccaggcgcagtgccttatgccggtaatcccaacactttgggaagccaaggctggcggatcacttgaggtcaggagttcaagaccagcctggcaaacaaggtaaaaccccatctttactaaaaatataaaaactagccaggtgtggtgtcgtgtgcctgtaatcccaactgcttgggaggctgaggcaggagaattgcttgaacctgggaagtggaggttgcagttagccgagatcgtgccacagcactccagccttggcgacagagcaaggcatcatctcaaaaaaaaaaaaattaagtccccttttttttccaaaaccagttctcactttgtttcgggtagctaggtattcttagtctctaagattcctttataatcctgttttcctctttcctttctttctatatctgattggttgccaacataccttgttttcttttataaacttcctctttactcatgttgatactgcctttatcctggccttttgtgccacatgcttgggtttgccacagtctctttgcttacctccttgttgcctttatctccttcaccagcagcacttctccatgaatgctgccagcgtcatctttatgccctattttatcatgactattaactctcactaatatttctttaaagttggttgtagatgtttactataaatacttctctgtgacattaacaggtgtggtaaggtcgttgttgacattgtattcccaataatttaggatttttttctatctttgataaggaataatgatagagtaggtaaattccaacattaacaaaaacaagaaaataatgaactagattttgatatactaacatggaatgttcttcgagctatattgttaagccaataaaatatacataatatacaagtatatgcatgtaagtgcactaaaagaaacgatttgaaagtatatacaccaaataaacagactttacctcttagaagaaaatagtgtggtaggcgaaggcataaagagggaactttagtttttactctccatagttcagtattatttactttttaaaaaaaaccataggcacacatttatattttattctttaatttaagaaacctaaaggaagtttgcttttttgagattaaaaagtatttaggcatgtagatttttgcagaatagcaagtcaccaaccaagtgccccttatttccacgtagaaaaggtaagaacatcaagctatgtgaagagtgaacaatatcaatcattgcaacttctaatattaagggtagatttgcgtgtaaatttggttacttctaatgaaataggttgtcaaacacttagtaaaaatgaactattttgttaatggcataaattccctcatcattggatataagctttgtttatcttaaatattatttagaaacttacaaatgctagtcaatttcttagcctttttttaaaaaaaaattaaagtggtttagtaaatggcaaatgcaagttggcattaatgatgtaataattcttagaatgactatcttaaaaaatgtaaaagtaggccaggcacggtagctcacatctgtaatcccagcagtttgggaggctgaggcgggcagatcacctgaggtcaggagtttgagaccagtctggccaacatggtgaaaccccatctctacaaaaatacaaaaattagctgggcatgatggcaggtgcctgtaatcccagctactcaggaggttgaggcaggagaattgcttgaatccgggaggcagaggttgcagtgagccgagatcacgccattgcactccagcctgggtgacagagcgagactccatcttaaaaaaaaaaaaaaaaagtaaaagtcatcagactttatatattttaattagtagtttttgtttttaaactttatcttaaagctgtccagaccaaaacgaagaagacgttagccaaacccaatataaggaatgttgtggtggtggatggtgttcgcactccatttttgctgtctggcacttcgtaagtatgacatgatcatattatttttttccttcttttaagacactttcaaaagtagtctttgtaaatgtaacccagtaggtaataatattgttagtggactaatatttggatagcagtcccatgaaattaatatagaataagtcaagacagtggtgaaataatatggcaacatttgttttttatccttctcatgaataagtctagcgtagttttacttgaaacagctctattttgaaaacctagaggtccagatagcttgcttccaacagagctgtcctttccttttctggagacaagtacattgtccctgtttctcctcagaagtttgagtgctgaagatgtgggccatgggcattctgaagggcctatataatccactggtttggcctcctggaaattattaaaattggagttgatagggctggtccaaacccccagcatagcacaaccccaagtgtgtgggaccagaatggtcctagaccagctccagaattccctagatccaaattgctcttctccttggccttttgtgcttcttttctgtccccgagtraaggttagtctatccaaaagctgataatggactttgataacaaggtttaaactgttcattctattctgtttagattgttttaatgtttatattttgaataggtagttgccagctttaaaaaaatgctgcggaatgttaggcatctgttaaaaagaatgagacctatctttatatactaatatggaagacctaagatcttgaagatatgttaagtataaaaagcaaggttcaggctgggtgcagtggctcacacctgtaatcccagcactttgggaggccaaggcaagaggattacttgagcccaggagttcaagaccagcctgggtaacatagcaagaccttgtctctgcagaaaataaaaaatattagctgggcatggtggtacatacctgtagtcccagctactcaggaggctgaggtgggaggatcacttgagcctgggaggtcaaggctgcagtgagccgtgatcatgctactacctatactccagcctgggtgacagagcaagactccatctcaaaaaaaaaaaaaaaaaaargcaaggtgcacagtattgtgtatagtgtgcaatgacttatgaaagatacacatgtgtgtgtgtgtatgtgtgtatacacacacaacaaaggttcatttttaaacagatggtttgggacctacaaatatattttcttacagaagtaatgctatatgttggccaggcacgtggctcatgcctgtaatcccagcactttggaaggctaaggtgggtggatcacttgaggccaggagttcatggcaaaaccctgtctctactaaatacaaaaattagctgggtgtagtggtatgcacctctagtcccagctactcgagacactaaggcatgagaatctcatgaacccaagaggtggaggttgcagtgagccaagatcatgccactgtactccagcctgggcaacacagcgagaccctgtttcaaaaaaaaaaaaaaagaagaagaagtaatgctataagtaaatggtagtgacgtttctttattcatcctattttatcaatatagtaatccacttaacgatgtttctataatctctttcctgtactgacacaacagtaaaagtaagaatcagaaggctttagcagcaggaagaagatgatgtcctccttttactcagcagcaataaaatagaaaaagttccatcaagacatgaaagttcttggctaggaagactttttttgtaaggatcattatatattatgtaggtgtttgatactgttttactagctgttaaaaaatacaaacaggccaggttcagtggctcacacctgtaatcccaacactttgggaggccaaggcaggtggatcacctgaggttaggagtttgagaccagcccggccaatatggcaaaaccccatctctactaaaaatacaaaaattagctaggtgtggtggtgcatgcctgtagtcccagctacttgggaggctgaggcaggagaatcacttgaacctgggaggtggaggttgtgatgagctgagattgtgccactgtactccagcctgggtgacagagcaaaactccatctcaaaacaacaacaacaacaacaacaacaaaacacccaaacatactcaactgtttcatttacttttattaaacatttgatgattagtatttgcatgaagtttaatttgaggtatttaccaaattggcatagggttgttcctttctttgttgtgtattgtgttttagtttaattcaggattctggttcatgagcaatctagtggtacagagaagagaaaaacattgagtaatgtaagaaatgatagtgaatagggaagaaagaatcaaaagtattttaaggcaatattcatgtaaagaacaaaagtcactaaaaaataacattagaggccaggtgcagtggctcacacctataattccagcgctttgggaggcggaggcgggaggatcattcaaggccaggagtttgagactggcttgagcaacatatgagcaacataactagacacctatccccaacgcctcctcaccccctacctcccagtcctatctctacaaaaaaaagaaaaaaaaaaaggtgttttaattagccaggcatggtggtgcatgcccctagtcctagctacttgggaggctggggcgggaggattgcttaagcctaggagtttgaggctgcagtgggctatgaacgtatatgagctatgctattgcacttcaacctgggtgacagagccagaccttgtctcttaaaaaaaaattaataataataacatagagggaaaatgtataaggacaacaatttttacattattgatgttaggattgaagtaccaaatgagtcttctgtaatagaagatcattttctaagtggaaaaagtctttttctgtttaatttgcagaaacgttgctttcaacttgagtgttatttggaaggccaggttcttatgggtaggggcatttgggaagcactcccgggaatagactctagcagtggaattcagaagtctgtcaatcattcaggtagaggagtgtgagagtatgagaataaagattgtaaatgataagttggctgggcgcagtggctcacgtctgtaatcccagcactttgggaggctgaggcgggcggatcacctgaggtcaggtgtttgagaccagcctggccaacatggcgagacccyatctctactaaaaatacaaaaattagccaggcatggtggcgtgcrcctgtaatcccagctacttgggaggctgaggtgggagactatcttgagcccaggaagcacgttgcaccactgcactccagccctccagccttggtgatggagtgagacwctctctctcaaaaaaaaaaaaaaaaaaaaaaaggattgtaaatgataaataatttatggcttaggcattttcaaattgacacatgacttttccccaaataattctgtcctaaatttgaggaaactggatttacctatgaaaaatttggaaaactactcatggttctcctgtgattctgagtgaaaatgacagtaaaaatattttggagtttttaagttttaattttcagggacttgaagaatgaatcttcttatttaatccaatgattaaatctctgacttaaaaataaagagaatttatttttgatctttaaacaaacaaacaaataaatagagttcatacccagatcttggtttctaaatagcagtcttcaatacaaagaaccagagctcctttgaagaatgattagggctgagccagagaaaagacaggatgagcaaggagaacttgtagtgccggaaagcaaagaagtacttaaaaaaaagaggggttcagggggtcatgtcaaaaagacacaggtctgacctgcaggagctaccggtcaccaaaactgcaatgatttgagcaataaaataaattgcaatagtattggaacataacccaaagaataaaacaaatgcctacgagtctaatctgatataaataagtgaataaataaatacacattgggaggccaaggtgaatggatcgcttgaggtcaggagttcgagaccagcctggccaacatggtgaaaccccttctctactaaaaatacaaaaattagctggatttggtggcaggcgcctataatcccagctactcaggaggctgaggcaggagaatcgattgaacccgggaggcagaggttgcggtgagccgacatcgtgccactgcactccakcctgggcaacagagtgagactctgtctcaaaaaaaaaaaaaaaaaagagtaaataaatgagaaagaatgaacaagtcttccttacagaagaattttgattaataaatataggaggactgtgtacagtggttcacacatgtaatcccagcactttgggaggctgaggtaggaggattgcttgaggccaggagttcgagaccggcatggacaaagtgagactccatctctgcaaaaactaaaaatgaaaaattagctgggtgtggtagcagacaccggtagtcctacctacaagggaggccgaagtgggaagattgcttgagcccatgagtttgaggctgcagtgacctgtgattgcaccactgcattccagtctgagtgacagagtgagaccctatctcaaaaaataaaaataaataaagaatgagaaaaataaccattagaataccacataatacttgctgcgagatctacaaatgaatgctaaaattaggtgaaatgctaagaagaaacagaatatttgcatagtctcagagaatctcccccaaaatatttaycaattactatgatgatttcgacatacgtccgcaaagtctgtgttattcctgccactggaaggtggaacttaattctcccctcagaatgtgggctagacttagtgactcacttctaacaaattgagataagaaaggaaaaaatagtaactttatagtggagtaaactggcagacatcacttgacccaaatcatcactttaacatcactggtagtaagtcatgttgatrtcatgtgccccctgatacgaagctaagagaaatacagtttacctctgtgatattcttcccctaaatccataaccccagtcttcaaaagtgtcaaggtcatgaaagacaaggaagactgagaaactgtcacaaattggaggagactgaggaggcatgacaactaaatgcaacatggtatcttggattgaatcttggaacagaaaaaggacattagtggaacaactggtgagactcagataggtagtagcttagtgaatagtattgtgccaatgttcatttcttagttttaataagtatatcatggttatgtaagatgtcagtattagaaaaagcaggggaaggctgggcgcggtgactcacgtctgtaatcccagcactttgggaggccaaggcgggcaaatcacctgaggtcaggagttcaggaccagcgtggccaacatggtgaaatcccatctctactaaaaatacaaaaaaatcagctgggcgtggtggtgggtgcccgtaatcccagctattcgggaagctgaggcaggagaattgcttgaaccctggaggtggaggttgcagtgagctgagattgcgccattgcacttcagcctgggcaacaagagcgaacctccgtcttaaaaaaaaaaaaaaaacagcagggggaaagaggaactctgctctctttttccaattcttatttatgtatttacacagggtcttgctctgctgcccagactggagtgcagtggtgtgatcctagcagcctcaaattcatggccttaagcagtcttctcacctcagcctcccaagtagctaggactacagatccatgccaccacgcctggctaatttttaatattttttgtaagagacaaggtcttgcttgctctgttacccaggctggtcttgaactcctggcctcaagtagtcatatcacctcagcctcccaaaatgttgggattctaggtgtgagccaccatgctcggcctctttccaattctttggtaaatctcaagttacttaaaagcaaaaagtttcttcaaaagtcctaatacatcacctgtagccctgtaggcattacaaaataaataaataatatacttttaaaataaaatgtttaaaggaaaagagacctcaaaggtggggcttcactttaaagaaaatttagcatatgttatactgaacattaaggtgttggacaacatttttgttcgattcttagcaagctcaggaggagttaaggcttgctagacttttaaggatgacaaatagcgaagtcacactatttcttcatttgaaatgatggactgccttggatagtaaagttaagtgtgtttgtagcagcatgtgtttgatgatctctgggtatttcaaatagaatgaaaatttttcattgaagctctagggttttggtttaaattactggttttcgttccccagatataaagacctgatgccacatgatttggctagagcagcgcttacgtaagtaaatgcagtttcatttccgttcttatttcattaaaggcactttctccagtttttacacataaaatagcaatttgttcttattttagccatctgtactatacaaatttaagcagcttatgaatattgtcaatctttattttgcaggcctaacagtgtcttagcctgacagtatactttaatgctaccttagctagccacaggactcgattgatcagcctaaacacaatacatatatttgatgattgccttaggaacttgtataagggtagctgaacagattatgtagatatttacctagaaagaagcctaaaagacacctgaagattcatgtgcaaaccaagtaaaaatgtaaaattagatgtagttaaataagattaggctggatgaataatttggttgagaatcattaaatgtgttgctgtttcataacatgtaaggcattatctcttcattttccactgacactttgcctttgtgtcttcaaccagccacagttctttcttagtttggagaaacccttcagttgacctttctgtccattctaactctatgtttgttttttttttcttcctgcaatacctcaagcatgagtgaaagagcagttgtttctgtttccttattattagtttcctctgtctaattgtataatcattatttccattttccctttgttttacagaaaccatactttagaatcttctcttaataatggttttatgattgctmaatgtactgatcctttctcagtcctctgtctctgtactttatagcacttgacactgtaagctataatcacctctcttctgttgacttcttagtaatatgcctttatgatttttctttttcttctgtatcctgactgattcttctgtagcttttttttttttttttttgagacggagtctcgctctgtcacccaggctggagtgcagtggcgtgatttcggctcactgcaagctctgcctgccgggttcacgccattctcctgcctcagcctcccgagtacctgggactacaggcgcctgccaccatgcccggctaattttttttttcttttttttttttgtatttttagtagagacggggtttcactgtgttagccaggatggtgtcgatctcctgacctcgtgatccgccctcctcggcctcccaaagtgctgggcttacaggtgtgagccactgcgcccggcccattcttctctagcttaaaaaaaaaaaactgggccaagcacggtggatcactcctgtaatcccagcactttgggaggctgaggtgggcagatcacctgaggtcgggagttcaagaccagcctgaccaacatggagaaaccccatctctactaaaaatacaaaattagctgggcgtagtagcacatgcctgtaatgccagctacttggaaggctgaggcaggagaatcccttgaacctgggaggcagaggttgcagtgagccgagatcacgccattgcactccagcctgggcaacaagagcaaaactccgtctcaaaaaataaaaataaaaaaccacacacacacacaactggatctctccctctttctctttttgaaaggtgttttgcaagtttcattccttagagctttgcatttctctgtatgcatattttcctttaaaaatctcatctactagctaggcatggtgtcttacacctataatcccagcactttaggaaaccaaggcaggaggatcaaggtaggaggatcttttgagcccaggagtttgagaccagcctaagcaacatagtaagactccatctctacaaaaaaaaattttaaaaattagccaaccaagagaattcagctcaggagttgaaggttgcagtgagctatgattccactactagactccaggcagggcaatcgagcaagactttgtctcaaaaaaaaaattttttttaaatttttaatttatttttttctgtatggagtctcactctgtccaaggctggagtgcagttgcttgatcatagctcactgcaacctcgaagcctcccaggtaactgggactataggcgtaagccaatgtttctaaccctctttttagtttttttaattgataaaaaactacagattttacagatttttatttatttatttcattgtagccaagtttagtcattactcattttgaagctcagcttattccacattttatctggcactccttcaagttggctcctgtgtgccttttgttttttagtataatgctggttgttgatatataatttgcatgcaataaagtgcacagattttaagtgtatagtttgatgagttttgacaaatgtatataccccgtgttcctgtttttgatatggtcccatttgtcttttttttttttttttgacacagagtttcgctcttgttgcgcaaattggagtgcagtggcacgatctcggctcactgcagcctccgcctcccaggttcaagcaattctcctgcctcagccttccgagtagctggaattacaggcacatgccaccagtcttggctaattttttttgtatttttagtagagacggggttttgctgtgttagccaggctggtctcgaactcctgtcctcaagtgatccgcctgcctcggcctcccaaagtgctaggattacaggcttaaaccactgtgcccggctgatatggtcccatttgtctttgagtgcttccttacttttggcacaaaaaagatggaaattcactttgtactttcttctggacctggtatcagtcatttcttaaaaaaccttttgtccttttaatggggaatggcatttagaaaccaaatctggggccgggtatagtggcttacacctataatcccagcactttgggaggccaaggctggtggatcacttgcagtcaggagtccgagaccagcctggctaacatggtgaaccctgtttctactaaaaatacaaaaataagccaggcatcatggcaggcgcttgtagccccagctactcaggaggctgaggtgagagaaccacttaaacccaggaggtggaggttgcagtgagccgagattgtgccagtacactccatccagcctgggtgaaagggcaagattcttatctcaaaaaaaaaaaaaggaaaccaagtctgggttcagggagtgctcattcctactggagtgttattgtgtctagtttctattcatgggcacaactagaatatatgtattatttcaatcatttgttgatactgatatttcaaactaaaatttaacatacccaggacttcttttttttwaattttttttaatagtcttaagggagactttgctttatctctttgattgaatatttstctctctttttcactgcaaactttggtttctactaacattaattaacattaatttataggtttcttatctattttattctattccaaattattttttattctctaacttctcattaccaattcagcatcaaatgttgacttttaaaatcactctttcattcatttcttctttgagaaggtgccaaatgcttgtcaaattaaagaaaagatacagtctctgtccttttaaattcaaggytaacctttttcaaggagcgcagtgttttgtgtgatgatctctggcactgccttgatgtgtgaaatgtttctttgctttggatttctacttccaggggtttgttgcatcggaccagtgtccctaaggaagtagttgattatatcatctttggtacagttattcaggaagtgaaaacaagcaatgtggctagagaggtgagtaaaacaaactttatgttgtttaaagagtgataggagaatcactttgaatttcaattaatagaagttactttacaaaagcctttaaaatctattsagttacatttgacctaaaatgtgattttacagcttgggtaatgtgttatttaatatgtaaaagaattctaatataaatcaaatgacatacactatattagtgtatatccatactttactgtaaatcaaataaattatttgagctggtttaggacattgtctcttgtgttaggaaaatagagatcagcaaagtgtggctgatagtatttttagtaatgttagatatcatggcttccaattaatttaaaatttcaacatgttgcagagaactaatttcataacttgacttttgttagctggaagtagccttgcttactcatttgttcccatcaactagatggcacgtaaggcagcttggctttttaaaaactatttcacaggagtttacttttgccctagttggcatagctccatgtagtgtcgattgggcaaccaagataatgacaggccttggaacttctaggatgtgtcctacaggcaaatccaaacacgtcttctgggctgtgttttcatttaaaatcgattggatgaagttggcaccaaaagcacatttcattgtactcagtattttccctagttctggtctgtgcttgccatattgttgggttcagtatcactgtcaactgagagacaagggcacatgagcaggactgaaagtatttgttctgttccacctctgtacctggcagaaatgttagaactgccaaaggcctggcatgactgaagcctacgaaactaactgtgtgctgttgaggggcaggaaggaattaacaataggaagagattttatttcccttctgaaattttttgtttttccttgaaccttgacatttctgaatgtttcaaatatgataatttcatgagtacatcaagctgctcataatacattttcaacttttatattctgaaaataacctattacttttataagagcacttaagatgtaaatagtaaatttttttgctgttttctcctcttgctcagctttttatcccatcctttcttccttctcctcctcctcaaaaaataaaaaaataaataaataaaaataaatgtttccattttctctgtaattcagttctttttttcctaaaactaaagccataatgttttcctctgaaatttttcctggaaattttacatccatttgcagatctcagctattgattgacaggaggtagattccctctgcctgccctgtactaataccagttatgttgtgctccaggtaatttttgcagcatctgcagggagagattgggttgagggggatacattatgagaatgtcactctaaagctgtattgcaacctaaaagctaacataatttccagccaaagaatttcttaggccctattgcctgtattaataatgttaatatacagtccttgcaacctaaaagctaacataattttcagccaaagagtttcttaggccctattgcctgtattaataatgttaatatacagtcctaaaaggctcctggtgttcatgaacctgactttrttgaaaggttcagcatatttccctgttctccagcttaaagacatcttcctccttttcccttagtgccctgagagctattcaaatttcaatagaagtgtgtggacaagggtcaccaatagccacctctatttaaagctccttccgtcctgagagtcatctagggccaagggcaacacaaattagaaaggcccttgtgagaatcgagccattgcaacctaagtgccccttttacacttgccctttgcagagctcttccctcctgcccccctgagatacttgcgtctctcttcctttcggattggtttacgttgagaggctgatgcacaggtgcctggcagaagttctcaacaaagcaggttgggcatttagtatcaggcctacctggaaagaccagaatgaggtcatgttgcagttacatcactaacacatttctgtttctatagattatggtaaatagcataaaagtaagtaagtataaaggtaaaaatcagttaagagacattgaatttctaattgagactttggaaacatttattttactaaattataggagagtgtgttctgaggataattaatagtttcagggaaagaatactaaaaatgaattccctataatgggatccagtatttcatagtaaatattgtgtgggtgtgtatgtgggaggaaatctggaagctttatttctaaagtaaaactttaatattataaaaataagtattttataattgcacctgtgcattaattatttacataaacaaaaatggaatcagacgttgattggtttttgacagcataatttcccccaataaatagtataataaaattatagatgtgctcatttcatgtttgactttcactgtgccattataatagaggccatttttaaaagattaataatgacctcagtttttcttaaagccgctcagatgacaaattattctctttgtatcacgtattatgccatcatcctggccacttgttagttggtctgacccttatttgttcacagactcacttgtaactcaggcaattctccagtttctttcattgagttgagcttctgtatagttggcaagttttccagttcatctttgcattgggtctgcagtgtgctatctgaagtatcagacggtcagtaagagaaaccagctggcagtgagcagaaagataggtgtaaagcagacagggtcttgagtgggaactctgtttatgaagggtcagttctttagaaatcattttcatgtttaatcacttttgctttgctgctaagctttgtgactgatcatgagacctgataacacagatagtgaggactccaccccataatatatttcatcatcattccagcaactgtctttaataggttcttttaagtatatttgaacattaaacaagttaaaatcaaattatatattgatattcttgaaggccctgagcaaaacatcgataagaaattaggtgagttaggagagtatcatagcctcgtgtctgcactagaaaccagccagcaggaattttgcatatacctgtcaattaatggcaagattaaatattagtgaaccatttctgtgatggacttcatttgattttaaatattgctctggagaatgttaaactgaaaccgtttccagatgactatgaagattagtgctcaaagcatcatttacatgatgcccttcccttatagtgatcatttcattcactctatttcctaaaggctgcccttggagctggcttctctgacaagactcctgctcacactgtcaccatggcttgtatctctgccaaccaagccatgaccacaggtatgtttaaatggaaacagacagtacatgttaattattctcctttgtcttttacttgattataaaaatgtacttttttttttttttttttttttaacacagaacctcactctgtcactcaggctggagtgcagtggtaccatcatagctcactgcaggctcaaactcttgagctcaagagatcatcctgccttaggatcccaagtagctgggtctacaggtgctccaccacacccagctaatttttaaattttttgtggagacgggatctcgccatgttgcccaggctggtcttaaacctctggcctcaagtgatccttctacctcagcctccaaagtgctgggattacaggcgtgagccaccatgctcatcccaaaaagtactcttaacagaagtaaaagattagcacagatctctatacttgtgttttttaaaaagtaaggtcaggtttaaaatttgggggttctaaccgtagttaacctctttttttgctctccatacctgaggaacattaccattggcgtggttcctctgtgaataatgtggctggctgcagcagggattatcaactggaggagtgtatctctaggaaggtacttcagcatctgaggcatgagtaaatagtttacaacctgccaggctttcaacctaggtgcttcagatatgatattttcccacaaagatatggtcttccttccttcaccactaccatacttgtaaatcattgctttagatggcacagctctttccttcactttctccttacatccttgtcatttttataaatcactgaaaaccccactaacaaactttagcaaaactgtgggatattttgtagcatcagctcttagtgtgaggaggcaaggaagcctgaaagatttagtaatcatgtgctcatctagtaacatcaaggcccaggtgggcaccccacctcatgtgtggcggggaatgatgcccgtgactgggggcgttcgccactctaggcagcatgtgaccaactcctggttagagaaacagaatactggccagtggccataaggagagagggggcctgccttacgtttcaacagctgtaatttctctgctttgcagcagaagttaacattctctttataggataaaaaatctttattaaaactaaagctgggagcatataaatatgcaagatgttctggtttggaatatgatttgttcaagagttggtccaatggatattcctagaagttgacgtccatatggcaggaatgaaacttgtttttctctaacgtgttgaatgtgtttttagtyatttaagaaaattaccttaattcttctgaaaagttgaaaactttaattacagatgttgtacaaagctgataaytgtcattcagctttttaatcaagaagcttaaattggaatggtatgttattttctgtaaaagatattcatgaagtataacctgtgccctgtaggtgttggcttgattgcttctggccagtgtgatgtgatcgtggcaggtggtgttgagttgatgtccratgtccctattcgtcactcaaggaaaatgagaaaactgatgcttgatctcaataaggccaaatctatgggccagcgactgtctttaatctctaaattccgatttaatttcctagcacctgaggtaaggcttgtgtttgcagggcatcccactgcagagatttagaattaggtatggcagtgtggactctgctatgctgtaataggtgtagattctgtagttacaggaaagggttaattacttgctcaagatggaaaaaaaagatagtggttagaaaactttaatttgtgagccctctttagagatcctctttagagatcctctgcttgtcttggacttgattgattaatggtagacaaatagattttaacttttccaaataacacagaacaatcctaggtgttagmataacaccggttaacagtgtacctgctccttggatatctcctttcccagctccctgcggtttctgagttctccaccagtgagaccatgggccactctgcagaccgactggccgctgcctttgctgtttctcggctggaacaggatgaatatgcactgcrctctcacagtctagccaagaaggcacaggatgaaggactyctttctgatgtggtacccttcaaagtaccaggtgaaatgaaatgcttcatgacacttattagggagttctgaattgctcctaaaactcaaaaacatcccgagtgatttttccataagtatgttggttctgtttccaaagtattcagcctttattcttaaatatggatgcaaattttgatttatgttgtaacaataggttaacattttttaatgtttctataagagtgtccttttaagatctgagcactaatctcagcactttgggaggctgaggcaggaggatcgcttgaggccaggagttcaagaccagcctggtcaacagcgtgagacttcatctctaattaaaaaaaaaaaaaagaaaaacagagtctccttttagatcttgctgatatattttagttcttacatacatgcctgtttttaaaattcctgaatcgtctgacttctgtatagaatagccaactgtgaatgaatgtcttaagaaaatagggtgtcctatttttagtaaagcatttagatgatttcccaattgtcttttaagactttagtttaaaatttgataatatgataattataaaacactttccttctagtgaataggtaaggtttatatttyatttgtttttgtaatttttaaagcatatttctgtggagaagatatataaggcttgtggttccatagagttaaaaaaattcatttttttaataggaaaagatacagtyaccaaagataatggcatccgtccttcctcactggagcagatggccaaactaaaacctgcattcatcaagccctacggcacagtgacagctgcaaattcttctttcttggtaactgtcaatgttatttgtatttagtagtgacttttctatttctgtactctctgtagaaaagcctaatataactttttgtgtgtgttatgaatagagggttaaaaatatagttattcattttaatgtgaaagtggagtcattaaaaaaaaaatagaatcacggttttaaggcccgagaagtcacctaatccagccaccattctgccacaaaagctcttcctttcaggcacttaaccagtcaaaaacttctattgcttatggtgggccctggaaatgaaaagaatagacaattgcaatatagtgagatgctgtgatggctgtaaggcttaggtcgaacccctgacccagatggggggacagtcagagagtcttcttggaagaggtaacacttgagcagcaaatcttgaaggaagagtaaaagccaactcaggaaggattttaaaaggcatttcrrgccgggtgcggtggctcacgcctgtaatcccagcrctttgggaggttgaggcaggcagatcacctgaggtcaggagttcgagaccagcctgagcaacatggagaaaccccgtctctactaaaaatacaaaattagccagatgtggtggcacatgcctgttaatcccggctactcgggaggctgaggcaagagaattgcttgaaccctggaggcgyggaggttgcggtgagccaagatcgcaccattgcactccagcctgcacaagagcgaaactcccatctcaaaaaaaaaaaaaaaaaaaaaaaaaaaaggcattttggacaaagggaatagcaaatgcaaaatcaaggaagtatgagagcaaggggttctttggggaaaagttaggttggagcataaggtatgaactgggaagtcgcagaagacaaggaaaagcaggcagaaagagtaacaggatacctcttccagccctgattgttagaaaactgctttacactgaccccaatattattttcctgtaagcatcatggaacaaatctaccactgtttgttttgtgttttttttttaacttatcaacatgtadcttcatatccttccatgcttttctgactcctcaattaaacatctttattgattctgctgctgcttgtaagatgtgatttctcttctcttaccaccttgggtatagtcttctggatataggccatctggtcagagtttctcttacaatgtaactctcctacctggccataaagtcttgaaaacatacgcagatgtttgacatatttgcccatggtaaatgactaattaatgcctgctcttgataggctaggggagtggaatctggagtagttccaacaggatggaacaccaccctgttaagcccaggtggtgaagagctggttaggttggtcatttgcaaaaccgaattggatgatagagccatgtggcatggactacacttgccagatctgaatccttttgattatttccagggtatgctaaaggtccaggtttatttagtgagaatcagagacacaaatcatcagaggtgacacatcacaatacatggattttggggactgcattagtgccccacattcattgcaattttgcacaatggcacattgaacctgttattaatgtaatgtctgtaaaccatttattccatatggtcacctatgtctccagactttatggacaccctattggtggctacacagtctcttcagggttgccgagttataaaaatacgacagaatgtggtagaacttattttgattttacaaattatgaagaatagtttccttttctttggaattctgaagtttttgggggagcttttcttctttgaagtatggtaaaggacgttttttcagtagtacttctttgtcctccagcttctcggttgtcatttgggaagaaatgtatggggtgtatccaaagagggaagattgtggttctaatgtcctcagctggttctcccattggtttgctcgttacagaatatataagtagaataaaatgacctgtaagccacgggcagaaagcagctgagagcccagaaaatgtaaaaataaataaataagagatatgtttattttggttcatattttgtgccacaagctaaaaactttggcttaaataagtgtttagtgtttattatgagcagttctttctttttttttttttttttttttgagacagagtctggctttgtcacccaggctggaatgcagtggcacgatctcagctcactgcaacctccgcctcccaggttcaagcaattctcctgcctcagcctcagcctcccaagtagctgggactacaggtgtgtgccaccacacctggctaagtttttctatttttagtagagatggggtttcaccgcgttagccaggatggtctcaatcacctgcctcatgatctgcccgcctcagcctcccaaagtgctgggattacaggcatacaggcatgagccaccacgcttggccatgagcatttatttctaaagttacctcttctgttgattcattttgattattatgatacttttgaacagccttctctaccctcatcctccaaaaatgagtcagcgtgtgtatgtttgaattatgatttaatgatggatacagtgaagtaagtgttgttatatagaatcactgtataagtctaatgagttaatagattcaggtacagatatataagatggctggagaaagacctccagacaggctgaagaattttaacattgtgctggttaacatttcagactgatggtgcatctgcaatgttaatcatggcggaggaaaaggctctggccatgggttataagccgaagtcatttttgagggtaaagtaaatgttcaaacaaatcatctctgatttctttattttattaccaaagctcacctctctrtttttttacctagggattttatgtatgtgtctcaggatccaaaagatcaactattacttgggtaggtagcagtttgtatccttggactataatcacaagtatttgattgcctatgttttattatactggttaataaatgattaacactggtttattatttatttgtttattacactggtttgagagtatattaagccctgagttcataattggtttatgtggtggtttttttaaaaaaaataatagtaatctggccgggcacggtggctcacgcctgtaatcccagcactttgggaggccgaggtgggcagaccacgaggtcaggagattgagaccatcctggctaacacggtgaagccctatctctactaaaaatacaaaaaattagccaggcgtggtggcgggcgcctgtagtcccagctactcgggaggttttggcaagagaatggcatgaacccgagaggcagagcttgcagtgagccaagatcacgccactgcactccagcctgggcgacagagcgagactccatctcaaaaaaataaataaataaataaaatagtagtaatcctttccattggtatatcatgttacagttttggattattttccatttttttcctataagttttacatatatatatggacacacacaacttatattctttttcattaagatagcatatgcattttttcatatggctacacaccctgctacacaatcttcctaatatagccttttataaaagcctccccatgtttagactctgttccgttccctcacaaggctgtagcctctagcctccactgtgacgttcacatcagtcaagccctttcccttgccttgctctttgaactctgttcttccagttcttcatgttattagcttgtccttatccctcactgtttatttattatcaatttctctgactctgcaacataagagtagagggcatgtctgtacagtttcactattttatctttaacatttcattaatcagtacagaaaaatcaaagaatgagtgaaaagacattagagtacctatgtaaaactcagtttggggaatatgaaggagctcttagtttaaaaattaaagttttaagatattacttattttttctttgcagaccaacatatgctactccaaaagttctagaaaaggcaggattgaccatgaatgatattgatgcttttgaatttcatgaagctttctcggtawgtaatttgaaagacacatatgaagggactatagtcataaaaaatgtcatccatatttgtgggagagagcaaggcatggtttatgatgtgagtagagcaggagtggacctgcatattttaagtactgattcacactgctgggaggggcccgaggggagggaagcaagggccacacatacagtgttggagaacataccaaattgcttctttaggaaattgccattgaaaactgatacaaagatttgttcaactttacttttttttttttttttggagacagagtcttgctctgttgccccagctggagtgtagtggcacgatctcggctcactgcaacctccgccttccaggttcaagcaattttcttgtctcagcctcccgagtagctgggacaagcaggcgcctgccaccatgcccgactaattttttttatatttttaatagagacagggtttcaccatattggtcaggctggtcttgaactcctgacctcagatgatccacccgccttggcctcccaaagtgctgggattacagatgtgagccactgtgcctggccgatttgttcaactttaaaccatacctaaagttgttaaactttcacaaaccattcctataagaaagcgtagaggaacatgaataacgaggytcttattcgattattttctcttccagggtcagattttggcaaattttaaagccatggattctgattggtttgcagaaaactacatgggtagaaaaaccaaggtgagtttctaattttaaaaaatgcgtgaattttcaaagcacgttaataattggawcttagttacctgttcttaagaatatgaagggaaagcttctctttcttttgaagaattttgtctttcattaaagatatttatttcttagtgtaaaagtagaaattcttgtatttcattaaatatatttatttcttagtttaaaaatagaaattatttagcaaaaataaaattctgtgttttttgttccttgcattctgacattagatgaaaaataaatggactcctgacttttaatattgacctagacttactttcttttgcagtaaaattatttgtaatatgtctgacgttacrtattttcctctntctctcttacttcgtagtactaagagcctagcttgattctgatcttaagtaaacttatctttacatttgtgtctttgggggagccaggttggattgcctcctttggagaagtttaataactggggtggatctctgtccctgggacacccatttggagccactggctgcaggttggtcatggctgctgccaacarattacggaaagaaggaggccagtatggcttagtggctgcgtgtgcagctggagggcaggtacgttacagtggtgtcataggaccctccagagagtcattttcttggaatgactagaatgtatgatttagtttgaaaccttcttaaagcaatatttttgatgacctgggggtggggagtggggagggataacagctgtaattctgataaaactttttgttttttgggttttttttttttttttttgagacagtcttgctctgtcacccaggttggaatgcagtggtaatatcttagctcactgcaacctccacttcccggattcaggtgattctcgtgcctcagcctcccgagcagttgagattacaggtgtgcaccaccatgtccagttaatttttgtatttttagtagagacagagtttcgccatgttggccaggctagtctcgaattgccgacttcaagtgatccaccctccttggcctcccaaagtgctgtgattacaggcatgagccaccatgccctgccataattctgataattctttggaaggaaacagctatttaaacccaagctatttttccccaatataatgtttattttttacttataaatatatgctgattatgaaaattgtggaatatatgaaaagtatatagaaaaagttagaatcatctataatctccccatcagacattaacattattaacatcttgatatattttcttctttaataattaacttttatttatctagtcaccataagactttataaaatctctccaagagagaaactatctttctagagaactgaattataccttaactggggagttaatttacttctggataacttactgctgttcagctggggaaatatattgttgacagattttttcctttctacttcacttgcattagagacccaacttcctgactgctgtagcatctcactctaggaataaaatccaaaaggaagattgtagtttgttttttgtttgtttgttttttgagacagagtctcactctgtcccccaggctggagtgcagtggtgccacctcggctcactgcaacctctgcctcgcgagttcaagcgattctcctgtctcagcctcctgagtagctgggattacaggtgctcaccaccaagcccgggcaattttttttgtatttttagtagagacggggtttcaccgtattggccaggccggtctcgaactcctgacctcaggtgatccgcctacctcagcctcccaaagtgctgggattacaggcatgagccactgtgcctggcctgtttttgttttttttttttttttttaatcccgatgtgaacagattttctcttcctctagattacagaaacttcctgttcctgatcaaaatgaataaatatttaaaagcataaactggccgggtgcagtggctcacgcctgtaatcccaacactttgggaggttgaggcgggtaggtcacttgaggtcaggagttcgagaccagcctggccaacatggtgaaaccttgtctctactaaaattataaaaactagcctagtgtggtggtgtgcgcctgtaattccagctactcaggaggctgaggcaggggaatcgcttgaacccgggaggtggaggttgcagtgagccgagatggcgccattgcactccagcctggtgacagagagagactctgtctcaaaaataaagtaaatgaaataaatcttacgtttaaaagccctttttcatggattttcctcagagactttgcagaaaccaaggggtcagttatttatcagttggaacattttggactttatgatcacaaatgctttttaatctgtgtaacttcatctacagaaaaccatggtccattaagactagagcgatccctctatctcttcatgccaggcttctaccagggagataacctgtacacattactcacgagcatagtgcgtaatccacatagggtaatgtctgcagatttgagtatgtgttccctaattctttatctagcatgtagagtataaataacacaatactggatgcttttatggatgaacaaggaataatacctagcacctttcttctagaagtttatagtatgaagagagaagataagatgcatctgagaaactagattaaacttgacattgtttgatcaagagccacgtgagcaataccaacatggttggagacagaggagaaatccatcgtggtgaatctagagcagggtttctcaactttggcactaacattttgggccaaacaattctttgttttggggggctgtgtgttgtagggtgtttagcatggcctctacccatcggatagcagtagcaacaagctcctccccacctctgccccaggtacacacggttggtataaccaaaagtatctccaggtgttgccaaatctgatctagagcaagaaaaaacatggaacatgaaaacagtgtgtttaaaataaagccagagagggctgggtgcggtagcttatgcctgtgatcgcagcattttgggaggctaaggcagctgggtggcttgaacgcaggaattcgagactagcctgggcaacatggcaaaacctcgtctctaccaaaaatacaaaaattagccaggtatgatggtacgcacctgtggtcccagttactcaggagggaggtgagaggattgcttgagcccrggatgttgaggctgtagtgcgctgtattcacgccactgcactttagcctaggtgacagagttgccttgtctcaaaaagcaaataaagaaattaaaataaataaaaaataaaataagcaagccagagaggagtagtctaccttattatgaattctttcaggacaacccccaagtcagtcaaaccttcctatccctgctctttttttgtctgcttgtgccttttcaatgtacttaacatgccaggtgtggtagctcatgcctgtaatcctagcactttgggaggctgaggtgggcagattgcttgagctcaggagttcgagaccatcctggacaacatggcaaaaccccatctctactaaaaatacaaaaactagctgggcgtggtggtgggtgcctgtagtcccagctactcgggaggctgaggtggaagtatcacctgagcccgggaggttgaggctgcagtgagccgtgttcaggccactgcactccagcctgggtgacagagggaggccctgtttcaaaaaaaacagaaaaaccaagtacttaacagtttgttttgaactccagtgtatacttgattgaggacaaagaccatgtggcaaatctttaaacctgcagtgttcaacttggcactttgtaaataatagtttcttttatttacttttttgttttttagagggtgtctaaaaattctatgctaggatttagactcatctaaactaaggacatagctagtacatagcactgtgcatagtgctggataaaagatattctacttctggccgggcacagtggctcatgcctgtaatccagcactttgggaggccgaggcaggcagatcacgaggtcaggatatcgagaccatcctggctaacacggtgaaaccccatctctactaaaaatacaaaaaattagccggacgtggtggcgggcgcctgtagtcccagctactcgggaggctgaggcaggagaatggcgtgaacccgggaggcggagcttgcagtgagctgagatcgcgtcactgtactccagcctgggcaacggcgaggcacggtctccaaaataataaataaaaaaaataaaaaaagaaagatattctacttcttccctttgtggtccctcagatcattatcttaacctgtgtagaatagtgaagaagggacaagcccagcctttggaatcatctagacctggtttcaaatcctggccctgttaccttaatagctttgtgatttgggtgagtcacttaacctttcagagcctcagttttcccctctagaaacttacttttattggtatttgctgtatcatgtttatgtttatacagttaaaaaagcccctggatttctcattttaacagcatccatttgtagagcatcactaggaattagattctgtactagacagagcctgatgcatatatgtatacatgtatatatgaatgtatataaatatatatgtgtgtgtatatatatacacacatatacaaatatactgtatgttatgtgatgcccacaaaaactctatgaagtagacactatgagccccattttgtagaggaaattccagtttagactgactacaaactttcccaagatcacagtgattgattggcagagccaggatcccactccaaagcctgtacttttctccttgttctctgctgtccctgtackaggtggattcatcaccattcattgctctaattggactttgttttctttacagggccatgctatgatagtggaagcttatccaaaataatagatccagaagaagtgacctgaagtttctgtgcaacactcacactaggcaatgccatttcaatgcattactaaatgacatttgtagttcctwgctcctcttaggaaaacagttcttgtggccttctattaaatastttgcacttaagccttgccagtgttctgagcttttcaataatcagtttactgctctttcrgggatttctaagccaccagaatctcacatgagatgtgtgggtggttgtttttggtctctgttgtcactaaagactaaatgagggtttgcagttgggaaagaggtcaactgagatttggaaatcatctttgtaatatttgcaaattatacttgttcttatctgtgtcctaaagatgtgttctctataaaatacaaaccaacgtgcctaattaattatggaaaaataattcagaatctaaacmccmctgaaaacttataaaaaatgtttagatacataaatatggtggtcagcgttaataaagtggagaaatattggagaactgtttacctcattttttattcatcaggggagggtggttctcttggcttaggaccagatttttgcctttaattactcatttataacttctaactattgtggtcaatgctgaggctgctgggaagataaagacaatcctgtttatttatttattattattattttttttttgagatggagtctcactctgttgcccaggctggagtgcagtggcacaatctcggctcactgcaacctctgcctccccggttcaagcgattcttctacttcagcctgccgagtagctgggattacaggcacccaccaccacacttggttaatttttgtagttttagtagagatagtgttttgccatgttggccaggctggtctcaaactcctgacttcaggtgatccacctgcctcggcctcccaaagtgctgggattacaggtgtgagccactgcgcccagcctgacagtcctgttttagaataacacattttgttttccccactgctgaactgcagaatgtttatttcactgtttggagatgcttctgttagctaggatttaaataaagtgtaaagaagttttttattttgatcaactactctaaatcctctcagatttttgaaaactaccctgtactaaaataacatggatgcgagtgtttaaagaaacactagcttctttttatggacatttgtgtgactgttgcttaggtctatgaaagttactgggaatcaaaattaccctgtagttcagggacagattgggcaggagacctagtgctaacctcttaaaaggatatttgagagtcccagcatcgtttccccatggtttccttggtaattataatgtgagtttttaatacgaaaaccattatatttacatatatatcacaaaaatcaggtatagataagttaaatataaaatgtaaaaaccttaaaatttagaaaaaaaataaccctgtgaccttaggttgaaggaagagagggatttcttgaagaaaacattgaaaatactaatcatgaaagatctataaatttgcctgtgttgaaataagaacttttattcttcatgtgatgatacagagtggtggagaaacaaactaaaagtggagcaaatatagtagatacagctttaaaaggatccaggatatataaataattcctacaaatcaataagagtaaagaccactcggctgggcacggcggctcacgcctgtaatcccagcactttgggaggcygaggcaggcagatcatgaggtcaggagttcaagaccagcctgaccaacatggtgaaaccccgtctctactaaaaatacaaaaattagccaggcatggtggtgggcgcctgtaatcccagctactcaggagcctgaggcaggagaatcacttgaacccgggaggcggaggttacagtgagctgagatcacgccactgcactctagctctgtgcgacagagtgagactctgtctcaaaaaaaaaaaaaggcaaaagatcttaacacaatttttagaaaatgatatgcaaatggtaaataagatgcttaatagtaatcaggaaaaacaaattaagatcataatgaaatacacctgcctgactggcaaaagttaacaagactgagaataccagtgttggtcttggatgtggacaaattagaactttatatgctgctggtgagaatgcagattggcaaaaccactttgaaaaacagtctggcaactgggccgggcgcggtggctcacacctgtaatcccagcactctgggagcccacggcgggtggatcacgaggtcaggagattgagaccatcctggctaacacggtgaaaccctgtctacttaaaaaaaaaaaaaaaaaattagccgggcgtggtggcgggcgcctgtagtcccagctactcggaaggctgaggcaggagaatggtgtgaacccaggaggccgagatcgcgccactgcactccggcctgggcaacagagcgatattccgtctcaaaaaaagaaaaacagtctggcattatcttgtacatctgaatataacacaaggtctgtgacccagcttttctgctcttaggaatattccctaagaaaacttgcacatgagtccaggaaatatgtacaaacctgttcacagcagcattgctcttaatagcaaaatattcctgtcatgatcactgacaggaaagtttcaaaaacaagcaaaactaagtatctaagatgcctacagacgaggtaaaaatagtttctaaaacagctaagggaagggaaaagagacacatcttccttactgaagaattacaaataataacgcgtagatactcctgacttcaggaggtggagcatcccccgcccccgctttgagtgtgggctggacttagtgactcaactccagtaaatactgtatggaaagggaaaaaggcagccttacagtggagaaacggcaaacaccagcttaaccaggtgatcaaggttaacatcatcagtgctgccatgtggatgcacatgcctcctaagatgtaatcaaggtacacttcacctctgtggtattctttccaaatacccataatccagtggaatcatgagaaaacaggcaaacccaaactgagggacagtctatgaaatgcttgaccaatactcaaaacttgaaactatcaaagtcataaaaaggaaatactgagaatttgtctagatcagtagaggttaaggagacatgacaactaaatgtgatgtaatatcctggactggattctgaaacagaaaaaggacattcatggaaaaactggtgaaatctgaataaagtctggagttaatagttttttttttaagcttagaaataaatcctcacatacatagtcaaatgctttttttgtttgttttggggtggggtgggggttgggacagagtcttactctgtcacccaaggctggagtgcagtggagcgatctcagctcactgcaacctctgcctcccaggttcgagcgattctcctgcctcagcctcccaagtagctgggactacaggcatgcaccaccaagcccggctaaatttttttgtatttttagtagagacggggtttcaccatgttggccaggccatcatggtcttgaactcctggcctcaagtgatccacccgtctctgcctcccaaagtgctgggattacaggtgtgagccactgcacttggccatcaaatgctttttgacaacattgccaaaaacagtgccaagaccattcatgggggaaaggacagtcttttcagcaaatggtgttggagaaactggacatccacatgcaaaataatgaagttggacccttaccttacaccctatacaaaaatgaactcaaacagatcaaagacctaaagaaagataaaagctaaaatttatagttttataaacacttagaagaaaacatgggggaaaatacatgacattagattcagcagtgatttcttggatatgacaccaaaagcataggcaacaaaggaaaaaatagattaaattggatttcatcaaaattaaaaactgcatcaaagggcacaattaacaaagtgaaagggtagcctatggaatgggagaaaatatttgcaaaccatatatctgaattatattaattaatattcagaaagtgtaaagaactaaaattcacacccagaaaacccccatttaaaaatgggcaaataggctgggcgcagtggctcacgcctgtaatcccagcactttgggaggctgtggcgggcagatcaggaggctaggagatcgagaccatcctggctaacatggtgaaaccccgcctctactaaaaatacaaaaaattagccgggcgtggtggcgggcgcctgtagtcccagctactcaggaggctgaggcaggagaatggcgtgaacctgggaggcggagcttgcagtgagccgagatcgcaccactgcactccagcctgggcgacagagcgagactctgtctcaaaaaaaaaaaaaaaaaaaaaaaaaaaaaagccaataatttgaatatcttcatctccaaacaagatgaccaataagcacaggaaaagatgttcaacattactaatcattagggagatgcaaatcaaaaccacaatgagatacctcttcacatccattaatccattactatggttactatcaaaagaacagaaaatagcaagggttggtgaggatgtggaaaaatgggaattcttttgtgcagttcgtagaaatgtaaaatggtgcagctgctatagaaaacagcatggcagttcctaaaaaaattaaacatagaattaccctatgagccagcaattccacttctgggcatatacccaaaagaactgaaagcagggggagcgggtgcagtggctcatgcctgtaatcccaacattttgggaggccgaggtgggcggatcacaaggtcaagagatcgagaccatcctggccaacatggtgaaaccttgtctctactaaaaatacaaaaattagctgggcgtggtggtgcgtgcctgtaatcccaactacttgggaggctgaggcaggagaatcgcttgaacccgggaggcagaggttgcagtgagccaagatcgagtcactgcactcctgcctagcgacagagcaagactctgtctcaaaaaaaaaaaaaaaaaaaagcaggggcttggaaaaatatttgtatattcatgttcatagcagcatttgtcacaatagccagaaggtggaggcaactcaaatgtccattgacgggtgaatggataaacaaaatacagataaattggtatatatgtacaagggaatactgtgcagccttaaaagggaaagcaatcctgtaacatactacaacacaggtggaccttgaggacccatcacaaaaggacaaattctgtaggattccactgacatgagggacctagagtagtcacgttcatagagacagaaagtagaatgatggctgccaggggcttggggccagggatatggggagttgttgtttcatggatacaattttcattttcaaagatgaagagtgttcttgagattggttgaataataatgtgaatgtatcttactaaactgtacatttgaaaatggctgcactggttcatgcctgtaatcccaacattttgggaggctgagacaggaggatggcttgagcccaggagtttgagaccagcctctacagaatttgtccttttgtgactggcttatttcactcagcataaggtcctcaaggttcactagtgtagcttgtcacaggattaccttcctttttaaggctgcatagtattcccttgtgtgtatataccacagttaaaccaggctgtcactgtaattagagcctctgctccaccaactaatcatttggcagtagagccttttatttgtccttatctttcgttcaaacttccccctattccccagttgtttgcttctgatggtatctgattctaagtaactgcatgttctttctatactctatatagtttattcatttatttattctattgagtgacttttatgtgtcaggcactattctggatgctgaggctacaacaaccattaaaaaacagaccaaaattcctgccctttttgcttccccctttccagagcctctcctctcctcctggcctttctcagttgtgtttttctccaggcctctcaaatgctagtctttcttgaggaatgaaaagcaagcacacaagtttatacttttaaatatgcaaaatattaaagagaacttttccaaaatcattttctctccttcctcccttcctccttccctccctctcttccttctttccttcctttttaacagtcttgttctgtagcccaggctggagtgcaatggcgtgatcttggctcactgcaacctccacctcccaggttcaagtgattctcattttattttttctgattctcattttattttttctgattctcattttattttttttctaatgtaagaaatacatgctgtccgggcgaggtggctcacacctataatctcagcactttgggaggccgaggtg

SEQ ID NO: 95118 - DNA, 60607 bp, Homo sapiens
  misc_feature (1)...(60607): n = A,T,C or G
cccaggaataaaggcactacatagttccaggcctcactctacacgcactaaaattacttcaagatttacactatgaattttgatttctgtctagtagaacacaaaaagacaaaggtagattatcaatatatgaaaatcaatagcattttcttgtatcagcactaatctacttaaaaaatagtataccattcacagtatttttataaactacaatattttactcaaagtcataagtgaaagaccattccatgttctcagataaaatgtcctaatattataaagatatcaattttcctcaaaataaatctgtaagtcaaagttctactggtattgtttttagaaactcaaactaactctaaaatacataggaaagaataaaaatacataaatagctgagccaaactttgaaaatgggcaaagatgagagaaagtgctctaccagatatttaacatcactagctaatttgggaaatgcaaattaagaccacactgagatatcatcacacatcagaacagttaaaaaaaaaaaaaaaaatagtggccgggcgcagtggctcacatctataatcctagcactttgggaggctgaggcgggcagattgcctgagctcaggagttcgagaccagcttgggcaacacggtaaaaccccatctctactaaaatgcaaaaaattaactaggtgtggtggcatgcgcttgtagtcccagctactcgggaggctgaggcaggagaattgcttgaatctgggaggcggaggttgcactgagccaagattgcgccactgcactccagcctgggtgacagagcaagactccatctccaaaaaaaaaaaaaaaaacagtgacagtatcaaatgctagtggaagacgatgcaaagaaatgcaatctctcatacattcctggtagaaatgtaaaatggtacaaccactccagaaaacactttgggagttacttcaaaaactaaacatacacttaccataccatccagcaaccatgtccctgggcatttatccccaaaaaaatgaaaatttaaatccatacgcacacacacacacaaaactgtacaagaatgttcacagcagctttatctgtaacagccaaaaattaaaaacagcccagatatgcaggtgaatggttaaacttggatacatacataccatggaatactactcaacaattaagaagtacaaactattgataaatgcaacaatttggatgaacctcaagaactgtctcattcaacaatgttgatgaatctcaagaactgtctcattcaacaatttggatgaatctcaatttcaaaagattacatgctataggattccatttatatagcactctggtaatgacaaaattatagagatagaaactgattaaactgattaagggatggtgagggtaagggaggtggatgaaactagaaagaggtaacatgaagaaaatctttgtagtgatagaatagttccatatcttcttcctcttttttttttttttttttttttgagacagggtcttactctgtcccaggctagagtgcagtggcataatcacagctcactgcagcttcaaccttcccaggcttaggtgatcctcccacctcagccccccaagtagctgggactacaggcatgcacaaccacaccagactaattttcgtattttttgccagagacggggttttgacatgttgctggtctcaaactcctgggctcaagcaatctgcctacctcagcctcccaaagtgctgggactacgggcatggtcaaccacatcagcctagctctgtatcttgattgcagaggtagttgcaggaatccacacaggtgataaaatggcacagaactatacacaggcattgtacaaaatcaatttattggttttgatactgtactacagtggtataaattgtaactattgagggaagttccttgggtgaagctgcataaaatgtaaccactggaggaaaccagacctctctttactatttgtgcaacttcctatgaacctataattatatcaaaataaagttaaaacaaaataaatgggaagagttatttatataggaggaaaaaacatactactacaaaaccatagagttaaaacagtatagtgttagagcaagaacagacaaaccaaaggaaaggactcaatattcagagtatatatgagcacttaatacacagtgtgacaccatatctatgggaaaagggaagaaagatgccaggaaaactggcacagtacatggaaaataaactggatcacaaacttgtgacacataaaaagttaaactctgcatgtattaaagaccaataagtttaaaagaaaactatgaattagcagtacataacatagcagagtaactttgtggcacagcactggggaaagatttcttaaacaaaacctccaaaatacaaccatatagccaaaagattttttaatttgattatatcaaaatataagatttctgttcaatgaagaacatcatgagaaagattacagacaaatgacagattaggaacagatacacttgtaatacttaaatgattagtatctatgaaatacaagaaatgtccgcaaatcaacaagaaagaactgaaaccccaaaataaaaatgggtgaagggatgaacaggcaatttcacaaacaaaaaattaaaaaagataaaacacacatgaagaaatactcagattcggcagggcacgctggctcatgcctgtaatcccagcactttgggaggctgaggcaggcagatcacaaggtcaagagatcgagaccatcctggccaacatagtgaaactccgtctcttctaaaaatacaaaaattagctgggcgtagtggcgtgtgcctgtagttgcagctactcaggaggctaaggcaggagaatcgcttgaacctgggagacagagatggcagtgagccaagatcgcactactgcactccaccctggcaagagtgagactccatctcagaaaaaaaaagaaatgctcagattcattactagtgaatgaatctgaataaataatgaaatgtaatttaaaatgagatttaattttgtatctattagtctggaaaaattggagcactgaataaaaccaagcatttgtggggaaacaaagataaaggaaccctcacgagcttcctgcaggtgtatagactattgctgcttgttctaaacatcatctggtggtgcttcaataaaatatatgaaaaccaaatgatccagaatcacatatggatctataactcactgaaagtatcacagaggtctaaaatgtatgcttatcatagtattatctgtagaggtaggaaaatgaaaataacatgggtatctacaaataggagagcagacagataaactgtagtagatgtacattctgaaatattgtgcagcacttggaagcaaagaacagcaatgcaatagatcttcaaaacataatagtgagacaaaaaaactgcacgatatcatctctataaattaaaaatgtgggcacccagaacaatatacatttaataacacatacaaacagaagaatacacatcatacagaatggttgcatatgggttgatgagcaagagaaaacagcgggaattagaaacaaaaaacaatgaatgagactggatgtggtggctcacacctgtaatcccagcactttgggaggccaaggctggtggatcacctgaggtcaggagttcgagaccagcctgaccaacatggtgaaaccccatgtgtactaaaaatacaaaaattagccaggcatggtggcacagtctgtaatcccaagctagtcaggaggctgaggcaggagaatcgcttgagcccgggatggggaggttgcagtgagctgagatcacgccactgcactccagcctgggcaataagagcgaaactccatctaaaaaaaaaaaagaagaacgaaaaatgcaggcaggggagatgccttgaacagcccattgaattgagtaagattaactccatcctctgcacctgaggtccaaaatgaactttaaggactcatacatctaataaacatcacaccactaaagctaaatgtcatcctacccctctcacgaagaaaacacaaaacaagctcactactttgaagattttcgatgctaagtgtgttacatggagaaaccacccaacttcctttaacttcaaaacggaacatatatcaaagataaaaggaaactgtaagatacaagggtcactacccctaaaatttaagttaaattcttacagggatattcaaaccaagccaagcccagtccctttgattcacccagtcaccgagatcttttaaaatttagttacaggtggcaataagaaaaaataaagggcatactctcatttttctcttaaagtatttctctgaaacactcttaaaataaggattggcagtaaaataaatgaattttctaccataatccctaattgacattaataataaagcattaattatatttatagtggttcgttttcccaatttataataactaatatgtattgttctggatggaactagacagttttttattctttgtaataatgagggcatttcaacacattatgttcacttttaagctgaccttcatacagccacgagtttgtttataaagcaagaagcagagtcaaactaaaatttttgttttacaaaatgtcaaaaactcagttaatttctttcatacaacaggcaattcctgcaaccttgcccataaaatcctaagacataaacacctgaaagagtcagtttgcctttttttgtctcatggcaaatattacagtgagaggaagctatagctgccactgaccgaaccctaaattcagcagcatcaacagtatcaatgcagcctgtcatgcgacggtaggttccctagtttcagactatctaacccagcaaattctgcctcaaaaagtgacatactaagtgggtaaaaaacataaaacagcaatttttgaatcaaagttagggtagtgctgacttcaaacatagcttcagaacgctgggacccatcactaagtgaatgggagtgactggcatccgctcagacaagtactagggcaaagggataagaactggcagatggcatctcaaaaatgaaattctaacagtggtgtcagtaccttgggcatgggcaaaaatagtaccaacaggaaaggaaagactatatgaaccccaaaagcaagcacatcgcccaaaattgctgtcaataaccaccaacgatcatcaccaatcacctgatcccgtttagaatgcacctgggagccaggcagtcccacctcaagaccaaagcaactgtcacaagtagcaaatatcactcaccaggcaagggagccacaaagacccccggctggcccccacgctcttggtaacggcgcctacttttgggcccgacctgcaggcttgcagccgcagcgatctgacagctagcaccgcccccggctagagcgggyttgtgacctttgacccctgacccctgacctccacggtgcaggcacatcccgccctgtggtttcccatggagaagcttgaaagcccccttacctgtcacagcttcatctcatgccgcgatgtagcctatcagaccgccggtgggcgccccagccaaggaggacaaggatagggcggaactacggaggatgcggggtgcgtagatcctgctgggataatccgtggggcggcaagcgctatacagccgccgtctccccagtgatactgcaaggtgccggtgccgccgccgccgccactgcagtaaatcagctgacaccagccccaactgccgtgactttcgctgcaactgtcgcaaaaatgagggggcgggaaagactcaccatttccctacatgcaaggcctaagccggcgccgagagagccagccgcgttacgatggagaccgaaagtggagaaaaggccagctgtgggcaaggagtgcacggccgccatcttggttgtgggaagtctcgtctaggctgtcctctctccagttgggaggaccaagatggagcgaaggatgaagtagcaagtgyacgtctttcttgggagcaggatgttgcgcaagtttacacttctgaccccatcacactgcttcccactgagatgcaagaggtagggaattccctaaacactggaaagtatgttggatgctggaaagctaaaaagaatgacaaatgtcccccaagayagataagctatagtatagtgcaggatgagaaatgccaaataaggagcaaggaagaaaagagatgaattatttctaggttggggtaaggaaggataatcacattaggtcatatggaagtctagaaaaattggtcagatttggaataataattgggaaaggaaaacaactttgtcaccagcattgaaatgtaaaacatgaatatatgcaataaatagaaagttaaatttggaagaaatacaagggacgtgaagtaggtgaartgggaaaatgtggtatcagggcttagctgtttctgctccgtgagcggctcctttaacaggcagtctatgccctggagctctcttgtgggttgatagagacttcatcacattcggcctagaccaggtaataaaaaagtaacatggaaaaatagaataatgtcagataacaagaggcttttagtggccatataagctttttggtctttattccaaagacaatgaaaagtaattgaagacttttgactaataaatagtgtagcacttttcctaaccacatggtattcaggtttttaaaattgctttacaacaaattatcacagtcttagtgtctyagtggcttaaagcaacacatatgtattgcctcacattccatgggcaaggaggtcaggaacaggttagctgagtcctgtgctcatgctctcacaaggctacaagtggatgtcagccaaactgcaattctcatctggaggctcaactagggaagaatctgattccaaactcctgtcagctcattcagttccttgtggctgtctgaytaggggccctggcttcttactggctctgaactggaagtggccatcagktcctagcagccacccacagttccttaccacatgggccttactaaaggctctctcgcaacatggcagcatactccttcaaagctagcaaggagaatctctctactgagcacaagaaaggagtcacayagatatagatacagccatggatatggacatggacatagrtatggaaatggatgtagatgataacctaaattagggagtgacagccatcacctttgccatrtattattggttaaagtaagtcacgggttttatctgtactcaaggagaaaggattatacaagagtgtgacttatcggggtmacttaagatgggccagccacaaatattaatttggcagcaatgtgccatgtaaatcaggtgggaaatacagggaagcaaggagacaagtgagatgtcgtcattgttgttgtaaccaaaaatgtatggttatcactgcaaaagaatcataaatgagacccacaggataaaatcrggaatttcaccattttagaggcatatatatatatattttttgagatggagtcttgccctgtcacccaggctggagtacaatggcaccatctcagctcactgcaacatccacctcctgggttcacgcaatcctccttcctcggcctcccgagtagctgggattgcaggtgcacaccatcacacctggctaattttttttatttttagtagagatggggtttcactctattggccagactggtcccgaactcctggcctcaagattggcctgtctcggcctcccaaagtgttgggattacaggcgtgagccaccacacccggctttagtggcatttttaaaacttaagtactactctgtccttaaaatttagtagcaggctgggcacagtggctcacgcctgtaatcccagcactttaggaggccgaggcaggcagatcgcaaggttgggggtttgagaatttagtagcaaattaccctacagcacaccagtaccttctggacttcttaagctccaggttagctctgcaaaaggcaaggaggcttgttcttccattttacaaatttcaaaagagggagatagcccagtggcctaacagtgactttattgctactgttattttcggatcacttcatgcatgctgttatttttttctcatcgaggttttcagtcgtagtttggtattccccatggtgcctagtactcagctaatactcccctttccttcctggaccctctcccagaaaagtcctatcatggtcgatggctttattttaataccaaatggcaaagaggcttaataagggttttttgcatgatttttgtgtaattaaaactgttttgtgcaattaagagattccttttgcactttctcacatgacataaaagtcaagtgttgatacttctctttttttcctgtctcatgacttccatgattcaaaccatttctttccaagtaacaaaatgtctttttctagaaacatctctagttactccatactcaggccttttaggaaggagtgaaggtgataaggtttagggtgttaagcctcctcacaaatgagggtttcacagcccccctcaccaaaccagcaagactagcaagggaaaattagaatagataatgaaggaggagctgataagtmctagtggtagccctggtcaccaactgcagcaacagggctgtagatcgtctactaacctccctcttctaggtttcccataaggaagagagggtgaccagaaacctggaggagttgctccccaaacctgtgtagagaagggaactcatttttgtgtaaatagtggactatgggagacacatgaagcaccacccagattccccttcaagaaagaaccacttcctagctgcaaggagagtggtttgctcacactcttgctgttagcttcttcagggtcayctgggctttccagctgagatcacactaatcttgaggcagcctctgatgaatgactgagcagggtgaggaaagtccagggcacaytcttcttgsggaggcccctgttctagggggtggtatcaaggcataggaatttctgctcccatgggggactcytttaacaggcaatctttgtactagagcttcctcttgggttagtagagactttgtcagatctgctttttcccttcctcggcccaatcctgcttcctcccttttcctctcacagatgtgagagaaataaaccttttggactcctcactccatctcagcatcagcttcccagagaacccagcctgcaccatgacaccatttttaacaattgacaatcaggagctgtcattgtacttttgcaacttttccctcrktttttttttttttccgtataaaaagttggaaaaaaagaaacaaagattaaactgatttttactgatttttaataaaagagagacatcagacttatcaacccatgcaatgcatgtgtcttattttgatattgattcaagtaagctataaaataaattaggagaaaaatgggaaattttaaccgagtggatatttaatgatattaaagaagccttgttaacatattagaatgtaataatgatatttcggttatgtctttagaggattcctcatcttccagatgtgcaggctgaaatatttatggatgaaattgtcagatgcctagcatttgctccatgataatctgaggtaaggaagacagtggcaatagctaccttaactttacttccatcttcatgaaatagtacattcttttacttctaattctaattcatcaaggtgaaaaacatcacttattcaccatccagtggttttaggcactatgctgagctacacatacagaaaatgcagagacttggttcttgtggtcaagttactcagtctggcagggaggcagggagacaggcagacccactactgtgaggagtgatgtacctggtgctttccaccagttgccrtggggctgatcctcctactgaccttgtaatactaatgttctgaattttgatgggaaatattgtttttaacattgtgtgaaaagccacttccttattgtacagaaaccactaacatacatttgacttttattggatttcttcagtatctggccctcagatgtactcagatattcagatatctgctacttaagaayggactgaatgatgagcgtgtgtatgtgttacgtgtgtgtttgctcaagggcatgcctgagagagggctttgaataaagtgaagcttctgttaagagttttatcagctggacatagtggctcatctctgtaatcccagcatttttggaggccgaggtggrtggatcacttgaggtcaggagtttgagaccagcctgaccaatatggtgaaaccccattcctactaaaaatgcaaaaattagccaggtgtggtgacatgcacctataatcccaagtacttgagaagctgaggtaggattgtcgcttgaacccagaagccagtggttgcagtgagtcaagatcacgccgctgcactccagcctgaacaacagcatgagcctgtctcagaaaaaaaaaaaaaaaaaaaaaaaagaattttatcatttccttccttgtttgtctttcctagctagacaatatctacaataccacaagcaaaaagagctcttttatagctagtgattaaatgaaaacacagattgtaagttttgtgtagtttctcagttccaaagagttaactctaataatgctagagactaaatgttcatttccccaatattcatatattgaaaccccagtgtgatggatttggagatggggacctttgggaggtaactaggtcatgagagtagagcccttatgaaagaagagacaagacagaatacttgttctcctgcctgcccttttcctctcctctctttctctctctcacccacttcttccccactgtatgaggatacatcaaaaagacagcccttttaaactggcaagagaaccctcattagacactggatttgggccagcaccttgatcttggatttctcagcccccagaactgtgagaaataaatgtttgtttaagccaccaactccatggtactctgttagagtagcctgaaccaagacaaaacccttaacatactcytttaaaaaattaaaataaaatttaaaatgcagtttttattacagaggctgaggtgttagaaatatttttctaaatatctggkcttcttaatagaaactctaagcagtttaatgacatcagatataaatttaagaataaaaaactattttacatatttggcaaacacccgaactgactctgagaattgccagtgagtttctttagtatgctgcaggagattgcagcatgtatgtgacagtgtggaacactctacagcttccaaggaaaccctctcctccaaggcatagcctagtgtccaaaactaaagaatataatattagcgcgataaatggtacatctggagacttgatggcatctaaagagacacttgctatcaaaggggaaatgagatccttttgactaaaaatatattgcgccacctagggacacctgggaaaataatgtattcaattttcaaattcaaagcatacaactagaaagtgtttggaaattatgaagcaggatttcctttttatttaatatttatattacataaatatcgcacaaattacaccaggctggagtgcagtggctcagtcctagctcactgcagccttaaactcctgggctcaagtgatcctcccactttagccaccccaagtatctggaactacaggtgtataacatcatgcctagcttgaattcttagatatgacagcaaaagcacagataacaaaaggaaaaaataggtaaattgaatttcattgaaatttaaaacacttgtgcatcaaatgacaccataaagaaagtgaaaagacaacccgtagaatrgaatatctgaaagtaatttactctataagggattgatacccagaatatataaagaactcctacaacccaacagcaaaaacaaacaacctgattcaaaaatgggcaaaagacttcaacagacacttctccaaagaaaataaagaaataagcattatgcacatgaaaagatgtttaacatcttaagtcattagggaaatgtgagatatcacctcacccacaaagatgactattattaaaaaaattaaaattagcaattgttgctaggacgtggagaaactggaaccctcatacattcctagtaagaatgcagaatggtgcaggcactgtggaagacagtttggccgtttctcaaatggttaaacagaatcaccatatgatccagcaattccactcctaggtatataccaaaaagaactgaaaagcagggacttgaagagatccttgtacaccaatgttcacagcagcattgttaacaacagctaaaaggtggcaacagtctcagtgtccatcaacaaatgaataagtaaataaaatgtgatatgcccatataatggaatattattgagccttaaaaaggaatgaaataaattttgatatatgctataatacagaagaaatttgaaaacatagcgctaagttaaataagccaggccagatgcggtggcccacacctgtaatcccagcactttgggagtctgaggcaggcagatcacttgaggtcaggagtttgagaccagcctggtcaacatggtgaaactctgcctctactaaaaatacaaaaattagccgggcatggtggcgcatgcctgtaatcccttcatgagaaggttctggaaatggatagcagtgagtgcacttaatgctactgacttgtgcactttaaaactggttaaaatgggccaggtgtggtgactcacatctgtaatcccagcactttgcagggctgaggcaggagaattatttgagctcgaggagctcaagaccagcaacaaagtgagatctcgtctccacaaaaaaataaaaaatttgctcagcatggtgggatgcaactgtcagcccaactacatgagaggctgaggcaagtggaccagttgagctcaggaggtcgaagctgcagtgagccatgatcatgccactgcactccagcctgggtgataaagtgaagccctgtctcaaaaaacaaaaagttaaaatgctaaattttatgtaagtatatttactcaatatatatgtatatacatatatatgaggaaatcctgcttcataatttccaaactctgtctagttgtatgctttgaatttgaaaattgaacacatcattcaatcatatatacacatagtgagtatatatacacacatatatatacacacatacatacatatatacacacatatatacatatatacatacacatatatacatatatatatayayatacacacacacatatatatatatgaaacaactatgggttgatcacatgtctgtgccttccattttagcccgtacccctggacatggagctatcacaaaagtgtrtactccaaaggacaggaacatgtaayaatcatgtttaacttctgaggctatggcacagtgcctgccatacgggaggtcctgaagaatttgttgtggttgtcagtgagctgattccaatcttaattcactgaactgtgcgggttgttcagataaaaaccaatgactcccttgctacattcaaaggcatttcacatcttttggtctttgacatccttcatccttttggtctttgacactttacttttgtgatagtcctcctgattctctgcttctcttaacttttctcattttactccctatttgtatttgtctttaaatttctgttgtaactctttgcttttctgtatacttccttatgatctactttagtggtatcatctatgaccgctatgctgcaaactctcatatatttatctctagcctgtatgttaatcctctaacctccaatttccctggtgttaaacaattcttaaatttttatatcaggcagagtcacaaaaggaaaaagcacattcaaaatgggtaatcgaggataatttggtaaggrgggtattaacaaacgtgtagatagagtttaggaaaatcaaaaaagcaatggtgggccgggcatagtggctcacgcctgtaatcccagcattttgggaagccacggcgggctgatcatttgaggtcaggagttggagaccagcctggccaacatggtaaaaccccgtctctactaaaaatacaaaaattagcccggtgtggtggcagtcgcctgtaatcccagctagtcaagaggctgaggcaggagaactgcttgatcccaggaggcagaggttgcagtaggccaagatcgcaccactgcactccagcctgggtgacagaaggagagaggtctgtccccacccacccaaaaaaaagcaatggtgttgctaaagagaaaataaagacaatgacagcaaggattgagcagtgagtagaaaagttyaactgtaaagtaggggactagattcatcacacaactatgctctgggtgggaagggtggttctttttaaaccaaaggatccttattggtattaggagagtgaagtttctggatgttgcccattagctggtggtatctgggcttaccagttaggctagtgctaggtggctggagatagttcatgctataagcctgggaagtccatttaggaattatggcttccaggtacctctgtttcctatgggtgcctgccttgggattacagtggcaagtgtttctgctctttatgtgaactatccaattcagtactgtcttgtctagtcaggtctaggtagcatcaacaggctgtcatgcccagtgtctggttccagcccatgctgaggtctgaagggagtaggttgatgggtggcaggtagctgaaagaacacttgggaggccataggccggtgaaagatggttttactcagcagctctcttacactgtgtgtctttgtctcggctgcctgctccggctctgccactcccacgcctgcagctgcattccctggtctgcaaggccagctctcccttacagggtcagcagcttaattctctctgggcatgagtcgagccatgccgtgctgtatgtacagtgtcagcagggcagttataccttttacaaacaatagtgcctccaaaccaggcgatgagccttcccatgttatagctacatagctgtgattatataacaagtggagttatgtgtctgtgctccaaactcaatgagtcacacaggatgtttaccttggcctattcttgaccaaatcacatccattttccttacactaggtgactgacccggagtttctctgttggtatcctggtgctgccaacacccaggagtgatttctacttctatgtctaaagagacaatagaagacagtgtttgcaggaactcaaagagrataatggtatgacaagagctgtggcctttggtggagacacagacaacctgtggcaacacagcaggaagggagctaagggaattactaactggatctcattttcttctaccctccaatctcttcaagaagctcgaacagaggatcctattgatgcagtccatgtaggcaggttcctagggctgagagcagagggaagaaaggtagagagtagatctggagggacacayagtgtctctatcagagctaacttttacaatgcctcttttcatcttgcttctcaagaatctataatctatcttgctttcataagccctgttcctcccttcatatctactatagctgctgtagtggagaccacttctacttgcttcttaggcaaaactggaaggacagttgagaataataataatccatctgttctggataaattgtgctccctcaccccacccaaattcataggttgaagccccaacccccaatatgacgctaagtggagataggacctttaaggaggtaattaaagttaagtgacgtcatcagagtggatccttaatctaataggactggtgtccttgtaaggaagagaaacagactagtactgtatgtgcatgtgtgtgtgtgtgcacagagaaaaggccatgtgaagacacagtgagaaggccgccatttaaaagtgaagaagagaggccttaggagaaaccaataccagcagcacttggatcctggactccaagtctccagaactgtgagaaatacatttcttctgtttaagtcactcagtctttggtattgttatagccaaagactgagttgttatagcaaccctagctgactagctgaatagacaccactgtttataaacatttttatcaagtatcttatgatttggttctttataaacatcatccaatataaccttttaccatcacaatcctagaaggcaggtgttattaatccaaggctcacagacaaggaagctgaggttctgagaggttagtagtttgtgcatggccataaaatttaagtagcaaggccggtcatggtggctcatgcctgyaatccaagcactttgggaggtcgaggcgggcgggtcaccttaggtcaggagtttgagaccagcctggctaacatggtgaaaccccgtctctactaaaaatacaaaaaagtagccaggcgtgctggtgtgtgcctgtattctcagctacccagggcgggctgagacaggagaatcgcttgaacccaggaggcggaggttgtggtgggctgagattgtgccactgcactccagcctgaacgacagagtgagactccgtctcaaaaaaaaaaaaagcaaatatttattatggggacttctgtctattaaaaccattacaatgtgctgataccacatgaaaaaggaatgtaattactgtgcctctggtgtggctgggttcagttaagaattaattattttaatatgtttctgcaacacctttagctttctcttttcacatgtcctgggcttcaactatcacccaatctgatgactctcaaatctgtaacgtcgtcctagtcctttttctttagttccaggctcatccctctcacgatctactatatctctcacttggatgtcctacaggcattttaactcatttttaaaaagctacacgattgaaatgttttgagttattttaaattcctctgtcatctcactaaattggaccaataattgtttctcaaacatgttctttcctcttcatttccactgcagatgctttcctaatttagttcctggatcaccacagtatcctcctaaatggatctcactgccttccatcctccttgatgctacctgagggcttttctgaagacactttttctttttccttttttttttttttttgagacagggtctggctctgttgcccaggctggagtgcagtggcgcaatyatggctccctgcagccttgacctccccagctcaaggaatcctcccacctcggcctcccgagtagctgggaccacatgtgcgygccatgacgcccggctacttttttgtatttttggtagagacgggagtttcaccacacttgtaattgcaaaattgccctgaaatgatttttccattctcttcccgacaaaatccaaattccttagctagtcattatctgaccttggccttccctccaatttcatctccccagctaaatccaaagacagataatttgccacctagcctaatatttaaaagagtacactggcgttagcctgccttgacttgaaatcacagaacctacttcacagggattaaatgaactagtacacatataaagaacttatgtcttgcctggtacatcatgtggtaaatattagctattcttcttatccaccctctcaactcatgcatttgcacctggtggtccccttgcctggaatattacctctcaccatccatctaacccctgcttctctttaaagattcaatccaggagtcagattcctagcaagtttaccctgccccacccttccatctcgttagtctccaccgcttcctattcaaattattgtttgcgtcggtcactagaccgtgaacttcytaaaggagggatagtgtcttcatctttttggtcaaaacctaaagacaggtgcacgatactttctgaatgactgcacagaaagcgccccatatgtaattaagtctgttaataaatattccyaaacgttattttgtcttgtntgtagacctgccccgaatacagtacaggagcatcttcaaagtacttccagtgggtgccctggacagcagctaagaacccyggggtaaaacgagtttcctctctactgttacaaatcagaaacctcctccgtaaaagcctcagatctgggaaacgcggatgcatatgccaacttttgagtctcagkctgcgcctgcgcacgtgacctctacacgtctcctctgcgcctgcgccgctcaagttagcgcgaggctactcagtcgagggtgggactacgcttcgcgttttgggattgggcgctgaaggccaaaccggacgacgcggaaatracgtcacgccgggggccctgccgcgcggtggctgctgggtgccgcacgccttcccatcctyctcctctcccctcccccatcyctccccgccccctcggccgctccgctccctggcgtgactcggcactgagagtcccgggagaagactcggcggtcgccacctcttctgtccaggcctcggccttcctgagyatctctccttcctctcccagatcgtcttctccttcagtttcaaagccagtggcgtcgcggccaccctgccgggctctctgtgaggatggtgggggtgaagcccgtcgggagcgacccggatttccagccagagctgagcggcgcgggctccagactcgccgtggtcaagttcaccatgagagggtgaggccargctcgagctctgtgggtccccgtctgtccttccttgctttcctttcactctttgttggccctggtttcctagccgtctgctgccccggagtgtccggcagtcgccgcagccccaggagctgccggaattaggcctcgtttctcgggtgtgaacccccatttatgcacaggggttcctagacgggctcgggggcctggctggccggcttctccagctcaggagatttctcacctgctccttttcaattctttgacaaactggttttgggggtggcccgcccctattccttccagcctgtsggagtctccgcagccacccttgcctgagcctgaccccttctttctgcagagccagctgtcatttgcatctccagagctccaaaagcttaatttaccgaacactttgtttctcttcaccacctacatctctctaaagcctttgaagattcagatggggcgatctaactaatatgcgtagctctgagtcctgaatttctgctaatgcatttcgaactaagttaacgttgggttagggtgctttttaaattatttgaacttttttcttcctcgttcggccactaacttgtagcttaggctcccctatgtatgcgattgcaactggtcacacacgacagtacatatataatatatttcaggtggacagttggccggatgtcttagtttgacccggctctgttttttcacttaagaggacagggatcttgaaaaatgttaactgtctttggtaaatatcaacaaaattataggtcgtagaaaaggtggaccttttatagtggatgtgtagtaaagttcctttgtaagaatgacatgttggaactcggcgttgagaaccaagatttcagcgtgtgtgtgtgtttcacagatctctccttgtgtatgtcgatagtatttagttagaagtatgagaggtttccgctttattttccttgaccccttggcgttatttatacatctaacttggagcagtctactgctggtatcactgtttatgtaacacactttcttgtccaaataactgtataaacacaaaattccattttgaatttcagagcaaaaaacaaagtttctactagatggttcactaaatgttgagtatataaatggtggcattaggattatatcgttttagggaatggatgcagatagatatgaaaacaagttaagacttatttttggaccagtctctcttacactgaattgaaaaaggatagtaccttgcatttcatatggtgggctagagtacccatatgatatacggaattttgcatttactaaatttaaaaggataagtgatgtcatatatataaaacacctaaaaggaatgttagaattctataaatgtgtcttctcatttttagcaattttktgatgtctgtattcttaataataggggaatacctgtagtacattaagtatctaggccacagtagaaaagggaagataggatttcaataaggaacctcacctcacttttagttcacttattctaattctggcccgtcgaagcttttatatttttgtccctcaatgatatattgtttttctcccttaccatagcagtgrgagagataataaaataataaataaatattgattgaagtgasaaaactggggaaacattgctgcgaaggaaggttttttctatcagtgtggtgtcacttaagcataagcataactgcagacattgattggtaaggaactgttacatttaaaaaggtattttagtggaattaaaattttttttctttgtaaaaaccgagggaaaattaatgtttggatttagagtaagttcaaaagcatatttatattacgtttacaaatctggtaagattattgtatttacctttaatattcctcgaacttattggccattaatacatcctgtctaaactcattgtcaatagaaccccagaattatgtatatgacgggtcagtattagactcagaaacaactgtattcagtaaaatcttgtaagaatcctcttagatcaaagttaatgctgtcccagtttagactgagggcatagtttctccagcacctatttcatttcctttccaaccctattttaaaccttttttctttttttttaacctctatgctttatgcactctcagtctaaattttactaaaatgatacatagattgttctcctgtgtaagaatctttagtggcttatgataaaatatatataacataaaattgaccatttagccatttgtaagagtataattcattggcattaaggacagtcagccctctgtatccatggattgaaccaaatgtggatagaaaatatttggagaaaaaaaattgcatttgtgctgatcatgtacacacttttttcttgtcattattttctaaacaatacagtataacaactatttacatagcatttaccttaggcattataagtaatctagagatgatttaaagtatatgggagaatggtcgtaggttatgtgcagataccatgtcattttctattaggcccttgagcatctgtgatttagtgtcttgctggaggtcctgaaactaatcccccagatacccagacatgactatacagtcacaatgttgtgccaccatcaccactgtttcctataactttagacagaaattctatatccattaaaggataactccccatccttacttctccaaagggacaaaactgtacccattaagcagtaatttgcccctccccatctacctccttggtaacttctattctgctttctgtctctatgaatttgtcaatttgtggcacctaatataagtgaaatcgtaacaatatttgtccttttgtttttgacttcacttagcatagtattttcaaggttcatccatgtcttagtatgtctcagaatttcattcttctttataactgcataacataatccatttatttatatggcaaattttgtatacctgttcattttttgatggacattccagttgtgtcttcctttggctgttgtggataatgctgctaggggacattgctatgcggggatcyctgcttacttgcttgcttttcttttttcttatttgttagagacagggtcttgctctgttgcccaggctggagtgcagttttgagacgatggctcactgcagcattgaattcctggcctcaagcaatcctcccacatcagcctctcaagtaaatgggactacagacacataccaccatgcccgctaatttattttttgttttagagactaagtctcactttgttgcccaggctggtctaaatcctggcttcaagcgaccctcccacgtcagcatcccaaattgctggggttacaggtgtgagtcactgcgctgggccttctgtgcccatttttgaattgagtggtttgtttttgggttgagttgcaggagttctttatatatgccggatgttaatatttaatttgcaaatactttgtcccattctttgggttgtctttttcttgatggtgtcctttgatgcatgagttttaaattttgatgaagtccaatttatctatacttttgttgcctrtgcttttggtgtcatattcaagaaatcattgcaagattcaatgtcatgaagatttctccctatgttttcatctaagagttttatagttttagctcttaagtttaggtccttgatccattttgagttaattttggtatatgtcataaagttagggtccagttcattttttggcatgtggatatccaatttttccaacaccgtttatcgaaaacactgtcttttcctcattgaatgatcagcacccttttcccagagtattttttaaggattaaaatagtcaacgcttacatattccttagtctgtgtaaggaacttgtttaagctcttatattgactcaattcattcctcagaataaccctaacagctatccttgttttacagttgaggacattgagtcacagagaggttaaataatttgtttaaggtcccgttaataaatgcatcgtttgaattataaagtgctgttcttgatctttccagcctaaggagaaaagaaatgcacgttcatctctgtgtatctgcacagagcctgacaattttcaatatgcctttccttaaataatttacacctctgcctgcaattcatttcactctctgatattctttttggtaatatttttaaacagtgtctccaaattgttacttatgcccagatacattttagtggttatgagtagtaccagttttgttgttactaaagagttaaaagaatatacattgtgtcgttcgttgtccctggtctcccccctccccaccattaaacagtgtgaatgattttttttttttttttttttttttttgagatggagtcttgctctgtcatccaggctggagtgcagtggcatgatctcagctcactgcarcctctgcctcccaggttcaagcaattctcctgcctcagcctcctgaggagctgggattacaggtatgcgccaccacacatggctaatttttgtatttttagtagagacggggtttcaccatgttggtcaggctggtctcgaactcctgacctcgtgatctgcccgcctcggcctctcaaagtgctgggattacaggtgtgagccaccacacccagccaatggtttttatcttgaattgatgaatgtatcacttttgtagataatgtttaccatgcactgattttttttttttttttttgagacagggtctcgctctgttgctcaggctgcagtacagtgatgtgatcatggctcaattgcagcctcgacctcctgggctcaagcaatcctcccaactcagccccagcagtaatcggaactacaggcacgcaccactatgcctggctaatttttttttttttttttttttgagacagagtctcgctctctagcctaggctggagtgcagtggcacaatctcagctcactgtaagctccacctcccgagttcacgccattctcctgcctcagcctcccgagtagctgggactacaggtgcccgccaccacgcccggctaattttttgtatttttagtagagacggggtttcaccgtgttagccaggatggtctcaatctcctgacctcgtgatccgtccgcctcggcctcccaaagtgctgggattacaggcgtgagccaccgtgccctgcctaagttttaaaatttttgtagaggtggggttttgtcgtgttgcttaggctggagatacattgaattttcttaaagcagatctgcctttgtagtttgttagggtttgttacaatctaagaaggatgtcagtgtatattaggatgttgagttctaatagttacaatagcttgtccaaataattgtatattaaacatatgttaattacataccgcaaaattactgataactgaaggaagtttattgaagtacagagtaagcaggcccagtagtccataggaaccaggcagaaaacgttagcaagtagctgtaagactagggcatattgaagccctggagaacagagttgctttatttgttaactttttattgaagtgcaaatatacaaaaatgtgcaagaaatagatcattaactccggactcctcgcactgtcccaagcttcttcccactactcttgaattctaacactatagatcagttttgcccgtatttgaactttatagaaacagaatcatacagttatgtagtttgtctggctacctttcaagagtgttaacacagtttaatcttggcaattgatttggaaataacaatgaaaggcactgtgtaggacattgttttggactttttagcatagctgttaagagttgggttctgggatctaatttaaacttactaatttgttgttttttagagtcataaagcttaaatgaggtgacatgagtttgtgaatgcgtaacatacagtaagtgcccaatgaatgctagctgttttatgtaattaataataccaattgtgattaagcctgccgattagtaaacatagcacatgtataaattgcttaaagttttaccctgcaggaaaaaagaaaaaaaaattctttaactgtggctttagaaagcatattatccacttaccagttgtgtatattgacacaagttgttgctcaagataagacacttatcttgaagggaaggacagttagctagttcatgaaatggaatttgttttatattatgactgtagtaaaaagtgtattaaaaagaagctaatgctctttcaaagaaagctgatcttggattatatttatgaattgcctgttctagtggtggccctgccgccaactaggatgtttggtgttgggcaggtcatcttatgatcttcacttcttacttactggttaattatattaggttatgtctgttttaaagttttagttttgtgggttcctttttttttttttttttgagacagagtttcgctgtttttgcctaggctagagttcaatggcgcaatctcgtctcactgtgacctctgcctcccaggttcaaacgattctcctgcctcagcctcccaagtagctgagattacaggcatgcgttactaggcccagctaattttgtatttttagtagagacgggggtttcaccatgttggttaggctggtctcgaactcctgacctcaggtgatccaccagccttggcctccccacagtgctgggattacaggcgtgagccactgcgcccggctgggtttatttctttatacattgtagaaagctagcggtttactgtattctttttctcaaacagcataactcaaaatccttctaacatacacwttttatatattggactaagcagataagttttcagtcagaaggtttagagtagaaaagtaactttttttttttcttcattttaaatgtctggactaggtgatctcttgaaccttttgcagtgaaataagaaatcgtagattgtgcaaagggcagctaatcaaggtgtgtgcaagagaaaaaggtgtaattctgaaattcaagcatactgggtgcataatattgtagagctgggaaaagtccttggagagtccttttattttatacagagaaatcaggtgacttgttcatgatctcagctaatggaaatttgtttactctcaactgctcctgttaaggagacagacatcttatgtaaaatgatcaattggctgggcacagtggctcacacttgtaatcccagtactttgggaggctgaggtgggagaatcacttgagtctaggagtttgagaccagcctgggcaacataggcagacctcgtgtcttcaaaacatcaaaaattggcagggtatggtggcacgtgcctgtagtctcagctgcttgggaggctgaggtggaaggatcacttgagcctgagggaatgaggctgcagtgagccatgattatgccactgcactcaacctgggtgacagagtgaaaccctaaaaaaaaaaagaagaaaatgatcgatttatttgaatgattgttttgtgaaagtgtgctgctgtatatatttgtgagtttgtatatatttatgcttctctgctgatgcattttgatttttgaccaaagttccaacctctgatggctaactgaaattaaagaatctagataaagttaaatcttgaaacagttttttgcacagtaaccataattttaatagtctgttcagctgcaagatgtgtgtctgtaacaccagttagctcgtaaataattgatgaatagagagatgtcaatgtgatatggaagttgtattggttcatgtgtgattattcctaggtagtgaaaaatagaaataaaaccttcatctggaagcagaaagctctcagccacacaggcaaattccctctcttgtttattttaagaaagttaatgaagttaaataagagtgcctacacctagcgtttgttccccagaagggtttattttcagtgttgcattttctcctgtcccttccttaatggcagccccactggctcagagctccacttcagtctgctttgtcacaacacctgtaagcatcatttccagttgattttgttcttttcaaatattccccaaggtcgcttccagctctgagccacatgctgggatgtccatctttttcctgaatcctagttactgtctttttttttttttttctttyccaagttggagtcttgctctgttgcccaggctggagtgcacgatcttggtgaccttggcttaactacaaccttccgggttcaagtgattctccttcctcagcctcccgaatagctgggactataggcatccgctatcacgcctggctaatttttgtacttttagtcgagatggggtttcaccttgttggccaggctggtcttgaactcccaccctaaagtgatccacctgccttggcctcccaaagtgctgagattacaggcatgagccatcatcgggcccagtctggttactatctttcttactgatcttgttacaaaattgcatgggtttcaagtagtttgccaacaaacttatttttcccataaattctctctttttggtgtgtgtttttgcaggagggtggttttcatgaatggatatattgtactatagaatggatacctctgtaatttgtgacacctgtgtaaatgcagttaacactaaattcttctcaactcatttaatattttaaaatgaaaatacctattcatcacaaaaaagcaaaggatgcagaattatggatactaactgttcattgtgcctgtctctgtctttttaccccctatgcatttatatatatacataggtttgaaatgtgatcctagagaacattttataatgagactttcttcccccctaaacactgcaaagtatcaggctggggtgcagtggtgtgatcttggctcaccgcaacctccgcttcccgggtgcaagtgattctcctgcttcagccttctgagtagctgggattacaggcatgcgccaccatgcctggctaatttttgtatttttagtagagatggggtttcaccatgttggcctggctgatctagaactcctggactcaagtgatccgcccatcttggcctcccaaagtgctgggattataggcgtgagccagcgtgcctggcccctgtcataactttttaaactagttttccattaattgccatttaagttgttttctaactttactattacaaacatgttacattgaacttccttatactacatgttattgtgaaatagagtaagtgttgttaaaatggaatagactttcaaaagggyaattattgggtcttggcttgtgttcatctaaaatgaatagatatgacccaatcagtggcctttgaaaaacagtgtagtgatatatattcccatttataaagtttaagactaattttagttgactgtaaatattattttcttagatttttggtgtatggctttcaggataacacaaggtgaaatgctgattgaaatgttaagaatgtggagttgatcacaacttgagttttaacatttgtttttattttgtgcattagatttgctttttcttgcatttcttatttctgcaaacttttattgagacatacatggcacacaattagaaatgtatagttcaattaattttcacaaactgaacacacctatttaatcagcttccagacaaacaaaacattgctagcctccagaagtcttattctatcagtaactcactaaggtaaccattgtcttgatttctgataccattgattggttttgtctgtatttgaactgtatgtagtcatatagtatatgctagtagttgctttctttcctcaatgttatttgtgaggttcatccatgtttttgcaagaggttttataccagttattttcattattgtgtagtatttcattgtataactataattagcttacccattcttttgttgataagaatttaattgtttctgatttttgactcttagaactattactaataatactttttcaaatgttctaaggtgaacatgtgtcttagatgtattccccaggaattttgatgggttggtgtattttagcagtttggtttttttccctccaaaatggttaataccagcttgcactctcacagtatataaaagtttagttgctctgcattcttgacaatacttaattcttcttgtagctatttttgctgagttggttttaatctgcatttcccgggtatccctgatgactaatgaagtagaacatctttcctgctttatagaaagtttttgactttatttattgactgtttggataatctcatttgtcaagtacctattcaagggttcattctttttcttttgggtttcagtcttctccttgttttgtaggagttctttacgtattagaagtataagtcctttgtttgatatgttttgcaaatacyttttcctagtctcttaaagacattttttgatgaataaaaggttttaatcttccagtttatcaaatatagtccagtctgtcaaaccttttttttttttagtacttcttgtgttttgtataagaaatcattgcttagtttgaggttttgaaagtgtcttcctgtattttttcctaaaaccctccttgtttcaccttttacatttagatctacaacccatctggaattggtttttgtgtatggtgtgttgagattcatttcttttcctgtatgagtatatagttgatctagcagtatttattgaaaagaccatccttttcccactgcaatgctacatcaagtttttcagacatcagagtactgtatgtgagatgggtctgtttctagactcttctttcaaaggaaaactgatttgatcattttgcttattcttgtacaagtactatattctcttaataaaggtttatgatagttcttaagatctgataatataattttttcagattagaacctcaaaacgacttgggctgtccttggcatttctctataatttttagaatggaaatttgttaatttctacaagaaaacctgctgagatcttacatcagttgtaaagatcaaattgagtaaaattggtatcttggcaatattgagtttcaaattcataagcagagtaaattcctccatttatttaggttttctttaatttctctcagtgagaacaaagctagaagacttaacactattagttatgaagactaaatgtaacatctgggctcattaagacagtatagtattgatacaagtatatgtaaataacttactcaaatagaccagagaatcaggcctagggttatggttcatgcctgtaatgtctgcactttgggaggcccaaggcaggaggatcacttgaacccaggagtttgagaccagcctgggcaatatagtgagaccctgcttctcaaaaaaaaaaaaaatgtagcttggtagctgggtgtggtggcatgcacctgtagttgcagctacttggaaggctgaggtgggaggattgcttgagcctggaagattgggactgcagtgagccatgatcatgccactgtactctggcctgggttatagaatgagaccttgtctccaaaaaaaaaaaaaaaaaaaaaaaaaaagaccggcttggtggctcacgcctgtaatcccagcactttgggaggggccaaggcaggtggatcacctaaggtcaggagttcgagaccagcctggccaacccagtgaaaccatgtctctactaaaaatacaaaaattagctgggcgtggtggtgggcgcctggagtaccactctggccgacagagtgagactctgtctaaagcaaaaaacaaaacaaaacaaaaaaaacagagagtcaaaagccrgcagtatcagtgtttgttctattttatgtttaattgacgagtgctttaraattacaatctttagtgttattttacttaattttccttttctaacaggtgtgggccatgtttgaggattgccccagcrttcagttctatgagtaataaatatccacaggctgttttcttggaagtcgatgtacatcagtgtcaggtaagggaaaggaatcttttttctttttaatttacttttgaataaatttgaaatccaacattaatattcttcatttatctcttgatgcacatagtacttattcctttgaagataggaagatgttatgttgatgtcattattacagatgtcattrtggctgcattagttaagaagagtagcacattattaattgcttcaggtttgtattaatcaccttctgatataaaattaatacgatgttgttaataggtcacctagcagttctgtgtattacatttccttatgttttgcaaacctagaattatatcttctacccccgaggtattggcattatatagcagtggcaaggagttcttggttgtagtttgaattgatcagtttgttatcttatctccaaatggacacactgagcagaaactttaaaatggtgattattgttgattgagccacagtgttgtaggtgaattgccctgattatttagttggaatggtatgtggcagttctgtatttgtatatgcagaaatgtggggaattgttaagggaaaaaaaaattggaaagctccttccaatactaaaaagtagagtctttagttctaactaaggaacaactctatagctctgcagctttatctttgttaaatttctgagtgtggaaaaaattttagaatattatgtagtgtgtagttactttgggggtttgttgaaaaccctacattacacacatttatgtttcagcacttagttgcatgttattgcactatatcattggcccctgatttaatcactatttctagaatgaaaatgcttttctcctggagctgttctgtcaggtattgtaaccactggctatgtgtggttactgagcactttaactgtgacaaattcatattgatatgtacggaaagtataaaatacagatcagattttaaagacagtataaaaaatgtaaaatattgcattatctttttatgttgattagattgaaaatggatatattagatttcctgtaatattaaacttgattttacttattttgcttttttaatatagataatagaaaatttacaattgcatgtgtagctcacatgtgctacatatccattgttttgggcagcactttcctgaaaggtcatagttttttcacctagaggctttgagaagacattcctgtgttatctttatgttctttttctttaaaaagtatagtagtgactttcataatatttgaatatataaggtgccatatttgctttactgtttcctttatacttgtcatgaaaagcttaaactaggatactcggtggttattaggtaatttccattcagtagttagtcttatacaattgtggagctaggacagaatttataaagatagctgttagaatgtgttttgatgggtgaccaaaagtcatttctgtaagaataaaaattgggtgacggttgcagtgcaaaatacattacatgctctttttaacaggcagattggctaccggttttcagacctgcacttttttctagtagcagtggtttgtgttgactttatcaatacccttcttggttattctttttgagaaatacctgtaattatgaaagatctgtctggcattaagcacagtttctgcattggaagctaatttttctactggatgatgtatttaccagtaaaaatgataaaaacatggggaatgttctttattgtgtgtgtgatggtaatgtagctatgcccaaaggggaactctcttaggaataggtctattttttccttaaataacaaaaatgcagtattttacatgtttttagttcatgcttatggtatttaacttccataaaggtgtagaatgaatattcaaagtggtttaagatttaattcataacactgtccaacttgccaattctagggaacagctgccaccaacaatatatcagcaacacctacatttttgttttttcgaaacaaagtgagaattgatcaatatcaaggagcagatgctgtgggattagaagaaaaaatcaagcagcacttagaaaatgaccctggaagcaatgaggacacagatattccaaaaggctatgtatgtagactgaaaagtgaaatcataatgtataatatcttgtacatgtcattattgggctaaaatgaaatataactatgtttccatcttctatctcttactggtttagaatacttttaaataagagctttcaaatttattagctgactattgagttttgtctgtatgtgtacgtttgtgtgtgtgttaagcctctatcataaatcatttttcctaaatttctcctaattttctttgccactttttaaaaatctgctttctgaactattttaatagccatttaaaaatacttgctttatacttttttttccagaaaatgtagaaatgtgcattagaaatttttttttcactttttgacagttatgtaaaatgacttacaggttttagttatggccattaactccttttactgtcactcacttcctatagttttatytttttaaatgtatgccctcttttctggcactgtatttaaaaaaaaaaaaaagtctaattactgattttgttttagaatcaaatttgactttgktatcacatgtattctaggttttaagagtaagttatttcaaataacaacataaagacttaagaatctaaaggatagtgtgtggaaactgcagagtataaatagttagaatgcagcattttwaatttgagagctattcaagaaggaagcaaaattkggaagtagcacttcatggtattagattkgcttatacaaataggtaaatcttgtatactaagagatatatatagtttttaakttctctggttacaaagttactgcactggcagatcaaagaatgawttttaaaaaaagttacctcaagttaaagttaatatcttttttttttttttttttgaggcggagtccctctgtcacccaggctggagtgcagtggcacgatctcagctcactgcaacctccacctccagggttcaagctattctcctgcctcagcctccccagtagctgggattacaggcacctgccaccatgcccagctaatttttgtatttttcgtagagacgaggtttcaccatgttggccaggctggtctcgaactcctgacctcaggtgatccacctgccttggcctcccccaaagtgttgggattacaggcgtgagccactgcacctagccaaagctattatcttaaacaatgtataacaggcatattaaagcagatctgtgtcatggagctacaagtcctccctgtaagtctaaattcatgccgaatgaagagatgctatagtccaaaaaaaaaaatgagagattctttctatatgggtgtgtagtaggagattgtaagggtgtcagaaagcatcagtaatgtgataccagcattaatttaaggaagtacaattactatttatttaaaatagacctgtaatttgaaattgtaatgtccaattaggaagtatcaacatatcgtttatgtcagggttgttacatcttttggacagttttggaaatcatttaacttgtaaaccattgtgtttatatctttgtatttttttccctttattactaagggtgtttgcattaaaaagtcttaggaacacagcagtcttgttgcctagctacaggcatacttctttacacatccgctgtggtatgagtgttttggcctcagataggaaataggaaraaatgaagttttaagaaataaaaatttagtttttgtgcaaatgttatggataaaatatgaaaagctgttatttttaaatgtccctttttttctgtcaggtgtcaatcaagacattaaagttttgaactatttaggtctcacagggttattcagtatttaaatttggtaatcttatataacgatgataccattataactcccaagaaatttaatattgatacaatatttctaattatcctacagttaaattttcttaattatccccaaaatattctttatggctgtttcccaccatttaggatcaaatcaaggatcatgcattgcatttaagttgtcctaattaatgttctttagtctagaaacttttctctgccttttttttctgtcatggttttccattttgaaagtctaaaccagcactggtctagtaatatggtagccactaggcacacttgtctattgaacattttgttatatgactagtgcaactgaggaacttaatatttaattttatctaattttaattaatttaattttaaattgccacatgtggctaatgagtatcatattgaatagcatgggtctaggctgttttatttaattaattttttttttttttttttttgagatggagtttcacacttttgtctaggctggcgtgaagtggcatgatctgcaacctccaccgtccccctggcccctgcccctgccgctcgtttgaagcagttctgcctcgggctcccaagtagctgggattataggtgcccaccaccacacccagctactttttgtatttttagtagagagggggtttcaccatgttggccaggctggtctcaaactcctgacctcaggtgatccacctgtctcagcctcccaaagtgctaggattacacgtgtgagccactgcacctagctaggatatctgttttatagactgttgcgtattctggattaacctgattattttcccatgattggcatgttgattataaaggtagcaacatttatttctcattgcaggttttcagaatatgtcagtttccagttatgtcaactatgcaatgtaataatgccagtttgtcccagacagtttttataacaaaatamtttaatgcacccctttaaatatgttttgtgggctgggcgtgtggtggctcacgcctgtaatcccagcactttgggaggctgaggcgggtggatcacctgaggtcaggagttcgagaccagcctggccaacatcagaaaccccatctctaccaaaaatacaaaaattagccaggtgcagtggcacactgctgtagtcccagcaactcgggaggctgaagcagaattgcaggaggcggaggttgcattgagccaagattgcgccactgcaactccagcctgggcaacagagggagactttgtttcaaaaaaaaaaaaaaaaatacatatatatgttttgtgtgccccacaataaataaaaacaaaaactatttagaagaatttacccacttagtttatttttatcatttaggtattgcaagtctgactgtaatgttgtcttaatcctagataccatattgaagtgacatatagataggatggaagacaaaaacattttaaagattttgtcaaaactgcccttttaaggcaaatgttcataatgctccgaataattctgctatagtaaaactttgctctgtagcccttttttcttccctccccatcttttaaattggctatacgttaccctgagtaatacatttactataacatttcagctttgaaagcatttaggctgttttatctgtaactagaggtctatactaatgattattaccattttcatatttacttgacatacaaagttttcttcagtctttgagaattatgtatgtatgtatttgtatctttaaaaaacataatgaaaaccctttgagatagagaggtgaacatgtgactcatctataatacttggtagacttgaaaagtaatccttgtttaggagataaaatggatacttttctagaaaaatacacttttaccaaaatcaactctactagaagcagaacacctaaatagaccagcaccatagagaaatagaagaaatagtagtaaagatttcttccctaaaggcttctatgactttacaggtaaatgttgccaaatccgtataaagatcaggtaatctactgttactgtaactacttaagatcttaagtaaaaagaaaacttttaaatttrtttttgaactgtgacattgatctgataatttgacaaagtatgcaccaaaaaagaaagctgcagaccagtttcaattatgaatattgatgtaaaatttttaaataaagtgttagtaaacaaaattcaataatatcatcatgggctgggtgtggtggctcatgcctgtaatcccagcactttgggaggctgaggtgggtagatcacttgaggccaggagttggagaccagcctggccattgtgaaagcccatctctactaaaaatacaaaaagtagccagacatggtggcacacgcctgtaatcccagctactcaggagactgaagcaggagaatcacttgaacccgggaggtggaggtttcagtgagccaagataacaccactgtactccagcctgggcgacagagtgagaatgtctcaaaaaaataataataataataataacaaaattgagtttttttaaagcatgtaagagttgtttatgttaggaaatttacttaatctgtcacattaatagacctaaggagaaaaatcatgatctccaaatatgcagaaaaggcatttgacaaaatttaaatacccctttattcctaaagcattcagtaaaatcttaataagggaacattggaagcattcctactaaagtcagaaataagacaagcatgaccaaccgctgttaacacaactctgatgtgtgggaggttggaagtgttagaataaagtatacagagatgggcatgtgctgacaccacagggaagtaaacggtaaaatccaaagtattgagaaatctataagctaaatgactagattaaaagagatttcagagacatattaaccaaatacaatttttttttttttttttttttggagacagagtcttgctctgtccccaggctggagtgcagtggtgtgatctcggctcactgcaacctccgcctcccaggttcaagaagttctcctgcctcagcttcccgagtagctgggattataggtgcccgccaccatgcctggctaatttttgtatttttagtagagacagagtttcaccatgttggacaagctggtctcaaactcctgacctcaggcgattcacccgcctcggcctcctaaaatgctgggattgcaggggtgagccaccccgacccggcctccaaatataatgtttatactttttttttttttttttttttgagacagggtcttgctctgctgcctgggctggagtacaatggcgcmatttcagcttactgcagccttgatttcctgagctcaagccatcctcccagctcagcctcccaattagctgggactaaaggcacatgccactgcacccagctaatttttttttttaagttttttagagacaaagtctcactatgttgcccaggctgctcttgaactcctaagctcaagctgtccacccaccttggcctcccaaagtgctgggattagaagcatgagccatcgtaccaggcctttttctttttatctctattattggtgtatacttttttggatctttattctgcgtgtaacaattcaagtgtgaaatatttatgagacagtggaggaaatttgaccactgatttgatggtgttaaggaattattgattgtgataatgatattgagaatgtttttttttaagttcttattgcttagaaattcatactgaaatgttcatgaatgaaatgaaaagatgcttttttttttttcaaactaatcaggaggagagttaggatgtagttgggggttaaagatgaggcaagagtggccttcagttgatgattattgtagctggaggtggtggatacatgggatttactatattattatatttttgtctgtttgaaatttttcatgataaaaactttaagtccttatttgctactcatcttaaattggacatcttcatagatataaagagtccttgaccactagaagagggaaataggctttctttggatcttacggatattttaatttgcatattttcttctgtaaaacacttattttttaaagtataagtcaacattttataatcttaaagacatcatttctgataccttatcaagtaggctaagcctagacttggctttaataattgatggtagatctcagtcagaaatgcaaatgaaaggactactgtaaaagttttatgaactgttttaaaagtgttttctttaaaattgcctaaagagaatcagagatttaaattttttaaayatttttatacctaatccaaatatgttgcctaaaatcttgcaattttttttcagatggatttaatgccttttattaacaaagctggttgtgaatgtcttaatgaaagtgatgagcatggatttgacaactgtttacgaaaagacacaaccttcttggaatctgactgtgatgaacaggtaattgagggctgaagataagcttgtggagattatcactatttatgcctgctcttgtttcttgttcccattttgtggcttaygtctctccttcccagatgatcacttcttcctttcatttctatagcttttagtttctttgactttygttttttgaccatacatacccaccttctttgttcttgtatgtgggctgccaggtgcactaagaaaaattgctgaactcttgggtgggacccactgcagaattgagctcttaccactgtttggtctttttgttcatccttaacctgacttccataccttcttcccactcagatgaatttgtatatgagaaatagagactaatgaaatgagcactccctgtgtggctaattcctttctcctagatagaaacctgtattatattccctatgcttccctgccttgcccttatcacaaagtaagttgggtgttaccaccttgatcaagctttttaaatcttcattttggctgttacttttctcagtttactttctcttccattgtcactgatttgtcccattccagttcatcttctatacggtaacagaagttatttttctaaaatataaagttgcatgtttccattccttagaagagtaaaatgactcttcactggctttaggaggaggctgacttgatctgtttttaactttctcatctcttctgctcttcacctacagttcagttccctaataatgtcatgcttattattttttgatacactattawgggtcaagtataaaaagtattggtgtaactaaaggaaatagcstagttattttcttaggcagataaaccacaacatgattctgaaatcataaatccaaaccccatctttccatgctgtaaccccagagccaccatgtttttcagctttgagagtatcattcacattgtgtttcttgtaaatggtgccctaaaaataatgtaataatgctaatcagcaggactggttcaggcttcatgaaattttcctgctcaggaaatcttcccagggtagatgcataggtacgtacatcaaacacacttttggctggaaagaagattgagcaaatgatccagaagagtttcggagagagaaacattctgacagtgtttcatattcctcttcccttatgtggccttccagattcagtcagtcaagtaaatgtagaatggaagtttggaggttacttcagagctrtaagaaccctattctcttgagtttgggattagagtccatttcagggctagtctctgcataacctgtgtattgcctctaaatcgtcaagtratgtggatagatacttgacaaataaaccatcgtagagctatgtgctaaratgttagtttaaattttattttgagaattttgtttgatttgttagaaagcaggttgcttgccagtttatagctcataagaccttacattcctatgcatagttttagtatttacttgattaattttttcttgtattcccttatatacataactaatagtagtagttctcagatgttatctaatcaagtgactctccacttgctgatttttcatattacgttggttttgttcgatgaattaggttggttttttttttctkgcctgttattttcattctgcttcagtagtttatgtactcaaggtgtgtacaagagccctttaaaatgaaactcttatcttcacagctgcttattactgtggcattcaatcaacctgttaagctttattccatgaaatttcaagggccagataatggtgagtaaaggatagcttttctttaaactaacttctgctttgtagaactgttagcataaaattaaaactttttattaaatagaggtacttgttttttctttttttttttttttgagacagagtcttgtgctattgcccaggctggagtgcggtggtgcaatcttagctcactgtaatctctgcctcctgggttcaagtgattctcccacctctgcctcccaggtagctgggactgggactacaggcaggcgccaccacgcctggctgatttttgtgtttagtacaggatttcaccatctgttggccaggctgttcttgaactcctgaccccaagtgatccacccaccttggcctcccagastgctaagattataggcatgagcaccrcacctggcttgttttggaacgaagcaagatgtaaatgaatgagtaaataatgtgagattattaggtactgaaagtatgaaagaaagagaacttagttatttttatactttttcattttaaaatttgtttccttttaatctgagaagtgctgaatccttttttccaactgttctaaaactgtagcttttgagcagccgtattttagaatcaaaactgaaagatttatttcaaattccttttattttgaggaaactgaggctccagatattcctgtttgtgccctattaatagtatcatttttttatatcgatacatgtaaatatgattgtgcagacttaggatttctcttctkgtaaaataaagaattttccttttttgcccccccccattttttctttttctgttaagctttttctgagggggaayaggggaatggagactagggttctgatttttttttttttttttcgattgattggaagaaataaccaaggccttatttagaagatagcattttcttatttgttctgctaaattttcatgttaataatttttattaataaaattgtacttttactctgaaattacaaagtatttgtataagcaaatgctgtagaaatgagtcttacttttccttcttcagccacaaaatatgggtcttaaatcgtgccttgaagttaaagggattaaggcattctatacatgggactttaccacttatcacatcctaatctaatccctaaaatgaaatttggcaatttttattaattttcttttggctaaatgttgtcactgataatgctctcctcctaaataactgaatgtaccaactattggcaactataagatctagctcaaatgctatttcttttatgaaactttttgttaacctgcatatattgtcagaatctattgtcaccttccttgtacctcctctcctgtggtattttgtttatcgtagcatgtcttttgtagttggggggcagggactccctctgtgtgtgtgtgtctgtttaaatcttatattcctaatatttaccacagtgttagctcggccaagaaggaaccagtaaatgtgttttggaaaataaaggattggctacctgaatactcagacttttgtacaagttctaataatggagttatttgaagtatatgtgtattgatttgtgtgtgtctgtgtatagtgtgagtgtagtggtaaagggagtatagtatatttgaggtttttaaacattttattttattctaccattgtrtaggtcagggccctaaatatgtaaaaatttttatcaacctrccccgatctatggattttgaagaggcagaaagaagtgaaccaactcaagctctggaactgacagaggatgatattaaagaagatggcattgttccacttcgttatgttaagtttcagaatgttaacagtgtaactgtaagtagtatttcgttcatatgtatttaataggtttgtgagtaacmatactattttcagtatcctaggtaagtctaagtgattctttaaagtggtatttattcactcagtttgaaatgagtaaaatgtttaatgggataaattttcttctttttaatttatgtaccctaaagaggaaggacagattgatttttgaatatttgtggggttttgtcagttattttatatgtatatggtaagttttgctggaagtttattctacaactttatactaaaactgaagatatttgtgctttattctttatacctggtatagtagtgatgtgtttgtaaaawcttatttacttttcttgaatatggagtttttamgtgtggtggtcatgatcttagtaaaaatgactttttatttatttatttttttttgagatggagtctcgctgtgttgcccgggctgacttgaactcttgggctcaaataatcttcccgcctcagcctcctgagaagctgggattacaggcatgcaccactgcacctggcttaaaaatgacttttaaaaagataatactacattttataagatgacctaaggtatatctgaattttttcttcctttgaggcaggttcttgctttgttgtccaggctggagtacagtggcacgaccttggttcagtatagccctgatctactgggctcaggtgattctccctcagcctccagagcagttgcaaccgcaggcacgtgccacctcacccagctaattttttatttttgtagaggtgaagtctctccctgtgtggcccaggctggtctcaaactcctgggctcaagcagtcctcccacctcagcctcccaaagtgctgggtttataggcttcagccactacacccagcctttctgaagattgactagtgcttgaggtgattttaagtgatgtattttagatgtcattattaaagtgccactctcaagaatcagctaatttttagcagttattaattgcttttaaaaaatttagcattgaaacccagctcacacttctcacctacagtcatttagaggaatgggtaggacagttagaaaagaatagcagaatacttagaaaaagaaagtaggaaccagcacagagccactgagaatgtcatgccaaactggtacagcttgtttgttgtgatggaataattctatttttgtaaattagaagaatgctaaagtatgtgttcatttaagaatgtttttgagagtttcacagaatatacatagtagtagtatgaagaattataattggctgggtgtkgtggctcactcctgtaatcccagcattttgggaggccaagatgggcagattgctcgagcccatgattttgagactagcctgggcaacatggtgaaaccccatctctacaaaaaaatacaagaactagctgggcatggtgatgcgcctgtagtcccagctactctggagggaccacttgagcctgggagattgaggcttcagtgagctgcagttgtgtcattacactccagtctgggtgacaaaaaaaaaaaaattataatcaagttgagttttaagtattagaaatatcctacccaaatgaaatcaaagaaaattgttatattaaacttagtatactcattatcaaatattttcttgaaataacatatggctgcctatgaaaacaataaaaactgacgaatgagtggcatctcagaatgaaagaagtatgttgtttaaatcacgagaggcagtttttaactggtcatgggagtacgctggtagtcccagctacttgggaggcttaggcaggggcatcacttgcactaaagagttcaggaccagcctaggtaacataatgagaccttgtctcaaaaaagagataggtgcaatattttaaagtagacagcacctagaatattgtgtttttagaaatggagcaaatttcaaaaatccaatgtatgacaaaggatcaatgagtaaaacttttagtttttatcgtgctgaggggagttattaaatatagagtcaagcttaaaaaaaaaatgaggcacatagtattgttttaggagctgattcccaatactattttttcttttaatattctaggaaatagaatggatacaggaatatcagaaakaatatcactttagagattttcctcagtgaaaaactatgattttaataaaatttccaatgatagtctgtcccattgtaattgtaamtcttaataccctttcaacattctctataaagaatttaattgctgggcgcggtggctcayacctgtaatcccagcactttgggaggctgaggcaggaggattgcctgagctcagaagttcgagaccaccctgggcaacacagtgaaaccctgtctctactaaatttaaaaaaaaaaaaaaaaaaaaaaaattagccgggcgtggcagcatgtgcctgtagtcccccctcctcaggaggctgaggcaggagacttgcttgaacctgagaggtggaggttgcagtgagctgagatggcaccactgcaccccagcctgggcaacagagcaagactccatctcttaaaaaaaaaaaaaaaaaaattagccgggtgtgctggtgggctactcaggaggctgaggctggagaatcgtttgaacctgggaggcggaggttgcagtgagtcgagatcgtgccattgcactccagcctgggcaacagagtgagactccatgtcaaaaaatacatatagagagagaatttaattgtgactctgccatactatcacaccaagttaccatgaacttatatatatgggtctcttgccatgacatctctggagaaagtgagaatagcagggcaaacagccctataattagtagtcctatcctataggagtactagtcttaatgttatataattttgattaattttttttttttttttgagccagagttttgctcttgttgcccgggctggagtgcagtggcacgatctcagctcactgcaacctccacctcctggattcaagcgattctcctgccccagcctcccgagtagctaggattacaggtgccagtcaccacacctggttaatttttttgtgtttttagtagagatggggttttgccacggtggccaggctggtctcgaactcctgacctcaggtgatctgcccacctcagcctcccaaagtgctgggattacagacgtgagccactgcacccagcctagattaatttttacaaagaatggagaatatttatgttattaatttaaggaaattgattaaacttaaagcatgtttgtgaagaaggattgtaattataaatgcaaacttttttttggtagatatttgttcagtcgaatcaaggtgaagaggaaacaacaagaatttcatattttacttttattggtactccagtccaggcaacaaatatgaatgacttcaaacgagtaagtttgcttaaatgatacttcgggatagtaaaaatataattttaatggaataatttcatgtatctcaactgtcacactttcttttaacaaaataattcaaaattatatcatgtcatgaaattttacaaggctaaactaggatagaaagttcccctaactatatttttagatatccaacaaagtaatctttaataaaaaatgatgtcttaactgataaaagagtcttttaatgaatgacatcaacataagggtaaaaataatggcttggttatagaaagtggttagtaataatggaaaaatgaaagtaaaatcatttgaaagcagttgtgagaattaaataacttagttgatagtaagattctggtgattatttctgatgaaattttaaattacttgaataattttatttaaaaaaaatggactgagttttaatatactgacatgttaactttccaaaccatgtttgtatgctgaaatagcacatttcatcaaataatgatgaacaggcaagttttctgaagtatttttgtatatctttatgtgtgtgcatataattttcttttgaaaagacacaattataaggttwgtaaagaattaatagggtacatgggacctttgttaatccagattaattccttctgtacattactggaacgacttctaatgggcaacagttccctagcgtcactcttaaatatacagccagagattatcaaagtgctactgagagctttatcagtacagagcgttagttgctatatactcagtttaaatgtggcagcacagaatacataggtatcccactgtctctaatgattgcatctggcaggcagtctagaacttgaggaagagtttccttaggcctggcaattcctagatgaagaggctcccaagagacccttgttgtggaattgaagatggagaacatcttgagcactctcattctttttggtggcatctacagatcttactttaattcaattatagaaaaatgtattagattgcataacagaggatgatcttacaaaattgtatgctgtttttaccaaattgcaaacctggacaataggtattttaactggttgttttccaattactattttcctgtctcatagcgtgattaccttttggggactgcaggaataattatgcactttagagctgttatgtctagatgtttcacatatgtattatgacaggtcagaagaagcagagattaagcatctacatttttacgatatgaaatatgttttattgggaaaatgtgtgagcaacaaagacgtcttggctgcctgctttacctttttgaattagatgccattggacttggctttaagtgtgccttgtgtggtttattcttaacttagttttttataagatctattactattatcttattattttctcatatcattcattaatttggctctagtttcctgtttcttacctcagtttatgctatttgattttcatttttttctgtaaccaccattctatcttgtttaccttcttaccagctagccattcagttaaagtttctctaatttgcatgaataattatccatctaactatctgcctccacctcgtgtttaacatccccctcacatcccttctagcctagtattttctcttttctgactgtcaaactacgtttttgggggctgtctttaggatagcaaaggtgtaagaccttttttgtttgagagtatttgtgcttgttttataacagccatttattcatttgattttttttaactttaaattaccatatgrtagcagttctcaagctttttgatctcaggacctctttatattattaaatactattgaaggccaaaaagaacttttgtttatgtgggctatatttatctgatatttgccatttataagttaaaagtgggaaatataaaaaatatttgtaaataatgaacacatgttaatgaatatttttaaattagaaataagcatattttctaaaagaaaaaccaatttggtaagaagagcattgattcagaattttatgatttttttttttttttttttgagacagggttttgttctgtcacccatgctgcagtgcagaggcayagttatggcttactgcaacctcaaactcctgggctcaagtgatcctccagcctcagcctcacgagtagctgagactacaggcgtgtgccaccacactcggctaatgttttatttttgtgtggggacagggtcttactatgttgcccaggcttctctgtttacgagccttatagtgtcctttccttctcatatctgcttctgcattcagtcagctttcctgtcacacatcatatagcccctggaaaactcccctggatacttgtgaagagaataagagtctaaaaggcaaaaaacgatttagcattatgaaaatagtgttgacctcccagactccttgagagggtcttggagaccacactttgagaactgctacaagaataatttgaataccataatctactcccttgttggtgttctgggcttcttagccccttgcttttaatgtttaataaattttagttgattaagtgattttcttaggtatattaatattgcattttcttgtaatatttctgaatgacatttgtactgtagttattctttgtcttttagggttattctttaaaagtaagctagtatttcattgtttttatattgtacaaagtaacaacttcaatgtagttaaaaaaagaaaaagagggtttacatgtaactgaaattggccagcttagtccttgtacagatagatttgcttattaaaaattataattgagtttggttttcattgaaggaaataatatgtggtatggtatcttttgtccctgtagtacgatgctagtacaatagtctctccttatctgtcggggcggggggatacattcttagacccccggtggatgcctggaaccacagacactaacaaaccctgtacatactgtgtattttcctatacagatggttcccaacttatgatggttcaagtttacaatagtgcaaaattgataatgcactcagtagaaaccattctcttaagtgtggggcagttaagcatttttgacttacaatattttcaccttacaatgggtttacttatttttatttttttgagatggagtttcactcttgtcacccaggctgtagtgcaatggtgcgatctcagctcactgcaacctctgcctcccgggttcaagtgattctcctgcctcagccttccaagtagctaggattacaggcgcctgccaccatacccggctaatttttgtatttttagtagagatggggtttcaccatgttggccaggctggtctcaaactcctgacctcactgccttccttggtcttccaaagtactgggattagaggcatgagccaccgtgcctggtctttacaatgggtttaatcgggatatattaccccatcggaagtcgaggagcatctgtacatatatacataccgctgataatgtttaatgtataaattaggcacagtaagagatttaacaacaaagccagagcatggtggctcatgcctataatcccatcacttccggaggccaaggctagaagatcacttaaacccaggagttcaggaccagctggcaaacatagtaagactccatctctatttaaaaaaaaaaaaaaattacccatgcaagacggkgggtgcacctgtagtcccagctacttgggaggctgaggtgggaagatcacttgagcccaggagttcaagaccagcctgataaacatagtaagattccatctctataagaatacacacacacacacacacacacacacacacacacaaaattacccaggcaaggtggtgggcacacctgtagttctagctacctgggaggctgaggtgggaagatcgcttgaaccctggagttcaaggctgcagcgagctaggatcacgccactacactccagcctgggtgacagagcaagaccccatatcaaaaagaaagaaaaataaaaaagattaacaccaactaataataaaatagagcaattacaacaatatactgtggttaaaagttracatggatatggtctctcccatgcttgctctttctctcactgtctcaaaatatcttattgtactgcaccataggcagttgaaactgcagaaagtgaaagcatggataaggagggactactcttcagtcatgatctctgtctacagcagtttatattcttgtagataacatagggacaaacatagggaaagttaatcaaaattaatcaaagcttagttcaagggtttctttgtccacagagtattctcagacgttaccagctaggtgacttttccttttcccccaacgactgggaaagtctgagaatactttgtgaagaaagagggccttgaactaagttttgagagtagaatttggacagttcaacaggcagctatgggcacccttgatagaatggaaaagtagggacctggacatgaacttaggaaggtggaggattcaatcgttcaaggacaagtcacatgtggcatgtcttttcttttacttgtttgctcagtctgaattagtatatacatagtaattagaattgaaatttttttctttttttttgagacggagtcttgctctgttgtccaggctggagtgcagtggtgtgatctcggctcactgcaagctctgcctcccgagtttaccacattctcctgcctcagcctctgtagcagctgggactacaggtgcccgccgctacgcctggctaatttttttgtatatttagtagagacggggtttcactgtgttagccaggatggtctcgatctcctgacctcgttgatcagcccgcctgggcctcccaaagtgctgggattacaggcgtgagccaccatgcctggcctagaattgaaaattttgaaatagatttggcatatattttataggcacagggaggaaaattttgatgacctctgtgtagtgaagggcgctatataaaatggcttaatgaataataaagtagatcaaatgtttagcattttcagtttatatttttatcttgtgtgagctgtttctggataatttccgtttttagtatgtcactgacttcttatgtcactaagatatctgacagaagctaaggtaatgctgttgaatctccaatgtggacagaaatcttagacaacctttcatgctattacaactttgaaggttagacttttaaggtttgacagactagaataccccttccacttgtctggttttggctcttataggcatcacgcacagattataatctatactttggctgtttgttgttgtcaatggattttttgtgttgcagcatgaaaagcttgccattgccatcttaattggaagtagatgtttttgctaaaatatgctctttatatggattgctttattttaatayagaatttttaattacaattttataaaaatacaaaaatgagaaaattataggggcttctgcttcttaggaaatgaggtgcatgtgaaaagatttttatcactataataaaaatagacttttctaaactggccattcaccgtatcagctatttttgtaacatttctgtctgtttatttttcagcttttttaatccaactcaaatgaactaaaaacagaagatattttaaaatgaagtaatataaagattgaccttgtctcactctactcccctccttgcttctctgctcatctagcacctgtctgctctcacccttcccatgttctcgccattgttggtgcaagatttctacagcttctatcatctggatcagccttgttacctaggtttcctcaatcatctctttcttcagatctcatcctagttgtgtttcttaattggccttttattttgttttggcttttgttttgggcttgcaactaggtgctttaattttttaccataccgtgttgctcactagcctttttttttttttactttctactgtttcatatttaattttgtattacattttgaggcataacatcacaataaaattaaattgttataaaatgttttagatttaactagttgaatagttttaatccattctaaactttaaattttatttcctaggaactatagaattcttttggaaaacaaatatagcagttgcatcaagttcttttatgtttgtgctagtttaatatattgattacatttcagttgaggggtgttggttttcttttcctcgttggaatgttagccccaaagtccttttgatgattgatkggggcatgtcctctgcttttgcccaagtgagctcaaaaccagttgaaggacttatggactgaatattaggttgggttaacatattaatatagaagatcaatggactctttactgaataaatattttttacacctaatttttatgtacctaaattttggtttgtctgaggtgtaatataaagacttaagaatgaataaaagagctttacgtttgggatgacaatccatgttggaatgttgaatttcttcttttttacagaaaatacacattggcaagttgagagttatcaacctgtgaaacagtatgcagatttgtgtcttctgtatcacatctgctagaagtttaatttttaatatttgtttttgttttcttttgcttaatctaatagctttgtgttttgtgtttcccaagtaatacaatgatcaataatgctctcagtgtttatcagcacaaaatttacttgtgatagagataatgccagttccccttctagtggctcttaaaacctgaatttcttactcttatccacattcttttatatgaaactgcctttttatcatcttgctaccttgtgagctttctaacatggtgtctttkgaccaaaggggagttcttttaaggtactagaagtgagttttcttagggtgggaaaaacatttctaggattgtgtgattgggatttcagtggaaagctttcaggtctctcatgaatgatgttgwcccagctatgttatattttagaccagacatgtactgatgacctttatgagttttgctggtatagatactgccatttagaatagaatcaatgtaaaatacgaaaattaaatatataaatgtacacagaaatctttctacacaaacatacattcagtattttgcaagtaggtttctttcaaggcatttttgccctaagaatacattatctaatgataaactgtaagttgtcagtacatttctcaattagaacatagttttcaaactctcctgcagagaatttgttttctagatttgttggtagagaacaaatttttattcttcacatttttatgctgccacatatatagcaaccagaatgttttttataatcctccagtagaggatttttctaatcattgacagaaacaaggtttattcatttcatttttaatagtactcttaaagtaaccaggatctttttcttaaaccagaaaaaattagtcacttttaatctgttttcattgcatgtcagtgtattgagggggaaagtctggaaatttgctatattgggcatgaaggacatgagtttaacatacgcttctaattccagattcttttgtgatcgacatttgatttctaactatctaaaaatagtatgtcaaatatgttttactcatatagcatcattttttaaattaacttctctaaactttcaaccttgtttttaaaaattgctatttwaaaaaaaaaaaaaaactgtgtgaaaccaaaaatagcctgcatgtgttttatttttaatyccttgtggctgggattggaggggaggtcacagtttgcttcaacagtgaaaatacattgcatgccagaaaagatccaaggataaaaattaataccaaggttttaaactgattattagtatttttaataactcatatttaaaatcaataggatgtacatataaacttatttttgtttttctaggtagttggcaaaaaaggagaaagccactaaggtacaaaagacactggacaaccatattgcaatcagatctacagctcctggataattgcttgattctcgccagagactgtcaatgtttcattcattgccattaccaataaatcattgcttttgttcagatggtatcactagtgtttccattgtaatcttgacacatgcawttgtaaataaaagtcaccacttttgccaagcttaatttttgtcwttctaaatcagtattttctctttccatgtatttgaaaactggttaacttctgattttagtagagacttaagtgtctggtagtatattgattgaaagccagtttctttagaaaaggagaaactgttctagggaattaagaagtacatgtgtacacattcatggcaagttattttgataagtgaacctggaacagctaaccatgttaaattattactgcatttttattaaaggacatttgtatatctgagctatggaaattactcaaattataaattagaagaaataaacaggtttaatgagatttagctactcttacctaaaacttagctaatgggtccacagattctttcttggtatatatcaagattttaatctcttctggtaaactttaaaatttgagtcagccttttttttttttttttttttttaactaatagaagaatgtggaaatcagacagttggggaaaaaatacagcatagtgaattcagaaaacaggaattggccaggtgtggtggctaatgtctgtaatcccagtactttgggaggccaaggcgggcgaatcaccagaggtcaggagttcgagtccagcttggccaacatggtgaaacctcgtctctactaaaaatacaaaaattagccaggcatggtggcgggtgtctgtaatcccagctacttgggaggctgagacagaagaatcggctgaacccgggaggcagaggttgcagtgagctgagattgcgccattgcgccccagcctgagcgacaagagcaaaactccgtctccaaaaaaaaaagggaattattacccttaatcaagtatttattacctgaactaccaaaacgtgcagtgtaaatatacagagaacatgatttaaggttgaaaatgaggtgctcaaatagaaatgtttaaaaggtctttcacaaaaggctggtaaaatatctattcgttaccttttttatcttaaaattgtaatctaaaaagtattggtagttttaattttaaaatttctgagtattttgaaaactatttttaaagagtacataagactgtaaaattgtgattcagttaaacatttgagggcattcttgtctaggaatatggtagagataccatttgcctttgtgagagcagtgtgtttatacttgtttatgaaaaaattctacagaagttttagtgttgaaagagtccctttctgaaacccaagtgtcattagatagtttagttcatttgtatatgggcacattaactggtctgtgatgatcttaacactccttaaatagaccatctcagattaatcacatctgaaattaaggataagattaatatgcagggttttggtttacagttttgtacacttaacctttctgagtaattgttaaagtgcctcatcctaagtattgctgaccttttcctatttatacttgatagtttgaaaacccagtgaaacaaatttcgtatttgtaaaggattggacatcagatttatattgtctatgtgactcttctataacaattagttgcagtatgcaagyattacataattcaaattgtaaatagtgaaaaatgaacgtttataggtaactataacgtttcacttaatgggaaatcttactattataaatgtgcataattggcatttaaaatatcaagctgaaatgctgttttctcctaaaacagtatatatatatacacatatgtatatgtaacatttatatataacactgaattttccagatgaataagagcatttgaaaaaatgtaactctagttattttaactgaagttatttattagtgcatctagaaaactggtattcagtttcttgttcattttgtcggacatagcaaaaaagaatttcatgatctctgtattttgttacattgacatcaggtgcttttgatgagaaacaacagtgaaatatcgtgttcataatagaaacgaaagtcaggtattgcagtaggaagtctttgtcagcttaatgctgaagccaagagtagcacaaggtaccacattcttgtgcccacgacaggcttttataatccttctgagttctctttgacatcaagccccacgttgttccccagtctcaatattctgttggaggcagccacgtaacaattagagttgaaacctgccccacgttgttccccagtctcaatatactgttggaggcagccacgtaacaattagagttgaaacctgccccacgttgttccccagtctcaatatactgttggaggcagccacataacaattagagttgaaacctgccccacgttgttccccagtctcaatattctgttggaggcagccacgtaacaattagagttgaaacctgccccacattgttccccagtctcaatattctgttggaggcagccacgtaacaattagagttgaaacctgccccactttgttccccagtctcaatattctgttggaggcagccacgtaacaattagagttgaaacctgccccacattgttccccagtctcaatattctgttggaggcagccacttaacaattagagttgaaacctgtctgccatcctttgtctcaatgtttgaggatgtatgcagtgtttttggcagcgattataggaatgcagttgtttatttggcctcagcagtttatttatggctgcaattaatatccctgatcatgggcttttaaacctaaaatagttcagatcctcccttgttcctcttaatgtctaaaagctttgattctgtaataagaataaagtgttggagttgaataaattagttacaccctttgtaagctttaaaaacatgaaatttaaggcttactcatgttgcttgtattgatactcatatagttcaatttagtaggttaatttttgtgttaggtatatctcttctggaactgataatttgtaatcttagactattttttttttaagataagtaacttagagtaagaaatccagctgggaacagtggctcatgcctgtaatcccagcattttgggaggccgaggcggctggatcacttgaggtcaggagtttgagaccagcctggctaacatggagaaaccctgtctctactaaaactacaaaaaattagccaggcatggtggcaggtgccacacccagctacttgggaggctgaggcagtagaatcgcttgaacccgggaggcggaggttgcagtgagccaagatcgcatgactgcacactagcccgggcaacagagtgagactgtctcaaaagaaaaaaaaaaaaaatccattcacagaactgctaaagaaaaactagaggaatattttgctcatttagctttaaaactcattattagaggtgtgtattttacagttttgtaaatatagattatgctttataatacacataaagcaagtatatataacatgcatatagtaaataaattttaaaatattgactattccccagttaagcctatacttcttaaggaagactactgatgtcattttaagcatgtttcaaaattcaagttttatttttgatcaataaggtttttttttttttttaacatgctcagcactataggaataagaggacagtggagatttgtaggctaataagatcgcttttaaactttgtggtccatgtaaaattattagttggagaatgtgtaattagagaactataagataaagagataacctttagaatttgaatgtactaaaattgtacacagcttggaatattaaaatcttaaggatatgcaatgttaaaactgctagagtatttttccttcgtgcttgctatgcttctctatgggaagaggaattttattttggaattatttctaagttgaacagaccagaattaattgtgaaaacatgatctgttggtttataattggacacgcatttggagatactggctcatcatactacctaggagcaaaatctctgaagtttgaatccctgctcttccacttgttagctgtgtcatcttgagcaagtaacatccttcagagctcaaatttcttcttgtgtaaaaataggaacatctatctcttagacttgttctgaagatgcgccttactttgtatctggaacaaggataagtatcttctgtatcctgctctcagctgtcactgctttttaggccatcattacttgcttggcatactgcagtgcctcctaattgtctctttgtttctgctctggcctctctcatgtatctcccacatggccgctggttctcttttctttatggggtctttgtaatgtaatctctcctcctctagcctccccatgcccctcatttctccagtgtgctgtgctgtattaccaggtagcagaacgtaccctaatatcgcatgccttcctctgacctaacttttccatctgaccaattcctacttatctacaaggctcagtccaaggaaaactgataccgggaataatcataacaattgtgcacgcctcctcagctgctatgacaccttgccattatttcatccggatacttatcaagctacttgtaatgatctgtagtcttatttggactactagattgtgagctgtaatacaagtattttgtctctagtattaagccagtttatttggtttctatcattaaatacaatgttgaaaaaattctcagggtccaaggggagatgcttgggttgagtcagagataaagtaggaatatgcagttgaggaaggtaaggaagataatttagctgaagtaaaggaaaagtgcatagtgtgttcatagagtgggagttaagtgtaagagacattctagggaagtgaaggagaagctgaaagagcaagtagagacggtaaggtgaagctcctcttgccatgtgaaagagatcaaactttctccttaatttatgggaggagcgagcatagagaagtctgtgatgtctcacaaggttctcacttttacaattgaatatagaagtagctcttaggagaagcagaacgttcagaggggaagatgaatatggttttgggtacattgccttaaattgcatttttggtatttgggtggcgatgtctagtaagtaaaaagccaggaatgtgattttagagcttagagctagaagcaaggaactaggagttgtttagatgatgaaaactgaaatatgtatatgaatgggaatttttagaatataaagggagagaatgaaactaaggagcaaatgttagggaatcctaagaaatattaaagaattgggaaaagaggaacctggaaggtagagtagtaaacaggaaagggaggaaaaacaggaggtggtaataaagtagtgttaatgaatccaagagggagcagtcaccatcttcaaatgtgatattgaaattagctgggatgtccagttgtttaatccattaaattgtggaaacagtctttctagtgcttaattataggaatcattgatcatattaataaactttcagttgaagcatcagcagataattattccaaaaccctctggcaaagaaatgtagatgcttttatagtctaccattgaacacagttttacgtgacacttggcaaaacttggagatggatggcactattttgtaagagaatatgaaacactgctttgaagttgtcattaaaggatcttatcaggtgctttttctcttgtattttgtttataaattttgtcctatctgtcattctagtactgtttttcttgattgcttttgttctcttaaaagtttctaatttcacatcacaaagatgattcctgttagagtcctgaatgggtcattgagttgccttagtaataagggttctaattttggggggcattatcaaatatattaattgttaatacctgctcttctggggtttccagtaaaaaggaactccttcattagatccctgtaatctccctgtgacaaagtatagtagagatagtatcatagtttcatttcyctggtcacataattatctcaaaggaattgacacattgacagtattaaggatgctgctgcatgagtttagcctcgactgcaggtgacttttacttttaaaaatgggtatttaactcaaaacagacaatggcagggagcctgggcataaatgcataggccaactggaaccccattaaaaattcctcggccaggcatggtggctcacacctgtaatcccaacacttagggaggccgaggcaggcagatcacctgaggccaggagttcaagaccagccaggccaacatggtgaaactgtgtctctactaaaaatacaaaaattagccaagcatagtggtgtgtgcctgtaatcccagctacccgggaggctgaggcaggagaatggcttgaacctgg

SEQ ID NO: 95119 - DNA, 17215 bp, Homo sapiens
taagttttttattttttattttttgtagagatggggtctcactttgttttccaggctggtctccaactcctggcctcaagtgatcctcctgcctcagcctcctaaagtgctgggattacaagtgtgagccactgtgctcacttcatgtaagttctatgaaagcagggacttgtgtgcttttgtcatgactgtatctccagtgcttaatgcctgtcatgtaatgggtgatcaatacaaatttattaaatgaatgttcacagccaccagtctagtccagtctaccatcatctgagttggaccagtgcaccacccccataactgatctccctgtttcatgtctggctgccttcaatccattccccactcttcagaattatctttttgaaatttagatctgatcatttcattttcctttttaaacccttaaaaaaattttttttttgggacggagtctcgctctgtcacccaggctgcagtgcagtggtgcaatctcggctcactgcaacctctgtgcacccccgaccccgggttcaagcacttctcctgcctcagcctcctgagtagctggaaatacaggtgcgtgccaccacccctggctaatttttgtatctttagtagagacggggtttcaccatgttggtcaggctggtctcgaattcctgacctcgtgatccatccacctcggcctctcaaagtgctgggattacaggtgtgagccaccgcgcccagctccccccacttttttttttttttttttttgagacagagttttgctctgtctcccaggctggagtgcagtggcacaaccttggctcacttcaacctccaccttccaggttcaagggattctcctgcctcagcctcccaagtagctgggattaaaggtgcccgccaccacacccagctaattttttgtatttttactagatacgggggtttcaccatgttggccaggcaggtctcgaactcctgacctcaagtgatccgcccacctcggcctcccaaagtgctgggattacaggcgtgagccactgcgcctggcccttaaaatgctttcatggcgcatttttgcccttcagataaagtccaaagtccttaacatgacttgcaaggtgtctgctctttggccctgactaccttgtctcttttccccagccaccttagactgccttgagtttttagctggaggcagtctctcacatcagggccttagtatatatacttgtccctctacctgagatactctttctccaactcacctctcgggtctcagtttgaggctcatttcctaggggagacataggtgccctgacctttcaaactaggtaagctcctttagggtccagctgcaacctcatctcttctggagcgcttgcttccctctacatatttagtttcttttaaattgtaagaataactatttagttcccacctatgaaatgaagttgtaccatttaattaaaggtgatgaaaatattcctgaactgtagaaaatgtaatcataagcttgtaaacatgaaaagtactttgagtacactattgatttaggtgcttttatggagttacggtcccttttaagaatctgctgaatgctacggactccagaataatgctcatttgcaagtacattgtatactttttcaaaattcacagaaaaggctgggtacggtggctcacatctgtaatcccagcactttgggaggccaaggcaggcagatcacttgaggccaggagttccagaccagcctggccaacacagtgaaaccccatccctactaaaaatacaaaaaactagctggacgtggtggtgcatgcctgtaattccagctacttgggaggctgaggcaggaggattgcttgaacctgggaggcagaggtagcagtgagccgagattgcgctactgcactccagcctgggcgacagagtgagaccctgtctcaagaccaaaaaaaagaaagaagaaaaaaagattcacagacaagtattaaaaaacgtcatgtggagagtagtgcacaaacgtcatctttctcttgccctctcaactctttaagactgatttatgctcttaattctgtcgcttctctgttctacctcctagaatttagtcatcagcagcattctttcaccttttatcatctgtgttttctcctggaccttttctctcagcttatataatagataacaattcaaagtatatctttttccataacactttattctacttttgaataactttttttatttttattttttagagatgggagtcttgctatgttgcccatgctgttctcaaactcctgagctcaagtgatcctctaatcttggcctcatgaagtcctgggattacaggcatgagccactgtgcccaaccctgaataacttttttagtataaattatcagaaatagttaaaaaaatgaacattttttctggttcttttgctactcattgccatatttttctctcttttttttttttttgagacagggtctcactcctgtcacccaggttggagtgtagtagcgcaatcatggctcactgcagccttgatcttctgggttcaagggattctcccacctcagcctcctgagtagctgggactacaggtgcacatcaccacacccagctaaaatttttgcttgttttttgtagagacgggggtctccctgttgcccaggctggtctccaactcctggcctcaagtgatcctcccatctcagcctctaaatgtgctgagattacaggcgtgagccactgcgccttgcctccgtgacacttttcatttatttccttttcgtccgaagctttgtgtaggacatgacacttttccaaatgctttcctaggccaggtatggtggcttacgcctgtaatccctgcatgttgggaagctgaggcgggaggattgcttgaagccaggagtttgagatgggcttgggcaacataggagatcctatttgaaattaaaagaaacgaaacaggcagggcayggtggcctgtaatctcagcactttaggaagcccaggcgggtggatcacatgaggtcaggagttcgagaccagctcaggaggctgaggcaggagaattgcttgaacctgggaggtggaggttacagtgagctgagattatgccactgcattccagcctgggtggcacagcgagactctgtctcaaaaacaaacaaacagtcattatttaatgtccagctccatgagggcaggggctgtgtccatcttgttcactgctaatatcccccatgccaagcacagtgcctgatttagagtagctactcaaagaatatctttaggccaggcgcagtggctcatgcatgtaatcccagcactttgggaggccgaggcgggcggatcacgaggtcagaagttcaagaccagcctgaccaatatggtgaaaccctgtctctactaaaaatacagaaattagctgggtgtggtggtgcacgtctgtagtcccagctactcgggaggctgaggcaggagaattgcttgaacctgggaggcggaggttgcaatgagccaagatcgcgccactgcactccagcctagacaacagagcaagactctgtctcaaaaaaaaaaaaaaagaatatctttaaatggattaatgaatgtgaataaaaaccactaacccagaatttattcttgcatctgtttcgtgggattagcccaaattctagccatatcaataaaaatttactaatcatttggcctaactggcctcccggcctcgtgttccatctcccttgtgagccatcctatagccgcaaccacagtaacactaaaacaaacaaacaaacaaaaaaacccaagtctgattgtgttctcttcccaaacctctgctatctcccccgctgcctacagaatacagtcaacgctcctcagcttggattcaaggctttggccccaatctccctttttaaacctctctaggcttatttattaagtgcttattatatgccaagcactaggctagtcactgagttcataaaccagttggagagacaggtacattgactaattttaataaggtgtgatcagcactattacagagactgtgagaacacagatagtttcaggtaatggatgataaaatattgtttttgacctctgcaggttcacgagttctgtctacaatagtaatgtccaatacagtggtcagacacatttcaagtgctcaatagccacctggggctagtgtctgtcacactggatagctgagcacagatacttttatcacccatggacgtgggggttaactatagctgcttccaagacagcaagggagccgggctcggtggctcacacctgtaatcccagcactttgggaggccaaggcaggtggatcacgaggccaggcgatcgagaccatcctggctagtatggtgaaaccccgtctctactaaaaatacaaaaaaaaaaaaaaaaaaattagccgggtgtggtggcatgcgcctgtagtctcagctacgcgggaggctgaggcaggggaatcgcttgaaccggggaggcggaggttgcagtgagctgagatcgcgccactgcactctagcctgggcaagagagcgagactccgtctcaaaaacaaataaataaataaataaccaagacagcaaggaacatttcccatatgtgaagcctgtggtgctagctaccagttccccaaacacaacccctctccccaacaccttggctcgggtatattttgtagtacaggctcccaagagaaagaatgcatgaaagtactttgtaaactattaagtgatacagaaatgtgatataataaacaggctcagaggtcttgctttcatcatggctttggttacttcgagcaaattatagctcttttctcaaactactcccacccctataatttatgccaaagtgttctgaaaagaaacacaggcaaaatggttatcctagggctaaaaatcctgattawacctaccttgaagcttttaatccaggaccctacttcaccacccgcctgctctgtcactttctctacaaaggaaggacacgaagtaagacttccaaaagaacaaaacgtttattttttaaatttaagaattatgggaaacctaagtaatgggaattgcatcctcatcggggtcttctggcaagtcggaagcaccaccctctcctgtagctcgatgcttctctagtttagcaatcaattctttcgctggattgaagacgccattggtctgctggtcacagacatagcagcgcggggtggtgcggaaatgctgcagtgcacagctctcgcagaaataatgcctgcacttggtgacaactgggttttggaagctctggcgacagatgaaacacttgaatggtatttcctcatcatcgcttcccacttcatagttttcatcctcatagacaccatagcgaccctcatcaagctcacgttcgatctgccacccatgcttgtaatctgaacggtcatggaggaatttgcagctgtctccgaagccgcagaagccagtctctttgtagtccttacagatgtcgggctggtaatcccagcgcacggtggcacgtagatgctcgggcgctcggatggggcccttcctcaccatcccggaagaggcattgcccatagacgtatccttgggcttcatgtatttctgataattgttgattccccgatagatcttgtcatcctccttgcccctcagctcctcctggatcttctggctgcgctcaaagatggcttgtgcatcgcgctctttctctgtgtccagctcatagacagctgtcgctcccatatcctctggtcccacgggtttcgcsgaacgggtggatttataaaccacgccgagactctcgggctcattttcctcttcctcttcgctgctcaagtcgccgtaagccgccttctgtttaccactgtcacgggtcttctgtatcattggattgtgggtcacccgcttcttttccggtcgaaccacagtgcagccttcgtcgctactgctgccgctttctccgggctctgggtcgcaggccgggcgctttctgcgtccagcagcccctttccgcccaggctttttgaaaaggaaggtgcacacctgatccaccgcctttcctggagaaagctgctctgccattttagagtccygagctccgaaacagccgtggctgcctgggttgcacttggcccctgcacgtcactccacgttgcgcgctccgccgggagtcgaagcaaaagacactgacggaagaggactgcgagagcscgagcgcccgtctctcttgtgccctagcagakkccgtcgcttcttccggagccgtacgtggcaccgccccgctcgcgggcggccgcggggcttgctgggaagagaggcgaagccaggtcaccyttcaaggacccagaagtagggttttggcctaggtaacggggcagagatgtgrttcgagattctccccggactctccgtcatgggcgtgtgcttgttgattccaggactggctactgcgtacatccacaggttcactaacsggggcaaggtaagccggcttcggcccgggggccgactccacgggctgatttccgaaaagggtggtgggcagggagaccgtyagcctgcgaaccctctctccgaggtcggccctctacttgcttccggttgcctagaagccgaggcttgcgaaacgaagcccgatagaaactacatcctgctctagtgaaaaacagcgtttctgggtgtatcagagtgggccttagggcagagtagcgacgcgggggccgggaaggtagattagaaaaggtggctcaagcctgagaatcgctcactgcaacctccgccttctgggttcaagagattctcctggttgggcgcggtggatcacgcctgtaatcccagcactttgggagaccgaggcgagcggatcacctgaggtcgggagttcgataccagcctgaccaacatggagaaaccccgtctctcctaaaaatacaaaattagctgggcgtggtggcgcatgcctgtaatcccagctactcgggaggctgaggcaggagaatcacttgaacccaggaggcggaggttgcgatgagccgagatcgcgccactgcactccagcctgggcaacaagagcgaaactccgtctcaaaaaaaaataaataaakaaagaaattttcctgcttcagcctcccgagtagccgggaccacgcctggctttttttttttttttgtagagrcggggtttcatcatgttggcgaggctggtctcgaacttctgacctcggttgatccacccgccttgatctcccaaagtgctgggattacaggcgtgagccgccgcgaccggccacccttgacttttttattccccactttctcttgcaagcctttaggaatttactgcgagatcttgtttttttacatcaggattcattttcccctcttcctagtccttcacatcatctcwagagtacaggatataaatttatttactttttgattttgttattgttcttcacgtgtgatctacagctgttgtttcttagtgtcccaaaagacaacaactagatatttcttttttttttttttwaaaaaaaaaggaaaaaaaattcatgttggttaaaatagtgtaaaaagtcacaggtaccaacttaatcctaaagtttagtggtctgattttatttaggagattctgttctttgtactactaatttgcatttttatttaaacgatgattccatttctctggaatgtcccttttaaaaattgtagtatctatcaattgggtcactcacktttataaactgcaacaataattgtctcttatttgaaggaaaaaagggttgctcattttgggtatcactggagtctgatggaaagagataggcgcatctctggagttgatcgttactatgtgtcaaaggtaagatgccactctgatgccagccttttgccagggttgaggtgggttctggtaatgccttgccaagggtcatacagtgctaatatataactagcattttcttatctactagtgaggttggcatctttttacatatttaatcttttatatttcttttttttttttagtttttcttctgtcatatatttcttattctgtggattgttgcctatatcctttgcctgttccattgtctttttctttttgagctatggttctttatatattctagactttaatttttttgtctattttatatatgacatttttcccagtctgctgtttgtcttttttactttatgatgtttttcatcaggtagttctaaattttgatattcaatgtatcatgttttgttgttctggattctaggtttttatgtctcccgtacaaaggccttttctatctaagattataaaaatactttcaaaaaataaaatagagacagtcttgctgtgttgcccaggctggccctcaaactcataggctcaagtgatcttcttgcctcagccttcggaggagctgggactgcaggtgtgccactatacctggctcataaaaatacttttaaaaaataatttctcctaatattgttagtttctttaaaaaattagttatttggttacatctacaggtcattttggagtataatgtgaaaggaggattaactttacttttttccaacaggtagctagttatcgcaattacccatttatagaagagtttagtagtcctagctactcagaaggctgaggcaggaggacagcttgagcccaggggtttgaggctccagtgaactaggatcgtaccactgcactccagcccgggcgagagaatgagagcctgtctcaaaaaaaaaaaaaaaaaaaaccaccaagcacccaatttatttttatttgtaataccactctggtaaactaaatttccatgtacacatgggcctgtttcacggatgtgcttttctatactctaggtctgcctattcctgcaacaatacttcatttaaagaattactataattttatattttgattcaattatgacattgccatttttgtaggtcaaaaacgaccaagcagtagcatttcataaggctcaacttaatagtatattttttgtttttctgtctttttttttgttttttgagacaaggtctcacgctgtcactcagtctggagtgcagtggtgcaatcttggctcactgcaacccccgcctcccgggttcaagcgattcttgtgcctcagcctcctgagtagctgggattacaggcacctgccaccatgcccagctaaatttttttttgtactttttggtagagatggagtttcaccatgttggccaggctggtttcctaactcctgacctcaagtgatccgcccacctcaacctcccaaagtgttaggattacaggcgtgagcccctactcctggccctaatagtatgtttttatattttgtaggagtagttcattctcatacttcttttaaaaatgtttactttttaatattttctccttcctcatttattcctcacaacaaacctaagtaaatagtatttccattttatagacaagggtcagagtgattaagtaatattataaggactcaacctgggtgatacacctctcagtagagaggtagttgagaatctaatccaatgaacatgataatagatatctacttatctggagccatatttctcaaagtatggtccaagaataaccatcagaatcacctagcatgtgagacagaattaggatttytaagagatggctccaaggaagatacagttttaacttctcttaaggcagttcttcctgtaatagtaaaccaaatacctggrctatgttatttaatacctagaagaagtgtcatcactgatgagtctttttttttttttttttttttttttgagacggagtcttgctctgtcgcctaggccggagtgcagtggaatgatcttggctcactgcaagctccacccaccaggttcaagcaattctcctgcctcagcctcacgagtagctgggattacaggtgcgctgtaatttttgtacttttagtagagacagggtttcaccatcttggccaggctgatcttgaactcctgacctcatgatccacccacctcggcctcccaaagtgctgggattacaggcgtgagccaccacgccaggtgtaatcttttaatttatagcttctgaagtatttggttgtcaacttagtaagatccagtaggtattttgaatagatagtgtagtgcttgtcagagaagggttcgggagttggggtccctgaattctggctctgctaattccttatggacttaagcaggtgacttttaacctctctgagcctccatttcctcatttgtaaaaaaaatggaatgagaataatagtatctacctcatgttggctgttattttttaaaacagattttaccttcttgtcctctgactcactgaggtgctttgtaaaaggatccaggtggaggccaggcatagtggctcacacctgtaatcctagcactttgggaggccgaggcaggtggatcccctgaggtcgggagttctagaccagcttggccaacatggcgaaaccccttctctactaaaaatacaaaaatcagctgggcatggtggcacatgcctttaatcctagctacttgggaggctgaggaaggagaattgcttgaacctgggagatgcaggttgcagtgaggcaagatcgcatcactgcactccagcctgcatgacgggagtgagactccatctcaaaaaaaaaaaaaaaggatccaggtggtaaagagttgcttgactttagttctgattgggggtcggggaaggtttgtttcatataaagcaatatgctgctgtcagaaaatgaaaactagaaatcattacaggttattctttagtgattataaaatttaatccaatgtattgttgcagttagagaaatgtgggatgtggaagcactctttttaataacaatgccatttaatgacactggaaataaaagtacatggcatatmtttgatgggaacagacttgtcacattctcctttttaaactgtttttcagggtttggagaacattgattaaggaagcattttcctgattgatgaaaaaaataactcagttatggccatctacccctgctagaaggttacagtgtattatgtagcatgcaatgtgttatgtagtgcttaataaaaataaaatgaaaaaaatgcatttcttttttttaaatatgttacacaaaatcaagcaatctacccaatgtagtctttatcacttaaaaaaaactagaaggcaactgtgaggcttgtatagacataatgtacatccataatgtacatcaagcacctgtctctgtgcctagcagctaatacttcataaattgtagttgctactattgtaatagacactagtatattttatttaactttatttatttatttttttagacagagtcttgctctgttgcccaggctggagttcagtggctcaatctcggctcattgcaacctccgactcccaagttcaagtgattctcctgcctcagcctcctgagtagctgggattacaggcacctgccactgcacctggctaatttttatatttttaatagagacggggtttcaccatcttggtcaggctggtcttgaactcctgaccccgtgatccacctgcctcggcctcccaaagtgctgggattacaggtgtgagccaccggggctggccagtttttatatttttagtagagacagggtttcaccatgttggccaggctggtctcgaattcctgacctcaagtgatccacccaccttggcatcccaaagtgctgggattacaggtgtgagccattttgcccggctgatattagtaaattttacaaacatagtttcttcagagatgaccaggggaatacagaaaaagtattttttttctagttccttttctgagtggatcctacaatgtttaaaattccagttggttaggtttgagctgagaggggtgtaagaagataattccaggccgggcgcagtggtggtgtgagacaggagaatggtttgaaaccgggaggtggaggttgccgtgagctgagattgtgccactgcactccagcctgggtgacagtgacagagtgagactccgtctccaaaaaaaaaaaaaaaaaaaattccagttgggatatgtttaaaacggattgcaccttcaaccttcatacattctgtatagtatctaacaaatagtatatgcttaagttaatttttgttttagtatacagcaacagcaatcattcggtttattaaaatgagagtgtactgagcacttgaaatagagatgcatgttcaacattaaaggtaaccaaagatgaagatctgaaaagataaaactaaagatggtgataactccatgtgtataaagcaacaccacagatgacacttccaggtgagaatactaagttgcttttcattgcttatccagtttaacatttgatctggttaccttgaacatgcctgcactgtgtgattgccattgatctaattttatagggcggggcttatagaaggaagtggtgtttaaacttacagtggtggctggattgtgccatcccttgatcggcaatgaccttttactttttactgtataaggaaagcctggtcatgattacaaacttaatagaacctgtattatcatttaatgcttcacaggccttgtgtaattgactgttaggagaactatcgccggccgggcggtggctcacacctgtaattccagcactttgggaggcgggtggatcacctgacatcgggagttcaagacctgactgatcaacatagagaaaccccgtccctactaaaattaacaaaactagctgggtatggtggcgcatgcctgtaatcccagctactctggaggctgaggcaggagaattgcttgaacccaggaggcaggggttgcagtgagctgagattgcgccaccgccactccagcctgggcaacaagagtgaaattctgtctcaaaaaaaacaaaaaacaaacaaaaaagctatccctggaaaggaaggaagagggcaagtagtacacctagggagttgtggatacagaagatgtgttgaaaacatgacttatctattactacttttattgatttttaggtctgttatttctccattttgcctgtaggcagggatcatcccctacatttttatgtccttagacgactgtcacagctacacagctgtatagtgaggggctacaaaatgacaggtagagttggttaggttcacggttaagagtccaaattcttcactgcccttttttgtagcatctgctgtgaaattgagctttatttttgtactctactgctagggggtgagccagattaaagcactttgaagatagaagatttaacggtggatttcttttattttttcttttcttttttttttttttctgcaagtgcaattagaagggttttcttaagcagctctaactgatgtggtaaagctactgatgtcagatccatctgtcaccagctcttaaggcctgttaaaatgctgcttaggaaactatcccatttgctcggttttatttactatcattaagtttttaaaaaatagatgttatattcacctagctcaaaatccaacaatatgaggtatgcagtgaaaatagttgctctaatcccctgcccaacacctgtcaattgtcacaccaccccaaagggtttcttttttttatttttttgagatggtgttttcgctcttgtcacccagactggagtgcaatggcgtgatctcagctcactgcaacctccgcctcctgggttcaagcaattttcctgcctcagcctcccaagtagctgggattacaggtgcccgccaccacactcagctagtttttgtatttttagtagataaggggtttcaccatgttggccaggctggcctcgaactcctgacctcaggtgatccacctgccttggcctcccaaagtgctgggattacagctgtgagccactgcgcctggcgtgggtttctttttactttaaaaataatcctttttggctgggcatggtggctcaaaaaaaaaatccttttttattaaacccaaaccaaaaatggtcaatagtgtttctttttctttttttctttttttcgagacagggtctcactttgtcacccaggctggagtgcagtagcaagatcttagctcactgcaaccactgcttcctgggctcaagtgatcctcccacctcagcctcctgagtagctgggaccacagcaggcacttaccaccacgcctggctaattgtattttttgtagagacagggttttgccatattgcccaggctggtttcgaactcctgggctcaagagatctgccagcctcggcctcccaaagtgttgggattacaggtatgagccaccgtacctggccaatagggtttctttttgcacatacaaatacaaacgggttcttctgtcttgtatgcaattgtagtatctgacacatactgttcacttctttggaagtttggaataatggttcttgtttgaaattacatgtaccaggttgttacttgtagggtcaaataaagtagtcaataggaaaagactgaaaaaagatagaggaagccacacatattcagaaggaagaggaagacaatggcgttgccttttgtttgggaaccaaatgatcacttagccagtggcagagctgggactagaatcctgatgttttgactcccaacctagtgtattgttctttgtggtttacttcactaaacactgattgagtaaatgctacatgccaggtgctgtacctcagatttgaatatgacaccacaggccggatgtggtagttcacccctgtaatcccaacactttgggaggctgaggcgggcagatcacttgaggccaggagttcgagaccagcctggccaacatagcgaaacccccatctctaccaaaaaataaaatgacctaaaataaatgaatgtgacacagaattgctctgcaggaactcagtcagtgggagtgacagacaactatgtgaaggataagtgctgtgacagaagtttgcagaaggtgctgtgggagcgcagaagtggggcaacccagccttgggttgaggggaaaggaaagagcttagggatacgtttccagaggatgtctacactaagctgtctggaaggctggataggatttacgagacaaacaactgaggggaggacattccaagcagagggaacagcataagggtggggacacaaatagcatggctatgtgggaaactacaagcagttctgcagagcgaagagtgtgaggcagaagagagggaccagagaggttggcagggcccagaacgtgaatgtctccccctgggtgtcggaattcctcctgagggcgactgggaagtctagcaagaggtaggagagtgatgtgacttgcgcacatctgcctggctgctctgcacagtggttctcagctgggtgagtttgcctcccagggcatattgcaacgactgcagacatttttccttgaggcaacaggaggtatgggtggggaggtgttgctgacatctagtggttagaagccagtgatgcttctaaacatcctaagatgtacaggacagtcccacattgacagtttccagtagccttaagtgtcaatagtgccaaggttgagaaactctgaaaacagtagcaggttctccattaaggaacacagtgggaagtgttttttaaaaagattctgcctgggcacagtggttcacacttgtaatcctagcactttgggtggttgagacaggagaactgcttgagcccaggagttcaagaccagcctgggcaacacagcaaaactccttatctattttgaaaaaaagtattaaagagtccgggcgcagtggttcacacctgtaatcccagcactttgggaggccagagcgggccaatcacttgaggccaggagtttgagactagcctggccaacatggtgaaacctcatctctactaaaaatacaaaaattaggccaggcgtggtggctgacacctgtaatcccagcactttgagaggccgaggcaggcgggtcacctgaggtcaggagttcgagaccagcctggccaacatggtgaaaccccatctgtaccaaaagttacaaaaattagccggacgtggtggtgtgcatctgtaatcccggctacttgggaggctgaggcaggagaatcacttgaagccgggaggtgaaggttgcagtgagccgagatcaagccactgaactccatcctgggtgacagagggagactctgtctcaaaaacaaacaaataaataaaaatacaaaaattgctgggtgttgtggtgggcacctataatcccagctactagaaaagctgcagcacaagaatcacttgaacccaggaggcagaggttgcagtgaaccgagatggcgccactgcactccagcctgggtgacagagtgagactccctctcaaaaaaaaaaaaaaaaaaaaagcgttaaagagagaaaaaagttttaaaaagtcctaattattcagaaatgtatgggagcaatttcccttctccctccctctcctggttctttttttcattcagatctctgttggctcatctgtaaacttgaagcatatcccttccctggaggcgtttgtttttccaaggaagtatcctaatgtactcttctttctttctttttttttgttttgaggcggagttttgctcttgttgctcgggctggagtgcagtggcgyaatytcagctcactgcaacctccacccccggggttcagccagttctcctgcctcagcctcccgaatagctgggattacaggcatgtgcactacacccagttaattttttgtatttttagtagagacagtgtgtcaccatgttggccaggctggtctcgaactcctgacttcaggtgatccacctgccttggcctcccaaagtgctgggattacaggtgtaagccaccgtgcccagcctcccaatgtactctcagtgatgtgcctcagcttgagaaggcacagaacaacatgtttcttttccaaatagatgatgtaagatgtggagacacagaaagttgggagtaacttcacatcaggaagctgcaccacctgtgggttgtgtggcctttggtaggtcacatcactgatcttagcttcagttctcccatctctcaagtgaggacagtatgtgccctgcatacgtccctgggtagctgagaagatct

SEQ ID NO: 95120 - DNA, 38927 bp, Homo sapiens
  misc_feature (1)...(38927): n = A,T,C or G
tggagtgcagtggtgcgatcgctgctcactgcaagctctgcctcccgggttcacgacattctcctgcctcagcctcctgagtagctaggactacaggcgtccgtcaccacgcccggctaatttttttgtatttttagtagagatggggtttcactttgttagccaggatggtctcgatctcctgacctcgtgatccgcctgcctcggcctcccaaagtgctggtattacaggcgtgagccaccacgcctggccgatttccttccttttctatggagataccactttgcttatccactcatctgtggatgcacacaggttgcttccacctcttggcttttgtgagcagtactgttatgaacgtgggtgtgcaaacatctttttgagaccttcctttccaatctttggtctctgttctcaaatggaattgctggacgctatggtagttctaattttaatttattgagaagcctctactgtttcccatagtggctgtatcattttataaccccaccagcagtgcaccagaattccaatgtctccacatccttgcaaacacttattttctgttttttttttttttttgatagtagccatcccaaagggtgagtggggacaccacgtggctttgctttgcatgtccctgataattagtgatgttgagcatttctcgtatgcttcttggccaagtgtatatcatctttggagaaatgtctgttcaagtcctttgcccttatttatttatgagacgggctcggtctattaccaggctggagtgcagtggtgcgatcatagctcatagagtgacccttcagtgctttcccacactcccctggggtccaaccttctgccgaagatgccccagctctctgcagttccctgcccaggccccaagactcctttccctgtcggaaagtttcttaggcttcctctctctggggtccccacacacctctgttcccctccagcacactggcccaggccgggccagcctgcttcaacacagtgtcaggaactcctgtggtgtccacaagcccagtgccagcgcttgcctgccgtgggacgcactgtgtgcctcaggcccctcactcgccaaataggacagttatcctctgcctcggtgtggtcacaggggtgaaatgtgcctggatttgcagggtggctgcaacagcgcctggcccataggcagtaccatgaagactcacagtgtagggcaacagacgacgcctgagcggctgaagaaggtgggctcccagggcctccctgcccaggcctgctgccacggccagaacccaggggggcaccgtgtacctcgccagtggcctcagcactgcgccttgcctccaggagtcttggcttgtttgtgtggagctggggactgggagagcagagcttgtgacctgaggccccccagcctcagggtggaggtgaccaccctggaccaaggcctgccccagttagtggctgaggacagacaggagtacgtgtggcattcctgcggccccttgctcggcacccaggcacttcctcctgcccctctgcctctggaaggccagccatggcatggccacgggggcctgccacctggcacctccccaacacaatacataaatgagtgggtgtggctgttccaagaaaactgtgtttacacacacaggtgcgccaggcctggccgtcgagccctggtttgccggcctttgttcgagaccagtggttcccaaatgtgcacctgtatcagcatcacccagagcggggtcagagtctggactcctgggccccacgcggagttgttgtcaggggcctgggctttgcatttccacaggttccaggtgctgctgctggagcggaggccacgctctgagcaccctgctctagaagaagagatgcagaaaagacaggcagggctgcagaaaaggtaggcagggctgtagggtggtccggaccaccgggcactgtcaaatggcagatgtccctccgctctgctctgggtggggctggggccggagtggattttataaacactctgggagggtcccacccagaactctcctgcgctgtgtggaaggagggccactggggagggtgtagatgggaagtgagagagaagaggggacgaggagacccctgggtggccaaggaaacacttttctgaacaatcaaaaataaaggaggggcaggcagaacgtggggacttggctggggctgcctaggttccctggactcacctcctggcactacactgcctggggagccagggggccaggagccagggagcgactggcacaccccacaccttcctaacccagcccctggtggggagcccttccttcagcagcaggcagcacagcgatggccaagtgtccctccagggggacagacgtttgcccctccacgccactcacccggggtgaggccgcagcaccctccaccttgctccaccgtggccagcttctggcctcccctcaccaagccccgggacttcacgtgaagatcacttactggccttctcccctcgcggtcctgggttctctcctcctcctggcctctgaggccagaatgctgaggctcagactagggcctttgtctctgctgacacctcgctgctgtcacgactttgtggtccctgtgccactgactgcaggacgcgcasstgagtctccttggacctgcccaggtggcccccaagcaggatgtgtccaacacaccttgcttccctctgcctggccccaggccccactctggcccctgctttctcagtaaggacatccccactccgtggctgctctggccaaagacaggagagtcaccctttctcttcggcgcgtaccyctcaagctccagcttgtgctcccagcactcccaccttgcacttccccatccccagctcctccccaccctgcccaaagccctcctgaacccattcttgtctcagtctccgcacatagcagccagagattaaaacaaaccagcccaaccctcggtggggctggtgttcacctttggggttaaattgaaagtccttgcgtggcaccacagtcactcagcgggcatcccctccctctgagtgctctcgccccactgacctgggcactgtggggccatgctcactcctgcctcgggcctcagcacctgtcccttcctggcagcctgtcccgcctggcatgctggctttgctccaatgccaacccttcggagaggccttccctggccaccctgttgtaaacagcactgcctgtctccgtgttccctgagtgttcctccaggcactgtcactgccagacgctggtatttttgtctactatggcccccaccctggctggtacactcagaaggacgggctgcgtcccctgtgcctagagaggcwtctggcacagagccagccttcaacatatattgcatgaaagattccgtccaaggacgctgtagatgtaggtggacgcagacaaaagcaaagcaggacagtggattcgtccaaagaccggcagtgtcttcaggtgaagctgcagcgtcgagtcctggtgcttgcaaggtttcagcagcagaaacctgatggggctccttgcacctgggagaaaagccactccagtgaggattattgccagtgaaggctgccctggccccagacaagttttcctagaatttatggtagcaggcgggttgttaaaggatgattcccgaaagggccagacatggtgctcacagggatgcagggtgagcatgcgtcgaagagcttccctagcccaggcagctgtgaggaccagctcagaagagaagtcctgaaacagacacttacagatgaggaatattgacatgattgtgcaaatggacmtgaaactggattttcagggggctgtgatgggctggattgtctcccttagattctaatgttgaagtcccccacaccccagtgtcttagaatgcaactgtatttggaggtagactttaaagagatggttgaattaaaatgaggccccaaattcaatctgactggtatgtctataaaaagagaaagtctggacatctggagatacatcagggatgcgtgactgctcagaggaaagaccctgtgaggcacagcaagaaggcaccatctgcttgcccaggagacaccaacctgtgacaccctgaccttagacttccacccccaagaactgtgagaggtagacctccttgcactgtaaatcactcgttctgttactgcagtcccagaaaactaacacagacctttgctgggcagaatgcctttgcttctctgcagacaagattacttttgcactattgcactgttgttatcaaaataattatatggggctgggcatggcggctcacacctgtaatcccaacacttagggaggctgaggtgggtggagtacctgaggtcaggagttcaagaccagcctggccaacatggtgaaaccccgtctctactaaaaatacaaaaaaaaaaaaagaaaaaaaaattagcctggtgtggtgtgcacctgcaatcccagctattcggggagggggctgagacaagacaattgcttgaacctgggaggcacaggttgcagtgagccaagatcttgctactgccctccaggcaacagaataataataatttttattatggaatcagtgtcaaatgctggtgccttctgggggcaacacacagtttcccaccaaagtgcatcagtgccccaggcagtcaaggtgccaggagacgaggaggccgcggatcttctgtccacctgggagcaagcctgcagcttgggaccctcctgggaccctgcacccgccagtgccctgccctcctgggctctcatgggagtgaaggagggtgggctctgtaggagttaaagaaagaggaaagaaacatgaaaagcggctcaacaaaggcaggtttattttggagaataaacctgaaagggacttctggccgattttggtcaggagccatctctcctacagactaaggatctttaagggtttaggaagtggggagcttatcgcaggctcggaatgtttctatgtgagggaaagtttattgcgggcttggaatgtctctggtcggaggggaggttatctcgaggttggcatgtttctgattggagatgttatttgtggtttacggtcgtgctgacattagctattgggctgatgtgttttgggctggatttaggcagctttttaatcaaagggaacctaaaatggcggtgtttgtccaagaaggccatactcctgctctgtcccgctccagcccttgggggcccctcgggctcttctcttggatggtgtgtgaatgggcacatgtggaggggctggtccagctctgcctgcctctggccatccaaaggagggacagcagggcctgggcagcaatgccggccttggagccccggggctgtggaggctgcttgacaggacacggagccccctctgtgctcaggtcgtggagggcctcgggcactacggtctgccaggcaccacatgtcacagctactcaaacacccagggccgccacggagggccaatggccgcaggatggctcaggacccgccccacccctgtcgctgcctttctggctgccccctagtccctggacaggcgctccccagccccaagcaggccccagccaatctcctgcccaggcaggagctccccctgccgccctcacagacctcacctcttcctacacgtttccaaggccgcgccccgccscgcaccccgccaggccccgccccgcaccccgccaggccccgccccgcaccccgccaggccccgccccgcaccccgccaggccccgccccacccgccaggccccgcgccaggccccgcctctctctccgaccctggacagtccccgggacccaccccgcccccaggtcctgcccccgcccgcctccgcggggcctcccaccctcccgggcagactccactcccgccccctccccgtgggtgcccccgccggccccgccctcccaggctgcccccggcgccccgggcctcctccgcgcagtccctgagtcccgcaggccctgcgtccccgctgcacacccccgtccactcccgtggtccccggtccggcatggcgcgcgcggtggggcccgagcggaggctgctggccgtctacaccggcggcaccattggcatgcggagtgagctcggcggtgagtccgagaccctgggcggggtaggcctctggacctggccgcgaccgggagcctcggaccctcctgcacccacgggggtcgttggggagtcaaatccgcgcctggatggggggtgcgggctgaggtcgctctcctccggttccggccaccggcgtccccacgcatggagccccgacctggacagaggagrttgcggtgggttctcgccgtcgcggtgctcccgggagcgccctgcgaccctggggccaggccccctgtgctgccgctgcgcccctgagggccagcgtcctgaagtcctggaatatggggcgggagggccccagggcattggcctgccgctcctgctctggacacagaaggcttaggaggctgccctggagaaggcttaggaggctgcgaggacccctcamctgcgacacccaggagggtgtccccgtcccctggggtcctggtcaggcagcagtggttggcacgatactggggctacctggcatctgcggggacgcacgtgttcacacccgaggtggcctcagagccctgcttcctctgcccctgtgtggacctggttgaccagagaccagcgattgcgtctggactgagtyctgcctgggtggggtcagggcctgggacaggcaccgagctctgtggtactccagcacagtgctgccagcctgggctgggcacaggaaggatggtagcttggggagcctgaggccaccgggatggggagaggacggttgcactggagcctccagaatgcctgggtgttccccaggagggcaggacactgcctggggcccccagatgggctctgctgtgatgtggggcctcccttggggccaggacagccccctcgccccgtcttgaacctgtttgcgaccctccatgggccactgcctgcctttccctcaggagccctttccactcctcctcctcccactccctgctgccctggcccctccccacactcctgcttgtgtccagcgcagctctctctcctgggacggctgggaccctctccggctctgccagagcccagggcctcccctggcatgaccagaacattctcttgtcccttgcccatctgccaaccacttccccgcccctcctatccccaccccctctcacggcctgttccctggcagctgcccctcctggccacccctttctgctgaagtggctgctcagaagccaccagcactctgtcggtgctctcagattccacccaccacactgtggccggtgcagacccctctggaggcccactctgcgcccagcccaggagacaaagcctagtggggctcgtccacgagggactcaggtccccargaacgtggctgtccaggctgccgggagcctcctctgcacttctccttctgcctgtgaatggaacaaagtcattcacagcttggcaaacgcccctgtgtgacactccactgacacagagtgacacaattcctgtgcttggccctcacaagctagagagagaggctgccattgaagggatggcatgcattaaggagctagtcccaggggcaggatctgccagggccctgtaggggctgtgggctgataacagggtctgagctgggtgtgtggatggtgtggagtttggaggcagcccagggagggcttctctgaggacacaaggcctgcaggacaaagatgggagagggccaggccaggagcagccctgcaaggtgcaggaaagaggagtggggagcccagcagggccggagcctgccagagctgcccccgagtggggacaggacctggggactctgtgtggggcctcgtccgacgcccctgacgctaccccttcaggcttggagtgtggccaactgcagtttcrttgagctcaacatgtagttcttgagtggtccgagctgcaggggcaggtggactctgtaaccccaccacacacccgtctcgcttggcccccgcgtgctcgccgcagcagcctgtgggtgcactcacacgcgtgcaccgcatttctgaaagaggctgtgaggtcctgtgtctgggtgggaaacaagagacttggaggctggaaattgggtgtggggcgtcagtcttcagacctgaagcagccttctgagatcccttggtgctctgtgcactggggtcctggcttctgctcagcagcccgtcctcgtgtggctgcgaggtcacccccagctgttgctagctgacccatgtggggcatccacttccaggaacctgcaggaatgggctcccccaacccctcgtgaggttggagcagccagactgtcaggcgtcaatgatttactccctccacactgctgacgtgggctctggccttccctggggaggtgagaggggagtggtggctttgccctagtaaagctgtttgattgtcgctgttggaacggcttctgcgcctgctggtaaacagtgacctgtgggtggaacgctgcacacctggagccctgccagagttcagggagggcagaggtgatgccagtggggacgccccttgacccatcccttctctgagttcattgaagctatcacaggtcaaggggcatagcgaatccaaacacggctgataaccccaagcccaagctggcatcagtggccacgttctgtacacccgagaaacttgaagacttcctatgtcaaactgggaaccccacctgcttgccggcctgtcccaaagtccctcctgagcccggctccttgcaggcacagcagggagggcagagatytggggccaggcagctgagagaagctccctgcccggtgaccacacgggtcccagcagtcgagagtgtcagtggagtgatgcccatggcttcttggttactgcagtggcgtctgtgcccttggcctggacctccttcctgaatgggtgctacacgttcacaagtttctaagcctaagcttgacttcgctggtgacagtggggcccattgtcttagagagcaaagcctcctttccaggtgtttggcagggggctgaggagtttccaagtcaccagcaaactcaggcacctgcctggatgggccaaggaagaggttccaggcagggctggagggttcagattctgcagcccttgaagcttttggagggccctcattgagaaaagtaatacaagttacaaaatcrtagttaggtgtgaaagccggtgtttgtttattttttatttatttttatttttttgagatggagtctcactctgtcgcccagactggagtgcagtggcgcgatctcagctcaytgcaagctctgcctcccgggttcacaccattctcctgcctcagcctcccgagtagctgggactacaggcgcccgccaccgtgcccggctgaaagctggtgtttatttaaaataacaaaagaaattgccccagctgactgggcgcggtggctcacacctgtaatcccagcactttgggaggctgaggtgggtggatcacttgagatcgggagttcaagaccagccatggacaacatggtgaaaccctgtctctactaaaaatacaaaaaaaaaattagccagatgtggtggcagatgcctgtggtcccagctactggggaggctgaggcatgagaatcgcttgaacccaggaggtggaggttgcagtgagccgagatctcgccactgcactccagcctgagtgacagagtgagaccctgtctcaaacaaacaaaaaaaactgatgccactacatacctgttagaatggctgctgacgtacaacacattgactgcggggtgagtgctggagccccagagttggaaagtggtccactcgcaggttggtaagaaaactttactggcgacagtataggtttgaaaaaggaacgtttggccagacatggtggctcaggcctgtaattccaacactttgggaggccaaggcgggtggttcacttgccttgctaacatggcgaaaccccgtctctactaaaaataaaaaattagctaggtgtggtggtgcatgcctgtaatcccggctactcgggaggctaaggcaggagaattgcttgagccsggtgggtggaggttgcagtgagtcgagatggcatcactgtactccagcctgggcaacagagtgagactctgcctcaaaaaaaaaaaaaaaaaaaaaaaaarggaagaaaggagaagaaaaagaaaaaagaaagaaattggccaggctggttttgaactcctgggctcaaatgatcttcctgcatcagcctcccaaaattctgggattacaggtgtgagccataaaaaccactgcaaaagcacatatggagtgwtttgcttgagagaagaggacaccaagagagtttagtcttgtctttggctgatttcgcctgtggtgcccacacatgcccccagcagggacagcagggcccatatccacgcctaccactctgcagcattcctggaagtttctggaagctgttcccccacatgagtcagcagcagctggaggtgaccttgcacaacgtgagcatgtcccacaaaaccaaaccagatatgccccctccacctttcccataaggcaccccagcttcacccgccgtgatgagtggagagtgactttttgtttcctgtggccactgtgccgggcggctgaacatcacagaagttcgttctgggttctggaggccgaggcctgagaggggtttccccgggctgagccaaggtgctgcagggcaccgctccgtcctgacgctctgcgggaggagccacccctgccacctccagtgtctggtggctgctgcaatccttggcttgtggccgcatcactccagtcatccaggccagcatctccaagggccgctctgccctgtcgtcatatggccttcccctccccgtgccctgtggccttccacctgtgaggaaacacgagagggcgtttagggcccacctggattgtccagggccacctcccgccccatgacccctaatatcacatccgtaaagacacttccatatgaagtgacacccacaggtaccggggattgggatgtggacatctttttaatttttatgtatttatttaattttttgagacagtctcattctgtcacccaggctggagtgcagtggtgcgatcttggctcactgcaacctccgcctgccagattcaagtgattctcccgcctcaacctcccaagtagctgggattacaggcacctgccatcatgaccagttaatttttgtattattcgtaaagacagggtttcaccatgttgaccaggctggtcttgaattccagacctcaagcaatctgacacctcggccacccaaagtgctgggattccaggcctgaggcactgcgcccggccctgggatgcggacatctaggatgctttttcaacccaccatacatgagacagggacacttggacaccggtgtggggtggaccctgagccccctggatgcccagggtctgaggttgggtccttggggttcacaaggctggtgaatccagacctttgttccggcagcccgtgtcctggctgtgctctgggcgcctcggagggcagacgggcagacaaacatgtgcgggctccgcctcccccgtctgctggctgagccctactggcggggtgattttgtcagcggctgcacctcagccggcctgcatcttccagtcctctggcaaacgtccccggggctccacaggcctttgtgtaaggccagaggaggatcacgggtgccataaaccttcacggggccaagggctggtgtcccggggctggtgacttaacaggcagagatgtggagaccagggtgagcccagcagtggagggcgatgtcagggaggggtgcggctggagggatattagagggggctgctttaacttgccaagtttggggttaatttgtgagccagtgataggcgatgggtacagctgcagagggcgaggggggaaagcaggtgaccatggctgggatctgcaggataggatggggcattgctgctgggggagggaagggagggccgggagggagctttgggacttgctggaggccctggaggggtggctgaggggtcagggctttatactgagcagctggccccagggaatgagtggtgtggccaggtctccatttaagggacagaactgagatgcagaggctgcaggaaggtggcagagytgctgggggtgggaccagcccgtctgtgcacttgctgtgtgctaggccctccaggtcggggagctggggaaggggacctgggctggaccctgagggagtcacacagtccgtgccctttgggagctcgagggccagtgagggagaatgtgggaatagcactacagcctgggcatctgggagggcttcctgggggtggtgtcccaatctgggccttgaggcacctactgggtgagaagtggggacgaggcaggacttccaggcagagcccacagtatatccacagtgaggcaaaggctgagccccgtgggccttggtggggagtgtggactaagcatttggagaaggaggtgggagcaggggcagggcctgggtggagcagctagagacctgggcagagctcctggggccgtccaggtgcgaaatgaggaatcaccacgggctccaaggcaggaagccatggcttccaaacgcgggtcagccgcctgccctctgaggggkcccaggggcagccatagcccttcctcccagcctctgactgtcataagaccggagccccatcccaccagctctggtcctgcccctcagtgagggaggaggcggccatggctgtcagcccctgaccccagcatccacctggactctgcctgcagtgcttgtgcccgggacgggcctggctgccatcctgaggacactgcccatgttccatgacgaggagcaygcccgagcccgcggcctctctgaggacaccctggtgctaccgtgagtgtgggctcctcccagtcccggacagggcatggctgctgaggggcaccgatcctgaggctgggcactgctggccaggcccacgtgagccatttgctcacycctgtctctaacatcccctcagcttacagggctttaggactgaccagcagtcgccttccaccagagcctgaacctctgagggtgccccgtgcctggtcccaccttccctccccaccctcctcccacacccccagccaggctgcttyggcaagtgtgatgagggcgccccgtctagggatcctgtatatcaggagccagctggcccaggtggccttgcccccagcatagaggtccttccatttctcagctctgggcccagctccctgatgtcccccacagctgggggtgagctgggagttgccctcgtggtggctgaccaccayagccgccacaggcgagcctcctgcaagcatcctctcctgcctgggsatggctggtcccagcccccctcttcgagctggtgtgggaagaagactgctgggagtggcccatcctgaccyacgtccttgcctctgtggggagctycaggtggaaggggggcygggccccgtacctgggatgctgagaacttgctatgtgcggagcccttggcgtaggggccccagctctgccagaggggaacagagcgggtcagggcatttagagcaggaggaggtgcagagcgggagcctgctgttccgcctcctgctgtttctgtcccgcagcccggmcagccgcaaccagaggatyctctacaccgtgctggagtgccagcccctcttcgactccagtgacatgaccatcgctgagtgggttygcsttgcccagaccatcaaggtagtggggctggggaatgctgggtggggctgtggtgtgtgggtggggctgaggtgtgtgggtggggctgtggtgtgtgggtggggctgtggagagtgggcagggctgttgggtgtgagtggggctagggagcacgggtgggaatggggagtgtgggtggggcttggagtgtgggcggggctgtggagtgtgggtggggctgtggagagtgggtgaggctgtggagtgtgggtggggctgtgggtgtggggtgggctgtgttgtgtgggcagggctgtgttttgtgggtggggctgtgttgtgagtggggctgtagggtgtgggtggggctatgagtgtgggcggggctgtgggtatgggcggggctggtggatgggcagtggccggcagaaacactctgggacgggtgaggagctgcagggtctggggtggagtcggcctgcccagcctggggcctgggagcatctgggaatggcagcttcaggaaagggcagggtccacgtgtcagagctgcgggcaaggctctgagttcctctcccccatgcaagctgggggtgggcgtatagggccaagtcgacttcccagatgaggacacaacgggaacagttgtcttagcctgtcccagttagtatctggggcgcggtgtgtggtgtgtgatgctacctcgagggccagcaagctccttgtgcgtggctggtgacctgctcactgccctctgtccgtccccgcccagttggagtcttagtggatttagtggagtcttggttggagtcttagtggaccacagcacctctcaaagactcttgtggtttacagcgacctgtgtgctccccctgcaggcagaaccaccccccgccccatcagcttttcttctcccttctcccccatcacaacacgctcccatgttaccggagctgcctcccctagtagrgggcctcctgcccgctccagtcccaattctcacctgcttcccttacgaaccccctgctcccctgagtgggaacatctaggcttccccttcccagcagcagggtggcaggcagcaccacccaggacaggaccctccatttgtrgccggcagccctcaccgggcaaggcgtgactgctttttgaggcccacgaagctgccctgcggtccttgctgcagggagcagccctgggcagcctcacaaaggccttctcggctcaggtggcccagcctgccgtcttgccgcgagtggccagcagagggcgcccttcccctccttggcctccgctcctctgcagttcccaggcctacggggcttggtcttttaatggccccccgggcaggcccaggcttcgtatggagccctgggctctcggaacggtgccctggcagccgcagcctgggccagccaccctccagggggtggtggccggaggacgtccctgcatggccagcttcactgctgcccttcggtgtcctgcccggccgcccaggtccagatccaggcaacctccaggatcacctgctggttcccggccatggctgtgccttgaccctgcaggcgtccttgtgcccaccgttgtgttcttgcctgacccgcggtctgggcttcgaggctcgtgcaccaccacagccccctgctgccatggagaggcgctctcccgcccttggggagtgtgcagaggccccttggagggactcattctcgagtgctctgaggggagcctcagcgtggtgggtgcacccgagtggcatggaagcctcggggcagggagagcgtgggagtcccaggactccacgccaggggctaatcttccagagagggacttccaggccagggtcccacgggtgcctcccctgagtcctcctctctgcatccggaccctttcccccatgctgcaacctcccccacacctgcttgcgaggggctggcctgcctgagcatgcgcccctcctgcagaggcactacgagcagtaccayggctttgtggtcatccacggcaccgacaccatggcctttgctgcctcgatgctgtccttcatgctggagaacctgcagaagactgtcatcctcactggggcccaggtaaycccaggggcccggggctcctaggaacaggggcttcctgaggccacagggcaagtcagcgctrtgggcggccgctgcgggaccccgggcttcctgctcagcccagcagctcctgaggtggctgctgcagggcccgtgctggggctcgcaaatgctcaggtcctgcccgggtgccagcaccacctgccccgcrggaggggggtcatctcctgctggtggccctgggagctgtgaggccctggagcacccagagccaggcccacctcggccctgggggtgccaggcatcccttcctctcctcccgatgcttccttgcggctgctgcccacctctccatctggcgcatcagggtggccgcgcacagagccgcaccaggaggccccggccatgtccctgcctttgtccctctctttgctccgcccactgtgggtctaggcgatgccatcctgggggccctggcacacgatttccctgcctctctcaccctaacccagcacaaatcccataagccaaggccagtagagtgttctggaaaactggatttgaggggatgtggcaggggaggttggctagaagctgactaggggtccatgttgcctgcgggtggcagtgggcacctgaaccccttgggatcctttcccacggctgaggctaaggtcttgtatgggaaaccggtacctgtgtccctttgagcttggtggcagttccagaaagctccatggaggccctcttaggaggtctgcggggagcagtccggggaggtggctcagccaccccactctgcttgcctggcgccgtctcccttgtccctccagrgtctccccagggcccactgcacacacctgttagcggtggagcagtgcctcccgccccagaactcgagaaggagggacagggctccagctggttctcctcttcccagaccttcccgagccctgggggagcagaacatcccgtggacctctctaggggatcaagggcacagttatgagcaccgcaggacccacgaacgttcacatgcrtgttgtcctcactctgatgttggcctgtgccgggacatccttatccctgttatacctgtggggaaactgaggcttacaggctaggggctcacccacagccacgtaccacgtgagggctgagccagggagcacccaggacccaggactgccaccccctgccagggctctctccctccagagcctctgactgaccacttcccggccgcctcctcctgaaaaccctggcctctgcaccgccacctgcgccctcctgggacgcgctgttcagtcaaccatagcacagtcgcccatgctagacacaggcagctgtgggaggagctgtactgtgcctggcatcccgaggcagttcctttctgtcacagcccacccacccctcacccccaccaccctccttccagcccatagttctgctggggtagcgagggagctgggcagggcagctgcggtgggaggcctgtgatgcgttctccagtatggggaccggctggcccctgctgccagcactgggctcttggacctgtagagggagctggtgggtgggttgaggccctgggtgcaggctggcatggtctgcagccacagctgttggtgggtgggttgaggccctgggtgcaggctggcatcgtctgcagggacagctgttgttggcggccttggagacagscttactgcccagctcctctgagtgccccgttcccccaaggcacccatctccaggctgcctgctgcagtccaagccygcctgtccttctctttcccacacccgcctggggctcctgggctgggcctgggggtttacctggagagatgagccagacatcccaggcttctgggcttcccaggcctcagctactcygtggcctctcccccaggtgcccatccatgccctgtggagcgacggccgtgagaacctkctgggggcactgctcatggctggccagtatgtgatcccagaggtacctgcctggtgcacgtggaggcggggcaggtggggtgggggcaggagcccagacagcagccaggaaacaaagtccccccagcccctccccagacgccactgccaatagctgggtgcactgtcttctagatcttatgttgtggatatttacattagaggtacgtatggaagttctacgttagagatacgtatggaggttctgcgttagagatgcatatggaggttctrcgttagagatacgtatggaggttctgcgttagagatgcgtatggaggttctgcgttagagatgcgtatggaggttctgcgttagagatgcgtatggaggttctgcgttagagatgcgtatggaggttctgcgttagagatgcgtatggaggttttgcgttagagatgcgtatggaggttctacgttagagatgcgtatggaggttytscgttagagatgcgtatggaggttatrcsttagagatacgtatggaggttctacgttagagatacgtatggaggttctgcgttagagatacgtatggaggttctgcgttagagatgcgtatggaggttttacgttagagatacgtatggaggttttacattagagataggtatggaagtttctataaaaacaggttgcagccagcagggctctgaagggtgtcactttccctcccccatgtctttccctgtttcctgtggcgtcccaggaaggagtgtgcaaagatctcccccaccctggggcagtggctttacccaaggctcttgagcagcttgactagagcccccacacgggctcctgagcaggggcctcagggactcccattcaccgtgggcaggggcctccagcagctgtgctcgctgcacctttgggatgagttcccagggctctgtaagaagcagggttgggggcagtgggcaggtgggaagggaaggaagtacggtaccctcctgccacccagccacttgcacgccccaggccctggggtccccaggcccctgcaggctccggttagcccacgggtaggtggcagggcaggaaagggcccgagaggggcagtacctgctcccaggaaggtctctgcctgcggtgggtggggttacagtcccacctccccctgggtctgggcacctcattgatggcagggaggaagctggagggcagatgggtcggggacagggtggccgctgctctgaactctgtcgctccgttcccgcaggtctgccttttcttccagaatcagctgtttcggggcaaccgggcaaccaaggtagacgctcggaggttcgcagctttctgctccccgaacctgctgcctctggccacagtgggtgctgacatcacaagtaagccccgcaggagcagggccaggtgcctgcccagtgctggtgctgggcgaggggctgctgcagggagctcgtggctgggactcggcagagtttgagagcaccatgcttggttctgacttgccctggcttggttctgccctgggctgtggagaagccagggctgcgtggacagggctgctgcgtggccacagaggtgggggcctcctcaggtccctgcaggctcagaggcgggaggcctggaagagaggtttggggcatctggccctcatgtgtcctgcccaaccactcgccccaggcctaggaggtccccagtgaccacctggctctgccacacctctgtgtgccgtagcctcgtccccaggagtttcagggagtctttctgtcctctggttccggcgggcagcccagccatccttgtggggctgactcgagcgatcctgtgtcctgaggcttccccctkggggggccaagcccgccccctggccctggctgtaggagcagccttggagcttgttctcagagactggtgccctgccaggcctcacctgagacgcagggccactccagtggcctgcccggaagtcactccctggcctaccgtckctccgtctggggtgtgctcctgctgagggagcccctgcttcctggactctacccggcccctgcctgytccaggtccacggccagcatggccagtcctgaccccacgccagcacccctccctgaggcagcgggagcatcccctccctcctgggagatgcatcctgcctgccctggccccctgctgtttcaaggcagcyccaaacctgccctgtgtctcatcctgactgactgaggtggggtccagccccggggaggctccagggcttggcagcactggccttcctttgggggcatttgacacctcacccggggctgggtggggctgcctgcccaggaccaaagcagctgttcctgtctgggygggtggggtggaggcgccccctcacccacactgggcttctgtccaggcctgggccatggcgggctggtgggtcaagcccacaaggtcactggacgcctggggaggcccttcctagggaatctcccggtgcggcagaggctccccactcccccattttaaggaggagcagaccctcctggagaaagggttgggctatgggctgctggggcacagcttcctggaagaatccccagacacaggcaaggaccctggggagcttcagggcctggcatgagggggccctgggaagggtctggcagggcaggggccttcctggagcatctaccagaagtcgggggacaggaggggctctgggcatgtctggctgtggggccgtcagcagaagcgggtggaggcagcgtctttggatctcaagacaaggcctgtgtgtgggagtccgggctcggtggctgacttgcttgttgccccagggcccctcagcaggacrggacagaggaaactgcctggttctacaggtgagaaacggaggcagagagaggcaggctcccacagggaggcaccgactcaagcctgtgcgctgtctcctgtcctgggctcacaccccgtcccttcttcctgctgttccctcytgtcctgggctcacaccctgtcccttcttcctgctgctccctggagcaccttctagggagtgtgaggcccagaacacatcagtgtgtctactgtgtgtgcagcacaccgggtctcaggggcttgggcaggggcccacttgctcaccgagggccagggcagccctcaaggcttcttggaggaggtggcttgtgagctggtgctggtagggtactggcttgcttgcccatgctggatgctggcactcggcccctccagcccagggagaaggagcagcaagaggtgtgggtggtgccctgcaggcccggctcccccatggggcctgattcacaccttatctggggctcaggagtggagcttctgctggtgggtggaccccgccccaacagtgcacagaggaccgtgctctggattccagggactccgccagcaccgggtgctaagcccgggcaggccacgaggctcaagacacaccggcctcaggcccagggccgtggggcagctcctgggcrcagcactaaggctggtctgggtgggaggctgccctggccccagccccccacccctgagtgtttcccacgtgcgtgtgggtgtgggaamctgatgccgggctgycgggccggttctggcacccagtgttgagaaacctcaggccttgcccagggygtggctgctggggcccctggggaggggcacaggttggcagtgtgcaccctcagcctctctgagccasctgggggtagcaatgccggcctgggcccgggtgccagctgccagcaccctgtcgagggcttgtcctgggctttttaccyactgtctgggaagtgaggggctgggctggtccgggagtcatgggcgggcttggtgctcctgtccacagtcggctcggcgccaaggggtggggggatgcgtgggaggctggaggaggccctgctggccctgtcctttccatgtgtctcaggagaccacactgtcacccccaggcaaatcctgcacccttacccttctgtgctgarccctgrccccggcccactctgctggggcccttggagcagaggagggtggagaaggggatatggctgtggggtcaggccaggcctgtcactcaccagccatgggtccttacgctgggtcaccccaaagcagagccccagagccctcctctgtgcactgggagaagccacctccctcccagacgtgacccagccaccccagctgtgccgcatccagctttgaggccgcagactacacccttcggctcctgtgctgagctcccgtatctgtagaacagggccatagcccctcttgggggtaaggggctgagcctgcaggcctcacctggccatggagccaccagcgctcctctctgcccccgggtgtggggtcacgattcccctggcctctagcaggcctgggcaggaaggactgggatcccaagggtggcatccacagactctcaggaggcgggaggtcagtgcggggtgggtgtgggccctctttgtctctgtgtagccccctctcagccataactctttgccagtggcagcggtgccccctccttycctgtgctgatgccttatctgcttgtccggctgagacacacgccctcagttaaagggcatctcacgctgccatcatgtggggctgactgatgctgtgggctctggtgggggtggaagactcactgctgggggctccgctccccmctctctcatccccagcaccccacatctccccccttcagctccaccatgccaggaaagtcctttttatcgcatgcaagctgctctagcggaagcggccggagacatgtgggtgacatctccctgtgggcaggaggaagagccctgtgcgggggtcctcctgcccaggttcctgtcccagcaccgtgccgggctctccaggcgcccaggcccttccccacccctgggcctcggttttcctgggctgggctctccagcctccagggtgtttactgccctgggcagctctgacacctcacagtgtggtgggagtccccagtgtccagccctgctctgctggaggctgccatgagtgtggagaggggcagagggaatggacctcagccttggcgctggcctctgagggtttgggggccgggcctgtggcatcagcctcccacccccacccacatggagcgggaaagtcggcagaaccctgggggctcaattgctgccagagtggcggccttcagctcgaggacaagcatgtcctctggggagcccctctgcatggacgggttcaaggggcactgaccccaaatagccatccctccccacttcacctggggcctgcacctccaccatcacccaccctgggtgtggggagggggtgatgggcacacattaggattttggggtgaactggatggaggccttctctccccagaggtgaggggtccgaaagtccatttgttcgctcattcaaccactgacccggtgggcagtgggcacagtgggtgcctggcaaggggcagaggaggctggctggttcgacgatgctgccccatgcctgtaacccagcgcagtgactgctggtggctccccagctgggcatgcctgccctcctcgcctctgcgctcgcctgacgcccccatgcggcctgcaagacacagccgggcctccatctctgcaggaccctcctgcccctcgcctggccagcggagtttccctgggcttcacccttgagactgtgttgcccattgctcggccatcggtctctcgctggccaacgagtgcctcctcccacagccccgtgcacgctgcggagcctggcacrggccggactgcgcggaagcccgggaggatttgcctgcgggagaggaggcagggcgagggggctgagccgcgaaggctcagggctctgaaaacaagggaggaggcggcctgtgcagagggccaggcactgggctggggtctcggctggcaggaggcctgaaggcaccacacaggcccttccctgtcctcagtcaacagggagctggtgcggaaggtggacgggaaggctgggctggtggtgcacagcagcatggagcaggacgtgggcctgctgcgcctctaccctgggatccctgccgccctggtagggaccgccccggccatcctgcccctgcagccctgagccccagccctctgcagctcccacggccctcaggctccctggggccctcaccagccagtgcagascccgcgtggacctgagatgtctgcagtgtggccccaccagccccaggccctgtcccctgtcctccgtcgtggtgctttccagcctctcggggagtgggcagggttggggcgcggctcacagccagaacggggtcctccatgcttttctagaggcagcgtcctcccgcagattccagctggctgggagccgcccctgctgtgctggacaagggtgtttgctctggggcctctgatggccttcttggctcctctcccacctctctgaagtgtttccacggcgttctgccacacaaagccttcgtccctacagacagggcgaccctttgggagaatgtggggggagcagccccctccaggtgccagcagccatgcacgtctgccaggagccccactgtcccgggagcagagcaggcaccagctgcccctggcttggggtccctctccttgggagggcatggggcgagtctcagtggtgctgagggcagagaccctcaccatccagcccccaccccaccgccccacaggttcgggccttcttgcagcctcccctgaagggcgtggtcatggagaccttcggttcagggaacggacccaccaagcccgacctgctgcaggagctgcgggtggccaccgagcgcggcctggtcatcgtcaactgtacccactgcctccagggggctgtgaccacagactatgmagctggcatggtagtgccgggagatcagggcctagcggggaaggggacagcctgagggcctggcagaggtgggctctgacccacccctcangggctgggggccgtggtgagtcgcccttcctgcccacacgccccctcctcacaggccatggcgggagccggcgtcatctcaggcttcgacatgacatcggaggccgccctggccaagctatcgtatgtgctgggccagccagggctgagsctggatgtcaggaaggaggtgcgggcgctctcgggctgtgggcaaccctcggtgtgcacaagcatgtcagttggctcccaggggcatgtctggggcgatgccggaagagcctgggggccggtccagggtgtgtcctgtttgggaaggggagggatgtggctccctatagtggggaagggcagctctgggcccaggctccccacagccctcactggactcccagcccaggctccgcctgtccttgtgccttctcagactgcatggagacctgaggctcccctaactgtcgccaggaaatcctctcctgctctccactcttcctcgagggtggggttcagacacagctggccccagacccttgggttgccagcctctggggctggayggaggcttttggggcccctggagaccctgagctggtagggccagggagtggggctggccttgggaggggacccagcccgctctggcccgagggatgaagcacacacggccgaggctcaggccaagggcaacccctgactgtgcccgggtagcccgaccctccaggctgtcctgggctgcccatccagccctggcagagccacttcacctctgttctctccaccagctgctgaccaaggaccttcggggggagatgacgccaccctcggtggaagagcgccggccctcactgcagggcaacacgctgggcggtggggtctcctggctcctcagtctgagcggcagccaggtaatggcgtgggacacgggcctgagtggcagstggggrctgtgcaccctcttggtcaccctgggatgcaccaggcaggcacgagcccctgtagccatcactcgagcccaaacagttaggcacacccgggttctggggcccaggaggagggtttggggtctgcagcaaggaaggtttgcagggtctataaggcaggaggcaggaagggccaggcggtgggcacacagcagggaggccttctgactggcggcgctgccttagtgcggggctgcctcgggagctgcctgtccagaagaagggcgggtgagtgggggcggtgcttgctctgggctctcccaggctctgagcaccaggggttccaggtgaggaacccggaggtgagggccagcctttgagcacgtcccctgcacaactgaggtgcccagacctaggaaggggggctttcgaggcctggggtctgcagggggatggggcctccctggaccccgcaacatgcccccttggctgctgggccaaacatccaggcctgacatggggcctggcaggccagacagccttgctccccactgtgtggggtcctgccccggcctcagtgcctcggtttccccctacagggatggacctgtcttgtgagccatgtgctggaactgccacttgctggggcgggtgatgggcagatggaaaggactggcgtgcatggcctgttattagggtggctgcatagggcctgaatgctgtagggaggcaggccagaggcagcagccttgtcaccaggccacgttgtacccgctgggtgtggtggcacctgtggggcctctgccaggaccgctgggtgtggtggcccctgtggggcctctgccaggaccgcggccttttggcgtcttggggagctcctggtgcccggtgctgggggcaggtggctcttctgggaaggtgcagccgtgggaacagggccttccttccaggggaggggtctggctctgcttcccacgctctccttatgtgggtgaccattccgtcccgacggcggtgggagcagacgggggagtctgggagggtgggtagcaggtactggccacacacccgttggggacagggctggatggtggtctcgtggcctggccttagctccaggggaaggggtcctaggtgggcctggatggggtggggtggtgaggctcaaccccaggccttccgatgtggcagctcaggttccttctcacccacgccctgggatctgcgggcccttgtgtgggggctggcaggggtcatacagcaccggggactgccagttccaccagatgccaaagggaggcgtgggtcccagggtgccgccttccccacctaggaggcagatgccctgcggaatgccctggtgcccagcctggcctgtgctgctgcccacgccggtgacgtggaggcgctgcaggcgcttgtggagctggtgagcctcccccaccctgggggcccagccccagccacgcctggcctgggggctctgaaccctgtaggcaggacggcctttcatccacccactgaccacactaagcccttgtcagccagactgggcagcaggactgtcctgccagcttgtcaggtctcactgaggctttgagggtgggcgcaggggctgtgctgggccctaccctcagagggaccccaccctccccatggcctacctggccccgcctgggtctccctcaggggtcgcatgtccttgtgttactccagggcagtgacctgggcctggtggactttaacggccaaaccccactgcacgcggccgcccggggaggccacacagaggcagtcaccatgctgctgcagagaggtgtggacgtgaacacccgggacacggatggcttcagcccgctgctgctggccgtgcggggcaggtaatggrgctagggctgcacagagctgccttggacaggtgggcgcagagaggctgtgggctcctgcactcaaacagcctcccggggctgggctgggagaggtggaggacacctgcttcctaaaggctgcccccgcagcccggggcccagtaagaccccggcccagagttcctagaaaacaaaaatgttgtggacaaagctgggaggacacggtgcatctctgtgcacctgtgggtatggggggctggggtggaggtggggcagaaggtcctggcccagcagccagacgcggtcaataaaaagcaggctacgtggcagcagatctggggctgtgacaggcaactcgggccctggaggacaggcccagcctgtgcgtgtgggggtcccctgccccaccaagcaagccctggctggtgtctcttcccaaagtccagagcagcagcagagacggagtgtgtgcctgtgcccctgcgtggggggcggggccagcactggtgggatctgcgtcccgtctccccttcctactctttattgccccagcctgggaaggccaacgacctgtctgctggtgccgctgcccggacccatgggctgctcagagatcccagggcccctggggattcctccctgtgggtgggaggacttggcctgcaggaccctgggttcttttcggggagggagtgctcaggagtcccatggagagaaggccggggtgtctgagcctggggtcatgtgaccctgacgtgttcagttgtgggttcccctccccagcggtgaagcggtgagccctggggtggggtgtggcaccttttgtgaagtgggtgactggggtagaaggttctttccagcctcctgtgatcattgacagggtgctcaaaagaataggagagaacagggtggtggacaggagggggcggggctgtgagggtccccccgagcagggctggggtgatccggactggagcttctagactgggcgtccttgggtgtgggtgggtggcgcggagacgagctcacacagtcccgccccctcgtctcctcctgactcacaggaccaggctcacagcacgcccccaaccggtctcccagcctcgctccgctgccaggctccctgaggccgcctgcctggccctgctgtgcctgagtggggtatggggaggccactgcctcatacctattcccaggctccctaaatggggtgatgggrggatctgtggtgctttgcaggggtgggggcacggccagcgattatggcacagtctttaggtcaccctgtacaatgggctgtgtggcctccggcctcgggcctttgtgcctctgctcctccttgctagagccccgaccccacccccacagactccactgtccgggtgccctgcccccactcctacccaagggcagtcggccggattgattcagtgtcccctgcgcctggctgaggaggtcaycacggggtgtgatcagcgtttgggtgtgcagtggggccggtcagctcatgtaaggctgtcctctgaaatgggctgtcccyttggaatgggttggggagactgccctgggaggagctattctgctagcaccaactaatgccctcccctgggtgctgggtgcggggctgccacagagttgaccccaccccttgcagamctcagctgccctaagaaggagtactggacaaatggaggtggtgggatcccgggatgatgtcacatgggcctaggcagaggatggggggatgggcccttgtctgaggctagggctgtggggtcttgggccggccggtcccygtccctgtgcacaggacatgagctctgctggctcctgagtgaggtgcagcggggctgggctggcsagggcagaaggtcagcatgctcattctcacacaggcatccgggtgtcattgggttgctscgggaagccggggcctccctgtccacccaggagctggaggaagcagggacggagctgtgcaggtgagtgcagctagagcacctgctcttccagggatgtgggggacacagcttggggaagcgaagccagacctgctgggagggacaagtgagtcagggtgtgggggctttcagaggcgaggcccgctgacctcagtgtgcaccaacctggctgatgggaagaggtgtctaccctggaccatgtcatggggcaggggaaggagttgttctcagctgagcraacagtccagcaagggtgtctctgtgtgcacatgtgtgcatgtgtgtatgcatgtgtgtgggtgcrtrtgtgtgtgtgtggtgggcttgaggaggggtatgggaattggttgtcgggtgtgagaggggctggggtgtggactggggggtggctggggctgcatttggggaggttggggcaggtggggcacagaggagctgaagcccctggcaggtgacaggtctcgtgagctctgttctccccagcgtggttcctgtcctgggataaactgacctaggccccgcctccacctgctggccgcatggcaccagtggccagtgtgccttccgatctcatgctgccgagtgaccaccgaggcaggctcaggccttctgacatcatgttgttgttggggagactgaggcgcagggaggccttcggcgagggtgtcggttgtgggtggaggtgggccagggatgcagggatcctcctctgtccgccacagccagaatcgctgccccccaccccatgccttgtgcctggtgacttggcgctgcctcctgtgcccagcctgggctgcccgaggccaggacgactccragggacccaaaaaggagagtcggaggcaggagacctgggccgggtgcaggtggtggctggggtgggggtgctgtgagtggtggggtctgtgcgcctgtaagtccagagtcccaggcttggggagtgggtgatggcgggggctcggctcactggctgggagggggtgggtgcaggcgcctgcccagcaggaggaggactagcagctctggcttctcctctgggaccggcccacaacccctggtcttgcttttgaagggacttccggggtgacttggtcaagatttgcactccagacaggccttgctggctccattgacagatggggaaactgaggcagtagtcaggtcctgtgggagctgggaccagaaccctggtccaggactctgcttggaagtggcctggccagcctgagctgctggctggacttgagcccctcggctaggccttcctaggggccggtgtgtgtgtggggcttggcctcttggagcaggtccaggaggggccagtgaggccatccagcagattcgctgcagagattacccagtgccactgcagggctgctgctgtttcctgggtaggcgcagagtccctaagggccctccagaggagggggcagccccttcctcaccaggccacttcccccagcccctgcacaccatgggtgggtggagccttccctgccrgrtccccacctggcctgctcctggcctccccaggtggcgagtgagttcttcccaggagggtggcagggtgaggaggagctggtgagggcctggcaggtgctccccactccagggcaggtgggcccagacccctgtcccagccaggacccccccatgcagtctgccggggtccagggccaaccgttatcctgggttgcctcctgtgtccccctctctgaaccactgggctgcctcaaactttccttccacctttgcggaccccgccccgggaagagcggtgtgttgtgtaacacgaaactggcgtgggctgctcggcaggtgggcgtgcatatgtgtgtgcaaaggcgcatgtgctcatgtgtgtgtgcacatatgctcgtgtgtgtgtgcatgtgtaggtgtgtgcttgtgtgctcctgtgtgtgtacatgtatgctgctgtgtatgctgctgtgtgtgcatgtgtgttcatgtatgtttgcgcatgtgtacccgacttgagtcgcagtcccacccactgggtgaaaccaggctccaggctgcccgatggcccccagtgactcctgccccaggaccaggtcgctgctgggtcagctgtttggggctggctttgtaagakcgtccaggccacctgggggacaggcacgtgggcagatggacaggtgcccagcaggccccaacaactcctcctctgcccccacccccaggctggcatacagggccgacctcgaaggcctgcaggtgtggtggcaggcaggggctgacctggggcagccgggctatgacgggcacagcgccctgcacgtcgtgagtgcccccaccccctgcaccctctccaaaggctgccacctccaggaaggacacctggacaattcaccagctcactgctctgcccctccccgctctgcccctcccccaaatgcctggccctccccatgcaggacccgcacagactgggtccccttcccggggctctgagtggtgggggtgacgagagtggaggagctgctggggccctgtgtgtgtgggctggggacaggggagggcatcctggggatggggatccttgggccaggctgctagtcagtggccccaaggcagcccctccccactgcttccccataggcagaggcagccgggaacctggcagtggtggcctttctacagagcctggagggtgcggttggtgcccaggccccatgcccagtaagtccccaccccaggcggggctgacaccccccagtgagcttctagtgcagggctggatcctggctcgggggggcgtaatcaaggggaacagaaccggaggaggctgagatgggtcccagccagtttagggtctgcagagcccctcctggggatgtccagggtggaacacagtttagaggtgaggagaaggagaaaggagcagtcagggagggcttcctgaaggaactgaccagacttgagcactgagggcccagccagggctcagcatccccttacccacccctgcccctgcgccctgccccaccgggaccccctaggctgggtgcttccgcttgtctcccwggccagttcccagctgacacccccattcccacttggttgtgtggccctcccatagtctcaagctgggtttgctcaggctcttgggctgtgccgtacagacggggtgcctgggcttgtctctctgccctgccttcrcactctacctgggtgtccttctcaggagccctcatgttttcaggaagtgctgcctggtgtctaacctgaaggcgtcctgctgcagtataagccattccttcctcccatgacctgctggaggggtctcaggcatgaccccactgctggggctgcttcccagcctgctctcatgtaaagcctgaaggcctttgttgggcaggacggcaataaagtctctgacatcccctcaccaggtctgtacagcctggctctgagaggctctgtctgggtccgggactgtggatgtgtgtggggagtcaggcccaggctctgtggggtctctgcgggggtcacttggcccatccttccgggggcagctgtgcgtgtgagctgggcagggtggggtgcatggaggtgacttggccaagtggtcctttcccagctgccmctcccccttcctgccaccctgcctttgcccaggctggtccctcctccagacaccctctgcccatctccttacctcctgcgccttcattctggagcttgaagtcccctcccccaggcagccctccaacccctggatgagcatgctgcccctgcttaactctttagtcctcacagtcccgtcccagttgctgtctggttttctgtcaccccagtatcgctgcacccggcccccctctcaggccagggccacaccagggctccatagggctgcggaagcctgtgagtgtcaagggggcttcacactctggtggtgagcccctggggaccattccagcccctgctctgcctgaagctcctgatgcagcctccaccgtgagccaggccaccctgtaagggaagaggtgagctgtgcctgcctggttgcacagcctgggcaggtgggcgggtggggcgggccctgctgctgcccggtgggggtggtgctccaaggccaagggcagcctcgtgccttctttcagctggggctgaaatcgggggtgtggacccctggcccccatcatgtgtgcatgcactggcctgggatggccagggactccctgctgctgcccccagcccctgaccccttcttgctgggtgtgaggagcatgggggctgcctccctccaggcctctctacctgcccaggtgacggttccttttgtccctctgtttggctggcctctggactggagccccaggagggcaaaagcatgaccccagagctggcccttggcacctgggcataccccaggctcctcagcctggttcccaagcctggctggtactgccgctggcatccttgctgtcctcaccccgacacaggtgtgcctgggccttgcacaacaaggtgacgccatgcgagcgtggcagggccggggaagcctttgctcctcaccctggtgaggcccatgaggggctgcaggtggagggagggtggcaccgggccccagagccaggagcccctgctgtccccggatggccgagacccttggagggccttgggagaggcggtggggcatctggacaaatgcctggtgcaggtgagaaggggtgggactacctccggcatccctgggctgagcccacctggtctccccggttgctcctgcacayggcagtgcccacctgcttccctcagctcctgaggggctgggcagagcctgttgctcacgccaccccactcagtgctgctccgggttgtgaaagctgcaggtggctcacgttagcccacatggcagcaccctcccagagcaggtgccaacctgccagtgtagacacaccgactgatgccgggggtgagtgtcctgtagtgtagaaacgcccactcatcctgcttgtcccgcagagagcatttgtcaagctggcctttctccaactgggtcactgatggagttcggcagagacggcttgggggccacgggctgggcagatggggagagctcctcacaaggctgggcagccagacccccattgtcagtcccctccaaaccctcgtgggatgtagggccctaccacagggagccccgggactgggccagtgtctcaggaggctgtgaagagtcataggcttgagtctgggagctttctcgggggccgttttgtgccccttggggagaggccagaggggccctgggtaaggggactcctctagaatcacccagaagtggcaggaggtgcagggccactgctcggggctccctgggctctgagctgggcagtgacctggccccaaggcctctggctctctggcgtgcagtgggaacagccgggacagacaggcttggagcgttcgtgtcctgcgccgcgttggtgtgtttcgtccccactgtgcctgtaggagggcaccgggtccccgtctatcctacttcatggctgaggaagctaaggcacagagtggccccgtcctgcgcccagggctctgcgttggcacagggcagagctgggctgtgaatcagggccgccttgtctcttgctgtggtgtgaggctgtgggagactcaggaatgaggcacagccaggtgcccagtgcccgtgggacccgcctccccacagtggggtggcgccgctcacacctggtaatttcacgctgggggaggccttggttcctatagcccatctcgaatcacctggatcccagggctatctctggggaacatctcctctccatcacgactactgtctttttcaccagcattttctatcctaaaatcagactcctcagctgagggccctccaggaccgcccttccccagctggaggtaaccagatttctcgtgtatgctaggaagttccccttctggtcacacctcaatatttcctgctgctggtgggaactgcaggtgcttgtacttgtcaccttctccccgtcctctctcgtcagttcccttggatgctggacacgggagccacctgggcgaggggagcccatccaagtggctgtgcgtcgggaagagtctgcccaggactgggctagaccagagcttagaattaaggagtggtggccaggcttggtggctcacacctgcaatcccagcactttgggaggccgaggcgggtggatagcttgagcctaggagtttgagaacagccaacatggcgaaactctgtctcttaaaaaataaataaaaacattagccaggtgtggtggtttgtgtctgtggtcccagctacttgggaggctgaggtgggagaatcgcttgaactgggaagatggaggttgcagcgagccaagatcgcaccactgcactccagcctgggcaacacagcaagactaggtctcaaaaaaaaagaaaaaaaaaaagaaaagaagagaggtgggttcttcttgcccatgcagttgtgttgggggaggagctcccaagctcctgttcttgatctcaagctcccctatgcccacttccatccccacccccatgccgcagcccctcggactccacacccaggcactgagacccacagatgcagcgatggcaaggcctgtcatcccttctctaccaccaagagctgtgcaatccccagaagtcactgtccctccctgagcctcagtttccccaactgcaaaatgaaaataacaaaacctttctgattccctttccagggtggctgcggtggttgagccacacgcggcccatgtggaaatgtctggggggtccctcagatctggtggctgtgttctggtctggggctcaccttggctcctgagcacttggctcctggctggctgggcgggtggtgggatggcgtgtcaccgccctgcactggaatgaatggtcaccaccctgctgcccaaccccatacagacacactaatggctccagacttggggcaagtgctgaagggggctctagggtatttcctagagcctgagccctcccctcagctgccatgttctgctgaagcagagtccctgggaggcgccactggtcaggcctggacacctccaggtgactaagtgggtaggaccggcagggccagctgcgccaggacgttcggggctgggctgtgagtggggggagcgaggctcaggcccttgctgcgtgagggggtagggcgtccctccccccgcgtgggaaatgaggaggcaggtacggggctacccctgtgggctgcggggtgggggttcagggtctgagaagcagaaacctccctccctccagtttcactttctctttacccctccccttccccctcccacgaagttccctttgaagtgagaggggctggggtgggtgtgtccagcccagcccccacacccaccggagagctagcgcggccctgggctcctgtcgggcgctggtcctcacctgttccggccaccctgggcctcgacccggccaaggtggagccccgggccctccgtgcgcccgagcacccccggcccagacgagacggttcgggcgtggcccggcggggacccagaacccgggaggccaggtgcgcccaggccaggcgctggaggctggggcgccggatggggcggggcggccgctgagtcagggccacccccgcgcgggcgcgcggagcaggtccccgggccgtggaggatcagtcgcgggacctatgggcccgggagccgccccgcccggaaaaaccggtcgggccagcgcggcgcgggcacattccggcgccgggaagggcggctgcgccgcataaaaggcgccgccgcgctggccaccgccgctcggagctcagccgccctgccacgcggggcccgcgggacgaggggacgccggggccagcgaggacgcggcggggctgggcttggcggctgggatcccccagcgccaggcgagggcgtctaaggcgtccggtacggcgtcggggccgggtggctgcagcagggcagggggtgcgcgaccagcggggatctgggcgcaggggccggtccccgggatccgcaggcgacgcgggcggtcccaagggcgtcgggggctcctctctccgcagctcggcgaaccgacggtgttggggactcgcgcgctgggtccagtggttcttaacagttcaacagttctgtagcgcaattgtgaaatgtttaggaccactagacccggcgggcgcggcgacagcgacggagcgtcccacgcgcggcctggagtcagagtcacagtcaggggtgcgccggcgaccaatccaggggagcccacggaccggctccgcgctccaggtcggccgccccatgcgccgcgccccgcagtccccagggcctggctggctccacctgctgccagggaagaccctcggccggagagccaagtgctgctgggaggtggccgggcgtggccgggctgtgctgtgggaaccgctgggtgggggcgcgctgggttgcccacgctcctggcgcgctgccggcctggagacgccgccgccgccctcttgcaccccgagggcccgcacctcgaaactccgtggaattcccagcgaggaactggcggtgggcccgtagggttgaggagcgctccttgccctgggcttcctgggagctgcccatcaggctgccggcagccgcaccctgctgggcggccgatggttcccgctgccggctccccggagcgtctccactcactgaggccttagggagcgctgcgcggctcctacgagtgcgcgctaaactcgtgaaggacctcgaggcacaggaactgggggtggggaggaagtttgcagactacacccaggtagaggagaagcggcgcccatgatgacaggtgccttcgccggagcctccctggaacctcgtggtagctagcgcccacaggagaggtgtgcgcgtcaatctgcgtgtgaagccccgggcggccctgggagggactcagcaaagggtcgaatctgtccccacctccagccaggggccggggtcttctgcctggtgctgcctggcctgctgtgtcctctggggtggagggtccccctccagtccccacctcctcacccagtgtttagagagctgcggggagtcctgggagatgggtcagacaggcctgggtttgaggcctgctagggtggccttgggccagtcacctgccctctctgagcccgacctgcacacatagggggttgatgtgaggagacaggaggtgactgtggagggctgttccagaagagggccagcagcaggacagcaaggtcccctggccacccaggtggggggagtggagttcccgggagagcatccaccactggccagtgcctcc

SEQ ID NO: 95121 - DNA, 14002 bp, Homo sapiens
gaaagaatggcctcctctagctatggaggaaaaagaaattctttggctaattggttttattgagccacattgaaaaagatcatttcaccttaaattacataacactaagacctacatactcagaaagccaagcactcagtatagcagaaaacagtatcattgcatttgtgactgcaaactgctaaaagtcacaagttacagtgtaaccttaatttactctttcaattactagtctctgtacaaactccccatttttggcagaacagtcatccactgtcacatatacacgcctttactcatgattttgcttttactctttgtctctcccagaatgccactaccattcagtagacatttattacacaggttttcatactgtccattatttttaaatgtactactctcactcaagctaacttgaaagctcctgacaatgagaagcataagaagcatgtcttcattcaaccgtccaccttgcctcaacagaatacactctgaacaaatgtttgctaagaaaaagcattcacaaatcatcaattttaaagtctgagagttgtaagaaattaatttcacatccacattctgactcatttttatgtaatcttttctgtattaagaaaaacaaattaaaaatgttttaaaaccaaaaaaagaaaactttcataagtatgaatcatctttaccaatttactttcatttctcttgttttaattcttccttccattggaaatctgtaaataaaaccacatggcaaaacatttattattatttattttaattaaataaaacctcttaaaattatttaaaacatatgtaatttctgtacctgatagttatccgatttggatctttgttcaaagtattcagtgttttcttttcatttatccttaactgtatatctagaaattccttgcagccagctatcaatgtaacctataacatttcagtagttgtccatttaatgaagtctattttttatttcctctcatcctttctccaaatttatttatttttcatactgccttaaaccatcacagttttatcaatgaacataacagagttaaaaacctgctttatacattttgcttctttaaggattcattcattcactaacaaatgcttacaaactcctattatataccagacactgcattagacaccaggactataccaataaaactttaaagattaacaagatagaatttaaaatatctagcccagtgcctatcacatagtaataaataagtcctcaataaacactgtttttgttactcctactcctaatactactactactgctattctactgttctatagtttgcaaatcattatctcaattgaggataatttagtcatagaatgttttagatattaggaaatttggattctagagcctacttccaccagatgacaaacaaagcagtctctgtgctttggtttcccacatatctaaaatggaactaacacttgttttaattttcttacacacttgctaaactcaagatcagatgagttaatgttaatagtgggtgttttcgactcttgatttctccttagttaagaataatgtttacacaaaaatacaaaccttctatttttcatcaattgttgtttatgtgactcctcaatcataactggaattctactgtgcaatttttactacaataatcttaccacagtaatcaaattagatattttaaataaaaatgaacggcttaaatttgagagtaaatattttcttttatgaatattgtttcatattcatgtcctgagtaaagggagaaaggaccaatgcagtcgccatataccaatgacatgcctatggttctattcactgctgcagctgcaaagttgccccattgttgatattttagcataacctgttattattcccattttttctacaatcagttcttttatctaggtcatcaccaatactattctatttccattgttctcactgttctcacccaaaatatttagggaagggttgcaagtacgtggcacacatgctgcatgcaactcactgtccttcactcatggtagactttcctaatatatcacaccacatcatcttggaatctttcttacatattattacattgtgtagccactaccaaggtaattagcattatcacctaagttgtaaagtagttgccatacctattttagttttgtatataagttttcttagctctgataagagttaaaacagaaaatataatatattctaagaaagactattccatatctcatgatcagaattataccagaggatatatcttagaaatgctttcttttctgctcattcattcttaaattatatgagatacacaaattagttgtttctcaaatattattttatactataccactatgtattttttttctagtgaaaattaatttaccagatctgataaggtttcttttccactgattgtataaaatttcttcactgtctcaaatgtaatataataccaagccatcaatcttcctgcttctgtaagaaaagacagaaaaatgaacggtcccctcatcagctgaaccaactgtttttttatgtttaacaaacatttcctgaggggaggagaagcaagatggtagaacagaagcctagaccattggtcctcactgcaggaacaccaaattttaacaacaatctgcacacacaaaagcactctaattgcttttctgcacacagaaaagtactgtcacaagaatcaaaaatcaggtaccagcttggccatggctgggtagagcaacaaggaggctcttggggtctctgagtccaggcctaggctcttaagacagcatttctggacctgccctgggccagagggggagcctactgccctgaaggatgcatagtcccaggcctggcagcattcactataagctgacagaagagcccttgggctttaagtgaacatcagtgatgacttggcacaaccccctgaggaccagtgaaggtcgtggccacaggcagagactcttccaatccctggctctcagacagtctctcagacagtatctctggacacacccaggacctcggggaactcaccatcccgaagtgaaaggccttgggaaggcccagtgctgtgctggcttcaggtctgacccagcacagtcccagcccacaggagtgcttacatcagcatagccccaattccaagtggctcagcacagagagagagaatctgtatttttgagagaaagtaagggaaaagaacaagagtctttgcctgatagtccagagaattcttctccatcttatccatgaacaccaaggtggtaggtctacgaatctgcaaaaaccacagcataatcgggcttatggccaaagtccctttgaatacctagaaagccttctcaagaaggacaggcaaaaacaagcccagactgtgaagactagaataaatacctagctgctgaatgctcagacaccaaagaacacctccaggaaaacatgacctcaccaagtgaactaaacaaggcagcaggaatgaatcctagaaaaagagagatatgtgacctttcagacagagaattcaaaatagctgttttgaagaaactcaaagaaattcaagataacacagagaaaggattcagaattctatcagataaatttaacaaagagattgaaataattaaaaagaataaagcagaaatcctagagttggaaaaatgcaatgacatgccgaacaatgcatcagagtatcttaacagcaacactgatcaagcagaagaaacagtaagtgagcttgaagacaggatatttgaaaatacatagtcagaggagacaaaagaaaaaataattttaaaaaaatgaagtacacctataagatctggaaaatagcctcaaaagggcaaatctaagagttattgaccttaaagaagcagtacaaaaagagatggcagtaaagtttattcaaaagcatagtatcacagaacatcccaaacacagagaaagatatcaacattcaagtaaaagaaggttatagaataccaagcagatttaacccaaagaaggctacctcacggtatttaataatcaaactcccaaaggtcaaggataaagaaaggatcctaagagcagcaaaaaacaaacagcatagaatggcgctccaatgtgtctggcagcagacttttcagtggaaaccttacaggccatgagagagtggcaggacatatttaaagtgctaaagaaaaaaaaaacccttttactctagaatagtatatctgctgaaaatatcctttaacaatgaaggagaaataaagagcttcctagacaaacaaaagctgagggatttcatcaacaccagacgtgtcctctaagaaatgttcaaggaagctcttcaatctgaaagaaaaggatgttaataagcaagaagaaaatcatttgaaagtacaaaactcactggttatagtaagcacacagaaaaacacagaatattataacactgtaattgtggtgtgtaaacttctcttgacttaaatagactaaatgatgaagcaatcaaaaataatagctacaacagcttttcaagacacagaataataagatgtaaagggaaacaagaaaaaggtaaaaagcatggggatgaagttaaagtgtagagtgtttattagttttctttttacatttttgtttgcttgtttaggcaatcagtgttaggttatcatcagtgtgaaataatgggttacaagacagtatttgcaaaccccatggtaacctcaaattgaaagacatacaacagatacacaaaaaataaaaagcaagaaattaaagcatgccaccagagaaaatcaccttcactgaacagaagacaggaagacagaaagaaggaagagaagactgtaaaacaaccagaaaacaaataacaaaatggcaggagtaagttcctacttatcaataataacattgaatgtaaatgggctaaagtctccaataaaaatacatagactgaggctgggcacaatgggtcatgcctataatcccagcaatttgcaaggccaaggcaggaggattgcctgagctcagcactttgagacaagcgtgagcaacacggcaaaaccccatctctaccaaaaatacaaaaaagttagccaggaatggtggcatgtgcctgtgatcccagctacttggggggctgaggtaggagggtcacttgagcctgggacgtggaggttatagtgaggagcacccagatatataaagcaaatattattagagataaagagagagataggccccaatatgatgatagctggagacttcaccccactttcagcactgaacagatcatccagacagaaaatcgacaaagaaacatcaaacttaatctgcactatagaccaaatggacctgatagatatttacaaaacatttcatccaacagctgcagaatacacatctttctcatcagcacatggatcattcaaggagagaccatatgttaggtcacaaaacaggtcttaaaacagttttaaaaattgaaataatatcaagcatcttctgaaataaaactagaaataaatagcaaaaggaattttggaaactatacaaatacatggaaattaaacaacaggctcctaaatgaccagcgcgtcaatgaataaattcagatgaaaagtgaaaaattttttgaaacaaatgataatggaaacacaacataccaaaaccaatgggatacagcaaaagtagtatgaagaggaaagtttatagctacaagtgcctacatcaaaaaagaagaaaaatgtcaaataaaaaacctaatgatgcatcttaaagaactagaaaagcaagtgctaaccaaacacaaaattagtagaagaaaagaaataataaatgtcagagcagaaataaaattgaaatgaagaaaacaatacaaaagaccaatgaaacaaaaatgttggtttctagaaaaggttaacaaaattgacaaacctttagccagactaagaagaaaaagaagggctgagtgtcaggcgacccgcagctaagctgaggggggaaagtgggcttaggaccgcctgcccagggcaaccctgaaycaagctttagccgccgaggcctcgtgtcccaaaggccagtcatccctcctctgtgttgccatgggtattcaaggcctggccaaactaattgctgatgtggcccccagtgccacccgggagaatgacatcaagagctactttggccgtaaggtggccattgatgcctctatgagcacttatcagttcctgattgctgttcgccagggtggggatstgctgcagaacgaggagggtgagaccaccagccacctgataggcatgttctaccgcactattcgcgtgatggagaacggcatcaagcccatgtatgtctttgagggcacgccaccacagcacaagtcaggcgagctggccaaatgcagtgaactgcrgggctgaggcagagaagcagctacagcaggctcaggctgctggggccgagcaggtggtggaaaaattcactaagtggctggtgaaggtcactaagcagcacaacgataagtgcaaacatctgctgagcctcatgggcatcccttaccttgatgcacccatcgaggcagaggccagctgtgctgccctggtgaaggctggcaaagtctatcctgtggctaccgaggacatggactgcttcaccttcrgcagccctgtgctaatgcaacacctgactgccagtgaagccaaaaagctgccaatccaggaattccacctgagctggattctgcaggagctagaaccaggaacagtttgtggatctgtgcatcctgctaggcagtgactactgtaagagtatctggagtattgggcccaagcgggctgtggatctaatccagaagcacaagagcatcgaggagatcgtgcagcgacttgaccccaacaagtaccctttgycagaaaatcggctccacaaggaggcttaccagctcttcttggaacctgaggtgctgggcccagagtctgtggagctgaagtggagcgagccaaatgaagaagagctggtcaagttcgtgtgtggtgaaaagcagttctctgaggagcgaatccacagtggggtcaagaggctgagtaagagtcattaaggcagcacccagggccgcctggatgatttcttcaaggtgactggctcactctcttcagctaagtgcaaggagccagaatcaaagggatccactaagaagaaggcaaagactggggcagcaaggaagtttaaaaggggaaaataaatgtgtttccccattatacctccttgacaccagaatatttgccctcttgtacccttaagagctacagctagagaaaccttcacaggggtggagagagcattctaaggtttttctagcgtgacccttttcagtagtgctagtcccttttttacttgatcttaatggcaagaaggccacagaggtacttttccttttttagctcaggaaaatatgtcaggctcaaaccacttctcaggcagtttagtkratggacartaagtccattgttacatgaaagtgatagatagcaacaagttttggagaagagagagggagataaaagggggakacaaaagatgtacaraaatgatttcctggctggccaactggtggccagtgggaggtgatggtggacctagactgcttttctgtcttgttcagccttgacccaccttgagagasagccaycaggaaggcgcatcttagcagatgggaggaactgctgagagaagatrggcagaragctggagcccctggagttgrctgtgtctatgtctgtgactgattgctggctgtgtcttgggtgggcagamactcgaacttgctatgtaatttgtgtctagttattcagaggagtaagacggtgatgttcatctggcaatcagctgagttgagactttgggataagacactggttttcatgtgctgtttttgttttaaagttataaagaaaaaagtcaataaaattataaaagtaaaaaaaaagaagaagaagaaaaagaaaatatccaaataaataaaatcagagatgaaaaaggaggcattacaactgataccatacaaattcaaaggatcattagtggctactagcagcaactacatgccaatatattggaaaatctagaagaaatgaacaaattcctagacacatacaacctactaagattgaaccatgaagaaacccaaaacctgaacagaaaaataataagtaatgagattgaaaccataataaagtctccctgtaaagagaagcctgggacccaatggcttcactgctgaattctaccaaacatttaaagaagaactaccacaaatcctgctcaaaaactgtttcaaaaaatagaggaggagggaatacttccaaacttactctactaggacgttattaccctgataccacaaccagacaaagacatatcaaaaaagggaaactacaggccaatatctttgatgaatattgatgcaaaaccctcaacaaaatactagcaaaccaaattcaacaacacactaaaaagattattcaacatgaccaagtggggtttatcccagggatgcaaggatagttcaacgtatacaaatcaaccaatgtgatacatcatatcaagacaatgaagaacaaaaatcacaattgatgcttaaaaagcattcgataaaattcaacatccattcatgataaataccctcaaaaagctgggtatagaaggaataataaagccatatatcatgacccacagctagtatcatactgaatggggataaacggaaaagctttcctctaagatatggaatatgacaaggatgcccactttcaccactgttattcaccatagtattggaagtcctagctagagcaatcagataggagaaattaataaaggacattcgcttggaaaggaagaagtcaaattatccttgtttgcagatgaaataatcttatatttggaaaaacataaagaatccacaagaaaactgtcagaaataataaattcagtaatgttgcaggatacaacatcaacatgcaaaaatcagtagcattcctatatgccaacagtgaaaactctgaaaaagaaataaaaagtaatccatttataatagccacaactaaaattaaatatctagaaagtaataaaagaagtaaaagatctttgtaattaaaactataaaacactgatgaaataaattgaagaggacaccaaaaaatgaaaaaatattccatgaaaaacctgaaaaagaaataaaaaagtaatcccatttataatagccacaattaaaattaaatatctaggaattaatgaaagaagtgaaagatctttgtaattaaaactataaaacactggttgggtgcagtggctcatgcctgtaatcccagcattttggaaggcaaaggcaggcagatcacttcaggtcaggagtttgagactagcctggccaacatggcgaaaccctgtctctagtaaaaatacaaaaattagctgggtgtgatggcaggcgcctgtaatcccagctactcaggaggctgaggcaggagaatcacttgaacccgagaggcagaggttgcagtgagccaagatcgcaccactgcactctagcctgggcgacagagggagactccatctcaaaaacaaacaaacaaagaaacacaaaaactataaaacactgatgaaagaaattgaagaggacaccaaaaaatgaaaaaatattccatgttcatggattggaaaaatcaatattgttaaaatttccatattacccaaagtaatctagagattcagtgcaatccctatcaaaataccaatgacattcttcacagaaagggaaaaaaaaatcctaaaatttatatggaactacaaaagatccagaatagccaaagctagtctaagcaaaaagaacaaaactggaggaattacattacctgatttcaaactatactacagagctatagtaaccaaaacaatatggtactggcataaaaacagacacatcgatcaatggaacagaataaggaacccagaaagaaatccacacacatccagtgaactcatttttgacaaaggtgccaagaacatacattagggaagacagtctcttcaataaatggtgctgagaaaactggatatccacatgcagaaaaatgaaactagaccccctatctcttgatatatataaaaatcaaatcaaaatggattaaagacttaaatctaacaactcaaactacaaaactactacaagaaaatattagggaaactctccaggtcattggtctgggcaaaaatttcttgagtaataccctacaagcacaggcaacaaaaaatggacaaatgggaacatatcaagttaagaactttctacacagcaaaggaaacaatcaacaaagtgaaaagaaaacccacagaatgggagaaaatatttgcaaactacccatctgacaaaagattaataattagaatatataaggagctcaaacaactctacaggaaaaaatctaataatccagttgaaaaatggacaaaagatttgaatcaacatttctcaaaagaagacatacaaacagcaaacaggcatatgaaaaggtgctcaacatcactgatcatcagagaaatgcaaatcaaaagtacaatgagatatcatctcaccgcagttacaatggcttttatccaaataacaggcaataataaatgctggtgaagatgtgaagaaaagggaacccctgtacactgtgggtgggaatgtaaattagtacaaccactatggagaatagtttggaggttcctcaaaaaactaaaaagagagctactatatgatccagcaatcccactgctgggtatatacccaaaagaaaggaaatcagtatatcaaagaggtatctacactctcagtgtttattgcagcagtgttcacaatagccaagatttggaagcaacttagtgtccatcaacagatgaatggataaagaaaatgtggtacatatgcacaatggagtattaatcagccacagaaagaatgagatcctatcatttgcaacaacatggatggaaccccaggtcattatgctgagtgaaataagacaggcacagaaagaccaacattgcatgttcttacttatttgtggaatctgaaaatcaaaataattgaactcatggacatagagagtagaaagatggttaccagaggctgggaagggtagtgggagggtggaggggagtttggtggggatggttaatgggtacaaaaataaaaaaaaaacagaaagaatgaataagacctagtatttgatagcataacagggtgacgatagtcaataataatttgactgtacattttaaaaataacttaaacagtataattggactgtctgtaacacaaaggataaatacttgaggggatggattttccatgatatcattatacacattgcatacctgcaccaaaatatctcatgaactctataaatatatatacttactatttaccgacaaaaatttaaaaataatttaaaacattttcttaacatgtactttgtgcctgtaatgccaccaggcacaaaagacataccaaaaaatgtagaagacacaatctctagaatttataggttggctaggaagataactacatgctaagtacctagacgacaaaaaatcagctaatgttagtatttacatacaaacttgagtatggaggaaatcaaacctaagaggaatggtcagtgtagagtggcctactacaaataatggatcttgagaagggtttttaaagtgactaatatgctttagtagagaggaaataatgccattatgacgttggggaaaatcctgtttatccaaagagtaaagttaaaaagactatctttagaatactgtaatgatggctggaaaaacatatggcttgacagtgattatgagtcctgatcagactgagttgattagaatcgctgctcctcctcttattgggtatgcaagtgatcatgcacaagttacgtgaccagtttcttaatgtaatgtgggaataataaaactacccacacctcagaagtttgttgtggagaagattaagtgcaattaaaaatggatatatagtacttagcatggtgcctaatatttaatgtgttacctatttttattattaaaacatgacaaatgatagagaggccctgaaagagccctcaaatgatattaaaagaggttatattttggatttgatttataaaataacaggtgaccacttaaaattcttgagcaatattttaattaaactggagtctgaaaataagttattccggaaatagaacagcagattggttgtgggtaggagtatgggagaaatgggggtaactaactgatgaaatggaattcacttaagaggttactggattcggccgggcgcattggctcacacctgtaatcccagcactttgggaggccgaggcaggtggatcatgaggtcaggagttcgagaccagcctggtcaagatggtgaaaccctgtctctactaaaaatacaaaaattagctgggcatggtggcgggcacctgtagtcccagctactcgggaggctgaggcaggagaatcgcttgaacccgggaggtggaggttgcagtgagccgagatcgtgccactgtactctagcctgggtgacagagcaagactctctgtctcaaaaaaaaaaaaaaagttactggattcgataagttgtctaaaaacattccaaagaatttcaagccttatgaacacatagaaaacagctgggaagaagaaagtagcatcctgcttctcaaggaaagggctaacatttacgtatgtgctaaatgttttgctgaagaagaaaagatttttggcattccaacagagttacaagcaccaaggacatggtacaatagataaaactaacaatcaggaatagagaagtagccaggctctcaattaggatcctggtgaatatgttcagccaacatgtgaataatggattagtttataaaaaggagcttctgagagaagggtgtgaaatatcaagattataattaccacgagaactagttaaccattgcagtatatttaaagatggtcctcttaccctaaatatttataagttaatataaggtctcttcctgatagagaaaatgaaaggttttaagaaaagacttaatacttgttggcttattaatagagatgaagctttcctaggtaagacagaaaaacataacctagaaaggaaagcataaggaaaatgagtcaaagcagagggaatgaaaagtaatttttaaagatttgcaagtaaagcaaggaaataaagaaacaacttgctattaatatagctactgaatgattaatattcttacaggaaattcaggatatttcaaagattaatattctaacagaaaattcaggatatttcaaagattaatattctaacaggaaattcaggatatttcataaaatacagtggtagggagcatggaggacatgagaatgtacctttcagacctcctactgcaagacgtgtcagtgactgatggccccagctgctgtgctctgaatcatcatcatgtttacaccgagatcatactttcatgagatggccccagtcaatgactgagcatggcagggatgctaaggtacatctataagagttcctatcaactttgccaaatgttcttaggattgcactgcaggctaagacccctctctccctccctctctccctctctccttccctccttgtaagctaagatcctccaagggctttctctctcccatcctccttggaggctaaaatccctcctgccctcccctcctccctcccttcttgcaagctaagatcctccaagggctttctctstcccatcctccttggaggctaaaatccctcctaccctcccctcctccttcccttcttgcaagctaagatccctgcctccctccttgcaggctaagatctatctctatctctctctccctccctccctcccttccttcctcccttccttccagagt

SEQ ID NO: 95122 - DNA, 201990 bp, Homo sapiens
  misc_feature (1)...(201990): n = A,T,C or G
ttaggagggctttggagaatggtttgctcatggtggcttttaaaatacactgagggttgccaggctgaatgggatccctgcggggctggtgacctggttctaggctggtgctcagcagagctgcctcctggtgggttagtggacttgttaaacatagttgcctctcctattccctgttcttgggggatgaagaagaaagtcttgtactctatcccttcccattctaaaattggggtaacggaggcccaagagagtaataatataagaaataagagccaacacagatcactttatgttaacttgtctacaaatgtcaaggggaggaacatcatggcatagtggcaagaaagatatagttttagatcctggtttttgccagtctgaaactgtgtgaccttgtgtaagtaagtaagcctgagactcagtttccttatttgtaaaatactgatgatgatgcctattatacagcattgttgtaaggagtagaaataatggatgtaaagtacctggatgagtgctggcatccagtgggtacctgataagtggtctgtatttatttatttatttatttatttttgagatggagtctcactctgtagccaaggctggggtgcaatggcacgatcttggctcactgcaacttctgcctcctgggttcaagtgattctcctgccttagcctcctgagtagctgggattaccggcatgcaccactacgcccagtgtgtttttgtattttcggtagagacagggttttgccatgttggccaggctggtctcgaactcctcacctcaggtgatctgcacctgcctcggcctcccaaagcgctgggattacaggcatgagccaccgtgccctgccttctttcctttttttgagatagggtctcactctgtcacccaggctggactgcagtggtgcaatctcggctcattgcaacctctgcctcccgggctcaagtgatcctcccaccttagccccccaagtagctgagaccacagggatccaccattatgcctggctaatttttgtattgttttgtagatggggtttagccatattgcccaggctggtctcaaactcctgagctcaagtgatccgcctgcctcggcctcctaaagtgctgggattacaggcatgagccaccatgcccagctgtaaaatttttccttttagagaacagggtcttgctgggtttgccagactggagtgcagtggctattcataggcaatgaccgtggcatactatagcctggaactcctgggctaaggtgatcctcctgcttcagcctcctgagttgctgggactacaggcacccagcagataaacaatgttttgtaatcatgcctgacagtaagaattttccaacggctagttaaaaatacagattccctggccaggtgtggtggctcacgcctgttatcccagcagtttgggaggccgaggtgggcacagatcacttgaggtcaggagttcaataccagcctggacaacatggagaaaccccatctctactaaaaatacaaaaattagccaggcatggtggcgggcacctgtaatcctggctactagggcagcagaatcacttgaacctgggaggtagaggttgcagtgagccgagatcgggccactgtactccagcctgggtgacagaacaagactttgcctaaaaaaaaaaaaaaaaatacagattcccaggcttcaccctctacagtctatggaaaggcatgggaatctatattataacaagccattgagtttctttttctttttctttttttgagacagagtcttgctctgtcacctaggctggagtgcaatggcgtgatctcagttcactgcaacctccgcctcctgggttcaagttattcttctgcctcagcctcctgagtagctgggattataggcgtgtgccgccacccccaactaatttttgtattttttagtagagacagggtttcaccatgttggtcaggctggtctcagactcctgacctcatgatctgcccaccttggcctcccaaagtgctgggattataggtgtgagctggcactgggtggcttctatgaggaagttttggaatgcatccaggagccctccactccaggttcttggtttattagccttttggtcctctatttatctagccctctgttcagtaaagctttaggtttgtttgaaggagacatgattagaaggtcaaatattgtatattctcaaggcgaatgtgtcctgaactttgcatagtagaatttattcctgaaaagttgtttgcagatggaatttgttttgtgcgtgagagaacaggcatatacagaataccttagtttgctatttaatttaaatcaatattatctgagtgactgttatttgctgaggatacaatgataaacaagatgcagaccccatcttcaagggtcttagagtccagcgaggaaggtggtcaaataaacaggcaattacaaaattgtggttagataaggttaagcacagggagctatggtggatggaggaggaagtgcacccaactcagtgttggggcatcttggaatttctaggtgaagtgacatgtgatggagaaacctatagactggaatatagtctcaaatccattgcaaagggaatgatccttccccaacttatcttcgtggaaaaataaactttctttctttcttttttttttttttttttattgagatggagtcttgctctgttgcccaggctggagtgcagtggtgcgatctcggcttactgcaacctccgcctcccaggttcatgccattctcctgcctcagcctcccgagtagctgggactgcaggtacctgccactgcgcctggctaattttttctacttttagtagacgggatttcactgtgttagctaggatggtctccatctcctgaccttgtgatctgcccacctcggcctcccaaagtgctgggattacaggcgtgagccaccgcgcccagccgaaaaataaactttcacatcatgttacccctggatacatttttgtggccatgcatctgcacgaatattcaatccctgctacaggcaagacactgagtgggaygttgcagggctaccaaggtgaggaggtcccaacccctgtcctcaaggagttgatgtaacacctacccaggattaatttcatttctctcagaggtcattaatccagtgtgatctgtttatggctgaagaggtagtttattattcaggtcttcactccctttcctgaaaaggctgtttattttgtttcatcactgtgcagtggcgaaatccagttccaaccaatacttaagctgggcatacattttacccaggagaaaactgaagggcgtgcaggagttcacagagctgtttgctgacccaagccatgaatctgtggagacctgggtcggtcttcagggttagtagggtctgtagggtctgtgaggatccgaggcagcctgcagacctactatcatcttctttttcttttttataattggcaatcatccttggctacccagtagcatcttttttttttttttttgagatagagtttcactcttgttgcccaggctggagtgccatggcgcgatctctgctcactgcaacctctgcctcctgggttcaaacgattcccctgcctcagcctcccgagtagctgggattacaggcatgcgccactacacccagctcattttgtatttttagtagagacagggtttttccatgttggtcaggtggtcttgaactcccgacctcaggtgatccgcccaccttagcctcccaaagtgctgggattataggcgtgagccactgtgcccagccccctggtagcatcttaaatcaagctttccttccctctgggtatcatggacatgaacaccttttatgtctctgcctcaagaggggaggaggcacagaggaacaaaaatccttgtgaattatgataattacatagtgtttaaatgaagggtggcaaggtgtgtaagtccataggtaaggtttcttttttctttttcttttcttttttttgagatggagtctcactctgtcacccaggctggagtgcagtggtgcaatcttggctcactgcaacctccgtctcccgggttcaagcgattctcctgccctcagcctctggagtagctgagattacaggcacgccatcacgcccagctaacttttgtatttttagtagagatgggttttcaccatgttggccaagctggtctcgcactcctgacctcaagtgatctgcctgccccggcctcctgaagtgctggggttacaggtgtggtgtgagccaccacgcccagcctcttcttttttttttttttttttttgagacaggttttcacgttattccccaggttggagtgcagtgttgccatcttggtttactgcagcctaggttcaagccatccttgtatcggcctcccaggtagcttagtctacagctgtgtgccaccacacccggctaatttttgtagaaactgggtttcaccccgttgcccaggctggtttcgaactcttgagcttaagtgatctagtcaccttggcctccggaagtgctgggattacaggcgtgagccatcgtgcggcctggcaaagtttctttatcctcagtgcttgtctgggtgtgttgtctggtgggaaccacttagaccctgtaagtgaatgtgtattcccatcttgtagatggtaacctgaggcccaacgggtgtctggaggtagtgttggacacctcgtggtctgcatcttgctgcacacagaatccagcctagactcattatcctggcctttgaagtctcccccagtatgaatcccccagcctcccattcctgtttctccgaaggccaagctcgaagcatctgctgcctcgtttctgccaagttggccccacctcctgagacacttctcccctctactggcctggtgaaactcaacacatccttcaaagcccagctcaggtgtcacctctctcctggttggaattaacctcttcctccttagcactctctggtttggccctttctcttgcggcttctcctgggcaagtggcatagcctccctgatcctagtgtcttcctctgtgcatgggcacaggagtaatatctgctgtgatctttaactcctgtcagttcattgacctctttaacaacgtgatgaaagcttccagaagagctaatgtatgtggagtcccacgatgtgtcaggctaggtgtttaggactttactaactactgtctcgtttaatcgcgaatgcagtggacctctctctccacacgtcctagtacgatctttatttcacacgggaggagaggagggtgggtggggtcggccagagaggagaaatgcgtctccagagttcacagggctggtactaccagcagagccccgtccaccatatgccacagctggggttctaatccctggactggcttgtactgggctctctgcctccctggccggcgctcgggggctgggggacagaacacaatgtacagcgtgccttctacaatttcggggttcacgcacccccaagcccacccagggccaggtcaaacgcgccttcgccgggttgctgtctacaatcaggcttggctgcgctctcagtaggggtctcggtcaacctctgcccacccgaacccggcgccgtggacctggtgtgaggctggggagcccgtcctgaggggtgccggctcgaggcgctagagccacggagcctggtcccgggctccaagtcccaggaatgtgggagggctgggcggaggggcgggcgaggcgggagcgcttcctctgcccgcgggaggggatccgcggccggctcggagggggcgggggcagcggcgggcggcggcgaggggctgcggagctccgcagccgccgggccggccggggcgggaggaagcgatgaatattcagagggggaggggaagggagggggccgagcgctcgccgcggctccctgcagccccagccgcatgacgcgcggaggaggcagcgggagcagccgcgggagccgggaccgggtagccgcgcgctgggggtgggcgccgctcgctccgccccgcgaagcccctgcgcgctcagggacgcggcccccccgcggcagccgcgctaggctccggcgtgtggccgcggccgccgccgccgctgccatgtctccggggaagcccggggcgggcggagcggggacgaggcggaccggctggcggaggaggaggcgaaggagacggcaggaggcggcgacgacggtgcccgggctcgggcgcacggcggggcccgattcgcgcgtccggggcacgttccagggcgcgcggggcatgaagccggcggcgcgggaggcgcggctgcctccgcgctcgcccgggctgcgctgggcgctgccgctgctgctgctgctgctgcgcctgggccaggtaagcgccgggtgggctcgggcggggggcaggaggctggggcgggactggcattgactgcacctgcccgagcgtacccccccggggggttccggggaagggggcgggggtccggatccccggatccccggaaggcgacttgcggggaccccggccggcctckcacgccggcgatcgatcccttttccggctgcccaggatcgggggagagaggcgggatccgggtgccgcggtgcccgagcctcccggggaaagcctccgcgcgggctccaggccgtccctggcccggctcttcccggcgctgggcacatctggcgggcacgggcccggcttcctagccggaggcggccggagggggcgtgtttgcggaggtctggggacgcagagccgggcggcctggctgagcctttgccgacagacctccgacccggcctgcaggggcccgaggggcggcgggggcgacagggcagggccaggcgctgggcagtggggccctgggcgaggcgcgggactccgggccgagggccctgttcctggggaaagttcccaggccggggaaaaggtggccgcacgctggcttttctcaaggcagccggccctcttggcgtcgtgcttgatttcatgggtgtttaatwygtgctttgtgggcgctggctccccctccccaccccaccctcaccctcttttctggcttcacttttcagataatgctgtccctggcgttttggtgaccgacctttccccttcctggcatttccataggggctgaggcagagcagytgaaggggcattcccatttcacagatggggaactgagggagagaagtgaaatagcggagcacccagcccgtgccatgggagctgagccagcgggcacgtcctcttagcctctggagcctgttggggtttgaacccgcaggggaagcggtctagggctgccttgctgtgcgtttctgcaaatgaccatcttgcttgttttatacagacaccatctctgaggaaatgagttattggctggggatggaacctggtttcagggaaaacttctccagcgcgaatacaggagagagcagaagcatcaccctggggcagcaatgccgcctagcaggctgtaggagaagggggctggggcctgggggctgcgtgaccctcggcacccaagggtctctcctcgcagtttccccagcaggttctgcacaggctctcctgggggccagaaggcaatgtgacctcctgcagagaacctgggagtagatgtcaggagactggctccagggccgggccacagggctggacttgctcttcaggcttctctaccctcagttaaccgcatctgtagaatgagtatagcaccctctgcccaatggaattgtttgaggggcttccactggccaatgtctaaaagaactttgtaaatattaagggtttccacatgggattctcattattaaggtacagtgcctgtgggggctgtcttctccctgtccatgtaaggaaattcagggaagcagtgtctgaagttaaaaaagccttgtatttgaagatttcttgtatcaaaagtttatgctaaaacaaaaaccacaaaaaacagaaaacccccaaacttaaagcttcatttatttttaaatgtataatatatgtaattttttttttgcttcagcaaaaaaattttaaattatatatatataaaatttatttatttttgctccagccatagtggttgctagctgtgttctcaatcagcaaaaagtttcttgggtaaatttattgcttgctcaatccttccttgtatttcattagcatattgccactctacacttgtcctgtatttagatatttccttcctctatggtttgttctgtagaacctcaaaaggactctcttatttcttttttttttggacacattatgaaataggaagtctaaaaggctcccagaagaagcatcttcaaaatccacattcagcagttcattttgataatggatatttcagggaatcagtgcatttttgagctggaccagactttcaagayagctgaaacccctcagagctcttagatgaggatattgatgtccagagaagacagggagcaggctgaggtcacccagcaaggtattagagaagacaagatgggaacctgggtcacckgcctgggcctcatattttcaaagtgctatttttttttttcccgtgttttcactttgatcttacttttaatgatagggacgtatcactgtgtcttctcaaaatggtgggtgtgaatggaatttttcaaagttgaatcaatttgagatatttctgaagtttgtttaggaaacaagtatgtgactaccttcctaagagctgactggttttttgaggcctggattgtgtgtgtatgtgcttatgtgtgtgttataaaatggaatcaactataccaggttaaacaaatggacaagtcatggaaaagacacagctctgtttggacattaataagggcgggtgtggaagctggaaagctgagatgccggaaggctcagtgcttagtaggcccggaaaagcaatttttgaactggcatctcattccccttttctaagacaggaaggacggtcagagatgattccaacatgaggactttgctagttgcagtgtctgactcctcccattctcatagcagttttgcacagtagttttggtttgtgtgtatgttttaggcaatgtgacaaagcagttttcctcctgcctccttgagaaatttaatcctgacaggttctttaagaaatcagcttgatgtgggctgattttaaaagaataaatgaaaaaaaaaagctggtgactgatagctgttttattggtcttgtagtgttttggttttgttttatcttcactttcttgtttcctggtgaataataactgggtttattatctctcatggctaatccttaagcctgattccttacctgttccatccagagtacaaagtatattttgactcctctttaaactgcttgttagattctcatatgagtgactttaaatatttttgttttgcttcaggacaacgggaaaaccaaacgattatgttttgtttgcagacagtttacgaaaacagcaaattggtttatggttagaccgtgactttgagctgacttcaagttgggccccacgataaagataaccatggaatacccaagctttcctaagcagagaggatcctggcttccaaatgagcaattttggtcagcaaaggggttatttagctcctaaaagtaatttttgcttgaggttggggctgaggcagagtggctgaacaaccgtaggcctgggtgtagccagaggatcatcagtaattacttctcagttcattcacttcttgggctagggaattattttgagtgcaggataagaggcaattttctgtgtgtttcccttctaatataatgccactgatgatattataattaataggtaacattatgcatgacaggcactgtgtgctaagggttttaatgcattatytcatttggccatttcagaaataccaagaggtaggtgctgttcttgtttatttgtttgttttttttttttgatagggagtcccactctgtcacccaggctggagtgcaatggtgcaatcttggctcaccgcaacctccacctcctgggttcaagtgattctcttacctcagcctcccgagtagctgggattacaggcgtatgccgccatacctggctactttttgtatttttagtagagatggggtttcaccatgttggccaggctggtcttgaactcctgaccgtaggtgatctgcctgccttggcctcacaaagtgcagggattataggcgtgagccactgtgcccggcctttttttttttttgagatgaagtctagctctgttgccaggctggagtacggtggtgtgatcttggttcactgcaacctccgcctcctgggttccagggattctcctgcctcagcctcccaagtacctgggattacaggcacgtgccgccatgcccagttaatttttggatttttattagagacagggtttcagcatgttggccaggatggtcttgatctcctgacctcatgatctgcccacctcggcctcccaaagtgttgggattacaggcgtgagccaccgtgcccggcctgtttttgtttttaagagacagggtcttgctttgtcacccaggctggagtgcagtggtacaaacgtaattcactgcaatctcaacctcctgggctcaagggctcctctcgttttagcctctcaagtatctgggactaaaggcgtgtgctaccattcctggctaatttttttttttaatagagatggtgtctcgctatgttgcccagtctggtcttgaacctctgggctcaagtgatctgcccaccttggctccccaaagtgttgggattacaggcatgaaccactgcacccagccatgtttttattttatctgagagaaaactgaggttcagaacttaactgtrtacttctggaatcttcacagagaaataaaaaaaaagaaaaataatttactatagattcattaactactacgtggcggagccagggctgatgtctccactgccccaatttaccatcctgtgctgtaaaaagtcatggagaaggttttctgtgtgcagctaagagaggaggtggcagacatttatttatttatttatttatttatttatttatttatttatttatwgagacgaagtctcactctgttgcctgggctggagtgctgtggcacgatctcggctcactgcaacctccatctcccgggttcaagcgattctcctgcctcagcctgctgagtagctgggattacagacgtgcgctaccatgcgcagctaatttttgtatttttagtagagatgaggtttcgccatgttgaccaggctggtcttgaactcccaacctcaggtgatccgcccacctcggcctcccaaagtgctgggattacaggcctgagccaccgcacctggcccagacattttttagacagtcttgctgtgttgcccaggctggactcgaactcctgggtccagttgacatccctcttcatccttccaagtagccaggactgcagggacatgctacctttattttgggttctttgtgtcctaaaccctgtatgatctgctccatttgtaacacagagaacccaggtgccctctttcctgcttatatttctttggggcctcagtttacaaggcaagtctgcctttgtggagatagactggggtctgggatggaaagacctgggtttgggtctttgctctgccactgcataaactcagcaagtcacttaacctctgtgacttctcatttccttatctggaaaatgggactaacacttcctgcttcactgggtggttgagaggatcaaataagatagaaaaggaattgctacgtaacacctaaagcaaggcccaactgctagttgtggctgctgctgttacttggagagaagaaatgaggccccagatcattagttcatatgacaattttttctttttttaagacggagtctcactctgttgcttaggctggagtgcagtggcgtgatctccacttactgcaacctccgcctcccgggttcaagcaattctactgccttagtctcctgagtagctgggactacaggcacgctccgtcatgtctggctagtttttgtattttagttgagacggggtttcaccacattggccaggctggtctttaactcctgacctcaggtgatccacctgccttggcctcccaaagtgctgggattacagtctgagccaccacgcctggcccatatgacaaatatttatgaagtgttttccacagagtagtatggaataactctgggtgtgtgcaagatgaactgagctcagtcacaatacttttttttcccctaatgttaagaattattggctgggcagggtgactcattcctttaatctcagcactttggaaggcagaggtgggaggatcaggtgagcccaggagtttgagaccagcctggatgacaaagtgagaccttgtctatacaaaaaattagctgggcatggtggtgtggacctgtggtcccacctacttgagaggctgagttgggaggatggcttgagccctgggaggttgaagctgcggtgaaccttgatagcgccactgcactccaacccaggcaacagagtgagaccctgtctcaaaaagaaaaaaaataaaaaataatttattttagggggtcttagtaaagaaagacccccaaaagtccatgattttataggtcgaatgaggtgaaaagtggtatcatgataaataaatttgtttaaatatcataaaaagttggtctaaagaaaaacattgggtaaataattatgtgagtatgatgtggttatgaccaaattgtaaagatgatcagtttcttaagtctgggggacaggcactgagcagaggccgtggtggggaacaggagcctgtcttcatggctcttactggccactgggcaagactcagatagyaccaaccaaccagtcacagttgtgatgtaggatgtgactgtgaatgacatccctgctgccygcttcagagaaagggctgccacttgccagagaaggaatggtgataatgagggacagccagtccctaagtggagatccctgaaagtggtgaatatcttagaccagagaagcccagagcagtttttttaccaccttgtatggctggttttccagtggctttactggtgccccctcggaggacaggggctgtaggaagtttgttattacttccttattagtgacagctgcagtcatcctattgtctcagaatttccctggcatgtaaatggtaggataaggggtggtggtaagcagatggggggcattttgaaaacgaggcagtgtcagctcccacagaaggtctaattttaaacatgcaaataattttcagttccacttttccttcttcctgttagagggaagytgtcccctgttgccatttctgaaacttgggcggacaatgtcgttattgtgttacaaacgatttgcgtctccagggcaggagttgggtgatatttttctgggagcctgtgccagggcgtagcccagtgttatctcatggtttctgagtgaatgagtgagtgagtattaaaacttcatatcaacatggagcctataacacagtggttctgaatctttcttgggggggaaaagaagagatacaagacccctagagagtatagagagtatgtaaaagggaagaatccttccccaaaagggaatgcacatatttacaatattgtatccaatttcagaaggtttttttaaaatttttaattttattgttttttttttgagacacggtctcagtttgtaccccagcgtggagtgcagtggcatgatcttggatctcggctcactgcagcctctgcctcctgacctcaggtgatccacccacctcggcctcccacagtgctgggattacaggtgtgagccaccatgcctgaccatgactagtgttttgatgtgtggatttactacaatttatttgaccattctcctatcaatggacactttagttgttttagtacacctccctgtcccgtcacaaatcatactttgtaatgtttctggtggatatttcttgtaaccttcacaagtttatctgtagagtaaatttctagtttcaggattactggattggaagatgcatgcatttaaaagtgtgattgctgttgtcaggttgtcctccaaaagtgtcccctcagtttgtacctgtatccataggtttggagagtgtctgtttctccataccgtctcatctgaaatgaaaatttttacatgtttgctagtctgaaaggtgaaaaattgtatcttgttttttttttttttttttttttttttgagacggagtcttgctctgttgcccaggctggagtgcagtggcgctgggctcactgcaagctccgcctcccaggttcatgccattctcctgcctcagcctcccgagtagctgggactacaggcgcccgccaccaagcccagctaattttttgtatttttagtagagacgaggtttcaccgtgttagccaggatggtctcgatctcctgaccttgtgatccgcccgcctcggcctcccaaagtgctgggattacaggtgtgagccaccgcgcctggccgtatcttgttatttttatttatatctttaattttgagttagttgagttttttggtcatttgcctctgcttcttcttctttttttgttttctttttttttttgagacagagttttgctcttgttgttcaggctggagtgcaatggcgtgatcttggctcactgcaacctccacctcccaggttcaagtgattctcctgcctcagctttctgagtagctgggattacaggcgtgtgccaccacgcccagctaattttttgtatttttagtagagatgggacttgttccttaggaaccatgttggccaggctggtcttgaactcctgatctcaggtgacccacctgcctcggcctcccaaagtgctgagattacaggcgtgagccactgtgccaggccccattttttgttttttggttaactccctgttcattaaaaaaaaaaaatctrtatctatagatagatagatatagatataatctttgttatcaatttgtataagctctttggaaattagtccttcgattgtcatttgtattgcaaacacattccccctcccccatgccaattattttagatgtagcacttgttccttaggaactcagagataaataagaccctagggtggtgaagagagcatagaatttggaacaagactcctttgttggagtcttggctctaccacctcattagctgtgtgatcttgggcaggtatcttgacctttctgatccttgctcttcatattccaaaaatgctaataataggagtacctctgacacagggtagttggagaagctaagtgtgatcatattatgctaaaattccttgtaaatggctatggaaacataaacacagcattttataaaataccacgaggtattccatttactgaagagttacatcagaagagtatttctgattgtgccactgcactccagcctgggcgacagactgagattccatctcaaaaaacaaacaaacaaaaaactagccagtcatttataagaatgagttacagctataggtgcaggcggtaaatactctccaagatatctaaataaattaaaaggctatgtagagaacaatgtatatataatgttacctttaaagtgacaaaaaaaggtgaatatagatacttgtgtatcagaagagagaggtattccatttactgaagagttagggcaaagaccataatattgtaattatcaataattatgaattgtcaaaattatgtcatgaaacctctttttttcttttttttgagggggagtcttgctctgtcacccaggctggattgcartggtgtgatcctggttcactgcaacctttgcctctgaggttcaagtgattcttctgcctcagcctgggattacaagcatgcgccaccatgcctggctaatttttgtagttttagtagtgacagggtttcatcatgttggccaggctggtctggaactgctgacctcaagtgatctgcctgccttggcctcccaaagtgttgggatttttttttttttttttttggagacggagtctcacccagtcacccaggctggagttcagtggcgcaatcttggctcactgcaagctccacctcccgggttcacgccgttctcctgcctcagcctggctgggactataggcgcccgccactatgcctggctaatttttttgtatttttagtagagacagggtttcattgtgttagccaggatggtctcaatctcctgacctcatgatccgcccgcctcagcctcccaaagtgctgggattacaggcatgagccaccgtgaccggcggaaagtgttgggattacaggtgtgagccaccgcgcccggccccatgaaacctcttatattgggtttgagattaaatccacaatggattgtgtgtattatatatacacacacagacacacgcaaatgtattaaaatgtataatatgaagcagtggaacttccctgatagcacaatttaaatatttcctttttgacaaacgtgcatagttaaataaattaagtgaccaccaggtgtgactgaagagtggccagtgtctattcctagccccgaaggagcacagggatattgactgtgtcccttaaaaaaaacaaaacaaaacgtagggctttctttgtattggtttgaacatttctctttatcttgtgacctggccaactctggctatggctgcctcctgtctctcggtacattttctgtggcggtcaagaggagttattttaagccaccaatgggaaagtttaaagacataatccttggctgtaattgcgggagacgggaggctgagagtctgtgctgacttgccacctgtttccacggcagcaaggtgattgtgcatttcctgctgctggctgaggggccagcaaattttcatgtcgttgtgtcatggggaagttttcctgtctcaatgagagcacaccgtgcttgtggtcttgttcctgtgaccaggacatggagaactatggggagattgttctgggtgtgaagggaaattgctggccagtgcttagtgcacgggctttggagtcagagccaacttctccacctcctacctgtgtgaccttgggcctatccttctaatgcttggagtctcttctgtcctcatctgtatgatggggataacaagaatacctactttataggattgctgtggaggattaaatggatctgcatgacaaatgcttagcatgaaaaaawccctcaacagatattggctgctattttattatcttattgtgctgagacactggcataatttacaattcaaaaattaaatttttttaatcttatactgtagtttacaaggccctttcacatatatgagcttgttcaatcctcacagcgtccttgagtttgtcattgttattgccatttaaaaaggtatgactcagagtggctgtaattgacttgtccaattcaggtttcatctgtcttttgcagaataataatcatgtacgttcatagtataggccacctctttttttttttgttttttaagacatagtctcgccctgtcacccaggctggagtgcagtggtgcgatctcagctcactgtaacctccgccttctgggttcaagcgattcttgtgcctcagcctcctgagtagctggcattacaggagcccgcccaccatgcctagctaatttttgtatttttagtagagacagggtttcaccatgttggccaggctggtctggaactcctgaccttgtgatctgcctgccttggcctcccaaagtgctggaattacaggtgtgagtcaccgcgcccaagtataggccacttttaagaattactcagagttagcttataagaggcgaatcagtggagtcctccagtttggttcacacataattattaggttgaaccatataaagttactgtttttggtcctgtgaatattagtatttatatatggttccaatctgatatgttccagaaaatacacacttaagtaaagtttggaaaaccaaatcatagacttacatactgtaaggcggtgtatttgaaactgggatgtaaaatcaatttagtgagttatgacctgcattaaaaaaatggtagaatatcagagtttgctggtaagtattgtaaaaataccagagtttgctggtgagtattgtccatttcagttatatatgtgcgcacgtgtgtgtggtgtgtatgtgtgtatactaaattgcatataaaatgaatttcttatcatgggttcacctgttgccagaaaacactggaagtcactgttccagggaatggaatggtggaagatgcctggtgggggatggaggtggattctgtttccagacacagtaaaaaaaaccagtataaagtccccaattatgcattgtcagtgtctctatgtgtagctggaaaccattcctgcagcaggtaagcaggaagaaccaaattgtcgagaggcacttcaggaagggaagtgggccgactgaaagctttggaggcctgcctttaagtagctgcttttctggaaacttcagggtgaccagcctagtgaacaagctatgggtcagcgttgtgtgttcctttggtaaatggatttggtagagagctaacactactgcatttgtagtttatttgtttgtttgttttctttttgagacgagtctcactctgtcacccaggctggagtgcagtgttgcgatctcggctccctgcagcctccacctcctgggtttaagtgatcctcctgcctcagcctcctgagaagctgggattacagatgtgcaccaccacacccagctagtttttgtatttttagtagagacggggtttcatcatgttggccaggctggtgttgaactcccgacctcaagtgatcctcccatcttggcctcccaaagtgctggggctatagggctgagtcaccgtacccagcctgcgtctgtagtttaaatgataacttaatgaccaccatccagtagctgaggctctaagagggaggtctgaatagtgggtgactcagctcagccctgcctgacctctagctctaggctgtgctgtctctaggctccggcactgatttgcatgggcctgaatgaaccttctggagattgttagcccaactggctgaaggatcctgatccccaggttaatttgattcccatcaaacagttcatttttttttttttttgagaggcagtctcgctctgttgcccaggctggagtgcggtggtgggatcttggcccactgcaagctctgcctcccgggttcaagcagttctcctgcctctgcctcctgggttcaagcagttctcctgcctcagcctcctgagtagctgggactatatgtgcaggccgccacacccggctagttttttgtattttagtagagacggggtttcaccatgttttccaggctggtcgtgaactcttgagctccggcaatccacccgctgcagtctcccaaagtgctgggattacagttgtgagccactgtgcctggcctttttttttttttaatataaaaaaattgaaaatacagataaaaggaaacaaaattacctgtaatctccactcatccaggttaactcctggtacctttttgatgcgatttctttgtctttttaaatgcatgttctgtctatttatactacaataggataacctcctacatgtgctttgtaacttacatcttttaatttttaacagttgaggtgggccgggcaccgtggctcatacctgtaatctcagcaccttgggaggccaaggcaggcggattgcctgagctcaggagttagagaccaccctgagcaacatggtgaaaccctgtctctactaaaatacaaaaaattagtggtggtgcacgcttgtggtcccagctgtttgggaggctgaggcatgagcatcacttgagccctggaggtggaggttgcttgagtcctggaggcggagtgagccaagattgcgccactgcacttcagcttgggctgyagggtgagattctgtctcaaaaaaataaataaataaataaataaaataaaaaaacaattgaggtggatgtctccctaggggtaccccaggaagccacaggataaaaagcaggcatcttgctggagggtctctgttgctcagtagaaattattttgtaatgttttttgaaaaccacaaacatggacatattatggactrgataccacatttgcatcaggatttttttttcaaccagtacagtacataacaaagaaatctctaccctgcagaccctctgggggtgtgagagcgctccttgctattctcagggtcaatgtatggcaatctgtgaaggactgacaatatattgcaaacgtttccccctgccagtaaatattcttcttttgtataactgttagctgttgcatccattccattatgtggaggtaccttaatttatctaataagtcctgtgattagtcttatagtttgttttcaaaattttttttgtcacgataggccctattcagttgactttgtgatcagctctgaacatataatctggtgattgccttaagataaattgaataataaaagtaacaatagtagctaccatcggttgaatatttatcatcaactgttgtgagcacgttgtacatattaactcatttaatcctatgacgtaggtatagggaaggaaactgaggctcagaacctctgccagctagttgtgggcttcctttgaggcacaggggagctgaatgggagggtctacataggacagggcgtgtctgagtccaggaaggacagctggacttgggccagtctcacaggtgggaaggctgtctttctgtgaggatgggtgacttgttgacctttgatcctcagagccctgatgcagcaggagtgaaatgattcccagagccacagaaaacaagagtatctttgtcttggattttagatcctggagctatcaggtggtaagaaggctgtctgacccagattaagtgatgtcatggtatcatgttggggtgtgggccttcctgttgtaaattatttgggatttcatagagatcgaagtcatgtgtggatgacatgacttcaggatgtcccattagaagaggaacgtgggggtcaggcgtggtggctcacgccagtagtcccagcactttgggaggctgaggcgggcggatcacgaggtcaggagttcaggaccagcctgaccaacatggtgaaaccctgtctctactaaaaatacaaaaattaacagggtgtggtggcacatgcctgtaatcccagctactcgggaggctgaggcaggagaagtgcttgagcccgggaggcacaggttgtggtgacctgagattgtgccattgcacttcagcctgggcaacaagaatgaaactccatctccaaaaaaaaaaaaggctgggtgcggtggcttacgcctgtaatcccagcactatgggaggccaaggcgggtggatcacaaggtcaggagatcgagaccatcctggctaacacggtgaaaccccatctctactaaaaatacaaaaaaaattagctgggcatggtggtgggtgcatgtagtcccagctactcgggaggctgaggcaggagaatggcgtgaacccgggaggcggagcttgcagtgagccaagatcgcaccactgcactccagcctgggggacagagcgagactctgtctcaaaaaaaaaaaaaaaaaaaaaagaggaacttgggaaagagcatgggctttggtgtcagcagaagcatgtgtccagttccatgctcttcccttatagctgtgtgaccctgctatctgcacagggacttgagcctctcagaatctgttactgcatctggaaaatggaaatctggaaatgtcactgcatctgtagcaayaaccaggccattttgttactaggtttaagtgagggaaggcatgtaaggcactcagtccagatcatggcacttagtaggcctgagcacatttgctcccacctcagtgacctccttgttaacacgacatctcctgactttggggctgcagagtgatgcagagcactggccagtgttgccatgcacccagggtgcagggagacctgtcttgcaggtgttcaaacaacttttgtcagcctcagtgtcagggacttttgttgcgtagagcagtcaccraatcctatggtgagaagagaaatcgttggagatgggggtgcaggggtggaagctcttatttcagaagacctgttgtgaggtaagactcagaccctcagcttctatccggccacagagtttgggaccagcctttcgatgtcttttggaagatgcacatggaatgcttagcctttgctcttccctggaacctggcttaggctttgcacctatcccaccatgtggttggggtgagtgaggacaacttcttttcctccagaacatggtttctccatctcagccctattgacattttgggctggataactcgctgttttgggaggctgtcctgtgtgccccgtaggatgtcctgcagcctccctggcctctgcctgctaggagccagtagcgccccctcccccacagacaaaaatgtctccagatattggcagatgtcccctaaagggcaaactacccttgctgtaggtaatacttgctttgaagtactggtgtggatggcctatgccctggcagtcttactaggtgggactggctgtcctctcattctcatgggawtggcctcatgctggtagctgacttcctccccgtgagaccgtaggtctaaactaacaaggtttacacatgtgacaaacatccaggttgccagggctcaaaagagggttcacatcgactcccttctcattcactgagtcctttttcrggagctttggccgagtttgtgctgcgtctgggcatctaggtgtcgagttcttccctagtgttttcagcctcggcttcctcctctgtaaaatgggagtaactgatacttttcctgtctgggtgggaaaggaaccccgtgctaatgtgattgatggtgtggtgctaagctctgctgcaagggatgtgaagttgagggaaaggtttaccatttattaggagctttgagaccaagttccttccacacaagagatatgccctgtcaaagggagatcccattgcaaagagattcactgccaagttccccctcccactagctccctggagcaattttcagcttttagagtgtttagaggcctcagggtgtaaagcgagagagagaatgccttccagccagcgagagagaatgccttccagccggtgacattgagaatagcaggaaagaggcagaagaagaaactgacttgaagggtgatgccagccaggggtgagtggagtgaggtaggatttgctttctgaaaactgggatgtgcacacaacctatcaagaatacttcactttgtgaggcccaaaaacagctcctagcacagtgtagagcagacttggtcagaacttcaatccttgayttttttttttttttaacccgaatttcatgaggtttttctgagacatccactggactgtcatataccgtgtgctgggctctcattttatccttacaattattatgttcattttaaagacctcatgttagctagatcagtagggtgactacagtttacagtaatctactgtatatttcaaaatagctagaagagaacaatttggttctagcataaagaaaagacaaatatttaaggtgatacatatcccaagtacattgatttgatctttacaaattgtgtgaatgtattaaattaccacatgtgctccaaaactgtgttcttgaaaaaattatcacgcccattttagagatgaggcacagagaggtggagggacttgcccagatccaggtatgtggctctcctgtaatckcgcttctattgctttgtgatcagcagcaacttagtagctttcaaagcttcaattttcttgtgtgccaaatggggctaataaataccttagaggattgtgatcaagattccgtgaaaaaatgtatgcagtgcccccggcaaggtgcctggcatacagaaagtgctctgtacgcaccagctgctgtcattattattgtttcaactaccagtgatcataaaggatgcctgctttgatgagcttttccaggaatatggactggtctgccctgatctacttgaataatctgtctcaggccctattcggtaaatacatgtaggaggtgcagctgccagggaagggagggatgttacctggagaggacagagtctgaagttcaggaaatacagcaagagccttcctcagggatgaaacatgtgatcttatggtctgactagcctcaagccagctgagctcattgccrtgcaacttggtagttaatgattgctagtaagaagtttaaaaggatcatcccctcaaagaatgtcagagttggaaaagaccttagggacattaggctaggaaagacaatgtcctagtgagtgactgcttgggccctgtatagaagggattctcagatcacttgggatgtcctggctcagcaggaggctaaggtgggatcaattagtgatgtctgccatggccacaagagaggcaaggagtggcacatgtgctgtttatttgctgtctttggctgcagctgaggacactgaggcccaagacttgcttgcttactggacgatcacccaagtcattaaaccacaaaaatctcttttggaaggaatctgttaagaatgtctgattataagagttgcacctttgagcaagtattttttgcttgatagtcttcagtgaggaggaactgtcttcaaagagcacattctgtcttttggcaattctcccaattagaacttagaccactgaggtagaaaggccttagaagcccctttaagtgggctcttctcaactggggctgcacctgagaagcttttggaaaataccagttggaggctccctccccagaccagtggattctggatatctgggtgtatggacacctcttgcccccattggtgttttattttccaagctcctcatgtgttgttaatatgtagccagggttgagaaccactgagaccaaaactctttggaaacagagacccagaaagggagaacatgattgtctatgggtatgtagggctagtggcacaaggagaaggaaaactaggggggaaaaggcctttatcaaatgccacccatatgctagtctcttttactttcatgccgagattcttctttttttttttgagtcagagtctcgctctgtcacccaggctggagtgcagtggtgcgatctcggctcactgcaacctccgccttctgggctcaagtgattctcttgcctcagcctcctgagtatctgggagtacaggcttgtgccaccacagctggctaaattttttgtatttttagtagagatggggtttcaccatgttggccaggctggtcttgccctcctcacctcagctgatctgcctgccttggcctcccaaagtgctggtatgcctggcccttttttttttttttttttgagatagggtcgtgttctgttgcccaggctggagtgcagtggtgtgatcacagctcattgcagcctcaacttcctgggctcaagcgatcctcctaccttacctgcctgagtagctgggactacagatgtgtgccacctctcctgggtaattttaaaattttttttttgtagagatgggggtctcactatgttgccacagctggcctccaagtcctgggctcaarcgatcctcccgtcttggcctcccaaagtgctaagattataggtgcaagccacctctcctggcttgcttctttcccgtaaattgaggtgtgttattccactgcttaaaagcctacatggcttcatatcgctsttagtataaacccaaacagtggtctgcaagactctgaaccttagatyaggatgatcagacccctccctcccctccaccctccgacctcatcctggctacccactccctgttcacagactrcagtcacctggctctagtacaacagacacttgaacctaccccgcccctctccctcagggcctggtactatcctcctcgctccttcttatcactcaggcccctctatcccatcatcctccttcatttcctcccatccttatcacctactcatttctgtctgtctccccacctcttggattatgagttcaggggagtgggaccccctatgtctgatttccttatgtgtaggacagagcgtgcctcaaaagcatgcttgcttggtgaatgaattgaaagaaccaccctgacatggagctggtattatccacaggttacaatggactggacctcctcttccagtcccatataatttttttttttttttttttttttaaattttgagacagagtctcactctgtcgcccaggctcgagtacagtggtgatcttggtttactgcaacctctgcctcccaggttcaagcaattctcggtcctcagcctccccagtagttgggactacaggcatgtgccattacacctagctagtttttgtgttttcgtagaaacaaggtttcaccatgtttgccaggctggtcttgaactcctggacttaagtgatctgcctgccttggcatcccaaagtggtgagattacaggcatgagccattgtacctggccccatatcacttcttattatctcataatattcttaccttttgcagtgacagccccaaagtgtgtgtgtgtgtgtgtgtgtgtgtgtgtgtgtgtgtgtgtgtttggggtggggatcataataatcctgcaggtggggtttagctctggtgaaaagagcacagatcctttgatttgggtttgaatcccagcacttcctcttactaagctgtgtgatcttgggacattactaacctctgtgaggttcagtttttcttggctgcaaaatgtaagcacaatactaataagtaactgacagatgctgtgcttctgccagacactgtacccagtgctttgtgtgtattggctgagtgaatcctcatgacaccctaatgaggtaggtctcttctcttcttgctttcattttacaggagaggaaaatgagatgcagagaagctaagcaaccagcctgaggccacacagccaatcagttgagagtcagagttcaagcctaggctgcttgctgccagagtcagagtgttaggtaggactttatgaaatcatgcccacaggccccggaacaggtagtggtgcagacacttggtaaaccgtagttacccctcccactttgacatttactctcctggtgacatttaagttttctgactgttttgttgttcaagttggtgacaaaagtaccaatttcctgcctgctcacttccaaacacagcttctgttgatgagaactaagggagtacaacttttcaggccgggggtgtgcatggtgttttgggccttggtgctcaggaagtgtgggcactcccttaaattttttaaatgggcaaatgagtgcattttcctatttaaatttttttttttttttttttgagacagagtctcgctctgtcacccaggctggagtgcggtggcgccatctcagctcactgcaacctctgcttcccgggttcaagtgattcttgtgcctcagcctcccgagtagctgggattacaggaggctgccgccacacctggctagtttttgtgtttttagtagagatggggtttcaccatgttggccaggatggtctggaactcctgacctcaactgatctgcccacctcggcctcccaaaatgctgggattacaggcatgagccaccatgcctagcctcactcccttaaatttttaaaatgggtaaatgagtgcattttcccatttgaaacattttctgcttcaaatccttattgagcactttgtgctaggcattgtgactatgatcagtataaaaaccccaagaaaacaaaaaaacaaaaacagtaattcactgtcctgtcacccccaactcatcaatcctttgcttttccataactggttacctgggtgcttttcttcgttgtgattattttttattggaaatgcagatttgtgactgtgatgggcctgaggtcaggtcaccttgctgaggcgagtttcctgggcggctttgccctgttttgataaacagaagaatgagcagctggagctgcatttcaagtggctgctttagttgaggcaggcaggcctcagtgtttatgtgacaccgagcagcttcaaaatgagcttggtcatttaaaaaaatttattttttcctagttaggtaacagtggtataacaacattaaaagaaatgtagaaactagagaaaggaaaaaaaaaagccctttatcccccccatcacaaaactattataatttcaaaatagttacaagtacaatgtattccaagtggcttcttatttaagataattatattcacagagcagggaccgtttcaggtcctttaatgctgaaaggctaaataaagagaactttttattttttccatgttaatacatggatgatattaaccatgatgtttaatagctacagaatactgcatgaaatggakgtactataattcatttagcctttttcgtatttagagatttaagcagtagccaatttttcaccattacaagtggtgcaaggaccaatatcttcatgaatacagcattttctgtaaagcagaaattctttcttcaggattaatttccagatatctttytggtattagacacataccacttgcctaataacgttccaaaaggaattcattgtttacattgctattagaacataygagattgcctgtttcattaygtccgtcccagcactgggtattatcattaaaaaaaaaagattttaaatttatttattgagttatttacttgagacagagttttgcttgtctcccaggctggagtgctgtggcacgatcttggttcactgcaacgtccgcctcccaggttcaagcgattctcctgcctcagccttccaaatagctgggattataggcacccaccaccatgcccagctaatttttgtatttgtagtaaagatggggtttcatcatgatggccaggctggtctcgaactcctgaccacagatgatccacccaccttggctcctcaaagtgttgggattacaggcgtgagccaccgtgcccagccaatattttaaatttaatgtttacatttgcacacatgccaattgggcwtcatggtggctgcctcacaccactttttgtccgtgtgtgagactcacatakaggctgttttctgtgatccttttttaaaaaataattacatttttttaatgctcagggaaaatgtcaaataattgtttatgttttgtactgaaatctgcactggtctgatggtacccagaaaaactcttaactgtagccagaaaccagctgagcctagttgtatgcaacctgactgcaaaggtcatcaggtgctctcattttatttttagagctatattttagctctaacgtgattgttgggtgaacacttgcagaatgaaatatgactgacacctaccagctgtctayacattcctggttatatcttaggaaggcagtgtgtgctagcaccttgggaagagaatgttgagttcaaatcctagttttgccccttgcaccaataccttgatcagattcctcccctgcgtcctccctaccctttcttcaacttcacaccttagtttctttacttgtaaattgggttgatagtgggctgctgtcagaattaaggacatcgttttgtcaaggattttgcatacrggaagtcatggtgacagctgttgttactgttgtcctgaggagtggggacaggagaggaggaaaacaggctggtccaggtgtctttccttaaaggaggctccagcttagttggggagatagatgggctggtcagagtttcaagtcataggcagtgcaggcctcaaaggaacagccaggacttgagacaagaatcaggccaagtgagtaactgttgctgctgtggcagtgaatgttagcagcccaggcctgcaggggggaagactcatttggggtacagtgagaggtcttgctgggcaaatgcagggtgtttgcggcaaggtaggctggggctggacttggaggatgcctgcgtgatttagattctatcttgtagagaatgaggtatcatggaaggattttcttttcatgttgtaaatattaatcattttattgttttgtatttttgatggcaatataaaaataccagctttgttgagatataatttacatacagtaaaattcatccatttagaaagtatacagttcaaagctgggcgcagtggctcatgcctgtaatctcagcactttgggaggctgaggtgggtggatcacttgaggtcaggagttcaagatcagcatggccaacatgatgaaaccccgtctctactaaaaatacaaaaattagccaggcatggtggtgggtgcctctaatcccacctgcttgcgaggctgaggctggagaatcacttgaacctgggaggtggaggttgcagtgagcagagatcatgccactgcactccagcctggacgacagagtgagactctatcttaaaaaaaaaaaaagcatacagttcagttgtttttagtatattcagaattgtgcaaccatcactgctgtctagttccagaatattttcgttactcacaaaagaaaccccatgcccacgagtgctcactcctgatttctccctcccccacctcctggcaaccaccaatttgctttctgtttctgtgaatttacctgttctatgtatttcatgtgagtagaatcatacactgtgtgtccttttgattctggctatttcgcctagcatagtgttttcaaggtccatccatgttggagcaggtatcactgctttgttctttttttatggctgaatgatatttcatcacagagagataccatgttttgtttatccttttatgagctgatggtcgtttgggtcatttctactttttggctattgtgagtgacactgctatgaacgtttgtctaccagtgtttgtgtggccacgggttttcaatgtgggaggattttgaactggggagtggtgtttggagcctttgggtggggtgggctgtgaggagcctgtgtgtgtgtctgcccttactgggctgggtttagggcaagcttcatgtgcttcctttcttttaagggactctctgagacagggttattatcccctttttgcagatgagggcactcaggctcagtgaggttaaataagctgcatggctagacaatggcagatagcagccctgtccggctcttagccagcttgcagccacctgcccctgctgggccaggcgattgcagtggtcttggctgggaggggcccagaggctgtgtggtgctggagagaggcagcaggctggacctggttgggcaaggctgagtggttgtgggataagaggagatgtttcagagcagcacccacagaaccgctgtgatgggagaaacaagacttcgagttaggagagtgggttggactcttggtgcagcctatgtgaccttgggctgatcttgtctcttttgagcatcactttcctcatctggaacctggggctcttgtggcttcctgcctctctcaagggtgattcgggaggaagagtgggagagagagagagagagggagaggatggaggcgagagaggtggagtgggaaaggagggcagaatctgctagaacctgcagagctcataatctaggggcggggagggacatgcagcaggtgcaggcaggtgtgggaggaagtagcctggtcatctggatggacatccctgcccattcagagaagctctgaaccctgcaaaagctcccacgtggaggccagtgagctggttataatccagagactgtcagtttttcctagtacatatttgracytgagcctttgtttctgcaaagagtctggtactgactcacacagtgtcagcagcccccttccatcccctggcacacccctccctcattcctactgagcattaccttaaaaccagtgaggtctttctgggtcttaaaggtcacccagtgtccttgcctatctgggcctgtctctgttcaagtggcaaggcggaccatcccctttatcactgacttgcagcttgcctgggttttgtaaaaagcttgtcattgccagttagaaaataaagacagaaacctcccctttggcattggtatcgtgatgacttgctcttgttctgactctattttgctggcttgttatgagtcagtcatttttttttaatgaaatgaatacctttgtcttaatatgaagctaggcatatatgataaaggttagatgatttttcaaatatgaaatcagaattctacccatactcccaaattagagagcagtctgatgtgttcccctttactgtgaccagtggcttcataggggacctagttatgagtcctgtttcttttttttttctttttttattttgagactgagtctcgctttrtctcccaggctggagtgcagtggcgcaatctckgctcactgcaagctccgcctcccgggttcacgccattctcctgcctcagcctcccgagtagctgggactacaggtgcctgccaccacgccyggctaattttttgtattttttttttttttagtagagatgggttttcaccatgttagccaggttggtctcgatctcctgacgtcgtgatccgcccacctcggcctcccaaagtgctgggattacaggcatgagccaccacacggggccaggcctttttcttttcttttttttttcctcactgtgtcacccagactgtagtgcagtggcacaatcttggtgcaacctccgtctcccaggttcaagcgattcttgtgcctcagcctcctgagtagctgggattacaagcatgtgccaccacacctggctaatttttctatttttagcagagatggggttttgccatgctggccagggtgatcttgaactccagacctcaagtgatctgcccgcctcccagaatgctgggattacaggtgtgagccactgcacccggctgaggcctttttcttctgtgcgttcctgctgtcttccctccaggcagcagcaagctggtaggagctgtacttgtgagttgacatcatgatgtacagtcactggtcacttataaaactgggcaggcccagagcaggaagggtcattgagggtcatctaatgcaaaccgtttactttagagatgttgaaaccaaggcgcagagaggggaagtgacttgcccaagaccacacagctaatatcactgtgagcccaggttcctggctccagttcctggttctttctgcccccttcttcccgacactaaagatacagtggtgagcacacagggtattcagtaacgtatctatttttgacctgtttttaatggaggctgaattgggcttttagggttgagttctgacacgtgccaggtgatctgctggagggaaatctgttacttctggggaagagttgaaggtgtcttctgaactctggaatctgttttgaggggaggctgagcccatgcgtggacccttaggctgagcccatgcctgcttcagatgttccacacctttcaccacaatttatttatttatttattttttgagacggagtctcgctctgtggcccaggctggagtgcagtggcgtgatcttggctcactgcaacctccgcctcctgggtttaagcaattctctgcctcatcctcccgagtagcagggattacaggcatgtgccaccacgcccagctaatttttgtatttttagtagagacggggtttcaccatcttggccaggctggtcttgaacttctgacctcgtgatccaactgcctcggcctcccaaagtgctgggattacaggcgtgagccaccatgcctggcctatttatttattttttatttttttgagttgaagttttgctcttgttgcccaggctggagtgcaatggtgtggtcttggctcactgcaacctccgcctcccaggttcaagcgattctcctgcctcagtctcccaagtagctgagattacaggcatgcgccaccacgcccggctaatttttgtatttttcatagaggtggggtttcaccatgttggccaggctgatctagaactcctgatctcaggtgatccacccacctcagcttcccaaagtgctaggattacagtcgtgagccaccatgcctggccacaccccggtttattgcatttgcttctaatagagaaatcaacccagtaaacaaatgaattattgttagcaaaactggggggtgggttgggaaaggaaagtagttccttctataataaaacttgctgatatttcgttgaaagtcattgtcttactcatccttgtataagataagtcacacaatgagtggtatcagggttgcagggtttccccctgtgaggacacratgggatgaaccgtgtgtgggatggtctgttaaagaaaaacaagaagccatgtgttggaaacaacctaagtattgagcggtggaggattgctgaaattgtggactactatgcagtcattaccaacgcactgaaaaaatgttccatgatatggcaggatgtttatgctataagaaatttaaagacgcgagcttcaaagtaaagtataaacctaatttggtcaaacaggctgggcgcagtggctcacgactgtaatcctagcactttgggaggccgaggcaggtgggtcgttggaggtcaggagttcgagaccatcctggccagtatggcgagaccccatctctactaaaaatacaaaaactagctgggtatggtggctcatgcctgtaatcccagctactcaggggtctgaggcagaaggatcacttgaacctgggaggcggagggtgtagcgagccgagattgtgccactgcactccagcctgggcaatagagcgagactctgtctcaaaaaaaaaatattggttaaagaaacaaacgttagacttgaagccgtgctttatatggatatgtggtgcactataatgtggtgcttaaaaagcaacttaggcagacctgggccaagtctgggctctgccacgtaactgctatgtgcccctgggcaagtcactggatctttcccagttcaggcttctcagctgttaagtgggactagtaccttatctctttgggttgttgtgagaattaaatgagctatctgggctttcagagaaagggcttcatgtgccgtggctctgatcagaccaaacaagttatctactgctctaagccatcaaggccccccatgcctgttggatactgttgagttatttgggttggcatgtagtgcagcgtttctggacatacatactctggggactccccatcccaaatttcttacagtctctccagtgtgccacacgctttcttgccactaggtccttgcatgtgatggagtaactcttgtacctctgtctccctaaatagacggggttctccaaggacatygtgccacagggcctggtaacccagtaggtgctcagtaatttatttatttatttattttttttgagacagagtctagctctgtcgcccaggctggagtagagtggcgttatcacggctcactgcaacctcccactcccagcttcaagcagtcctcctgcctcagcctcctgagtagctgggattacaggcgggtgccaccacgcccggcttattttttatatttttagtagagatagggtttcgccatgttggccaggctggtctcaaactcctgacctcaagtgatccgcccgtctcagcctcccaaagtgctgggattacagggtgaaccactgcgcggcccattaggtgctcagtaatttgttgaatgaattgaagacatgggacttgarttaggcttttattattattattattttttgagacggagtctcactctgtcacccagtctgggagtgcagtggcgtgatcttggcgcactgcaacctccgcctcctgggttcaagtgattctcctgtcttagcttcttgagtagctgggattacaggcatgccaccacgcccaggtaatttttgtatttttagtagagatgaggtttcatcatgttggccaggctggtctcgaactcctgacctcaggtgatccacctgccttggcctcctaaagtgctggaaatataggtgtgagccaccatgcctggcctattattattattattattattattttggagatagggtttttctgtgtggctcaggctggacttgaattcctgagcccaagtcatccttccgcttcagccaattgagtagctgggattacaggtgcactgtccstcccagcaagttgggtctttaaataaagagtggggtttggtgagcagggtgggtgcactgttctaggaggtgggcaggacagaggtcagtggtggtccctactgcctattcagggaccagggcccctgggcaaaggcagagataacattggcacaatctgcctttcagctttcattgtcatgcgggagtcaccatgctttgtaagacatttaatctataagacttgattagttttgctacctttcatagcttggggctgtgtatgcctgtttgtaagagagatccatccagatcaagcctgtgcagcaataatgtatgtgcacaaggcctcttgtgttgtgctgatggtaagataggagctggacttggaggcaggaggtggcctgggttctgtttctggacttaccacttactagacgggtactcttgagtggagtcacttaagaaagtaatgccgatcaggggctcagagtgtcccaagtgttttctcttgccttattctcattaaacagaagtacagctcagaatatgatgggccagtcttatgtgattggtgttaataaggcagtagagagttgggggtactctggcagaccatgagaacctgccctgtttgaaggagaatgctgcctcctcttcctccttttaaaattcacacatatgatgctcactaagtgtctggcacccttttttctttttctttttggggcagagtcttgctctgttgcccaggctggagtgcagtagcacaaacacacctcacttactgcagcctcaaactccctggctttaagtgatcctcccacctcagccttccaagtatctgggaccacaggcacatgtcaccacacctggctaattaaaaacatttttttgtagaaatgaggtcttaccaggtcgcccaggctgatcgtgaactcctgggctcaggtgatcctcctgtcttggcctcccaaagtgctgacattataggtgtgagccactgtgccccgcctcagtttttaaaaatacttgcttaaggagagagcactgaaggaagatttagatctgctctgttgaagtgacagagtacggtggtttccatttatgcgtattttgtagttcggatggcttcttgtggggagtcctgtgagttcacacttgggggcatggtgtgggggacctgtgaagtgggtgttctggggtgagtgcgatgctagtcactgtcccagttttcttctcatttctttttttgtgagtgcttggctagtggcagccttgcagatcagctagttttgacccacatcctccctctaagtggtgctcattgaattgagccacagccccaaggtcatgttttcaaggttggcatttgggaggccttgtcagaaggtcttataccatattccagtcacccaragtgctgcccgccatgcctgttcgttcagcaggatttccctgagcacctgctctgtgccaagccctatgctaagcaccaagggagtaaatatggagggcagtgtccccagagtccaggaactcgtgatctagtcggggaggagaggggtacctactctgtcttttacacagcaagtgtaacctctgaagaatgatgttccaggaggcaagagcaaccctggcggactggtggagctgggaagggaaagatgcttctggaggggccttgggagaagagtcctccagggtgagccccttgagagaggtttcagagctctcatccatcttcatatcctggcacttagcccaggcactaaaatttgcatatttttgatggcaattaaaaaaatactagctttactgagatataattcacatacagtaaaattcacccatttaaaaagtatacagttcaaggttaggcacggtagctcatgcctgtaatcccagcactttgggaggctgaggcaggtggatcacctgaggtcaggagcttgagaccaacctggccaacatcgtgaaaccccatctctactaaaaatacaaaaattaaccgggtgtggtggtgtgtgcctgtaatcgtagctacttgggaggtggagacaggagaatttcttgaaccgggtgggggaagttgcagtgggctgagattgtgccactgcactccagcctggrcaacagagtgagactctgtgtcaaaaaaaaaaaaaaaaaaaggttccattcaagatgtcaagccccacgggactgagggtaacatgagggtaacagacaggtgatgttaaattccatttgggctcatgttcacccccaggccccttattttctttcaaacacatggaatgggcatttagaactaggaagatcatgaatctggtggctgtgtagatgccataccaggtatggaccacaggcttggagcgcagcagcatacaggggtcagaggtcaaggccagtggtctatcagaacccagttcctgcaggagccagtgccggtactaggtagactcagatgactgaatggtcctcgggatctgarggccagtgggggagatgaggcctggcctcccggaagtgctcagtaaacatttgttaatcatttcctgcctagggaagctctgtggtatgctcaggagaatcttgcttctcrtgggggaatgggtggttgtcatttgggtggcctgactgccagcctgcttgctggctctctgggagttggggtggtggcatcaacctgcagaggcggggcagtggggcagctcacggctgtgtgggtaagtaagcagtgagcacagtgagggagctgttgccaggagcctcttggcttagtgagccaagcagaaccatgtgatgcaccctgtgggcggccacctggggactcaggacatgcacccagatccctcctcccctacccacttcaaagaaagtgctgccctcccagtggtgatgaagaccttccgctggccccagcctctgggatctggcctttacttgggtattcatgtggccctgggrgttggctttgctgaagttgggcagagcaggtgggttctggaatgtgcaggggcaaccagagtgtccatctgtttgggtgaagccagctgtttaggtctgaaggatctgtttgatttttagaaacatgatgtgttccagagttagtaggtggtggtgatggagggtattggcgtgaagagtgtggatgctcttcgttcctttgctgttttgggactatctctctatggggtagtggcccctttccttgttaggatcatttagaaccccctgggatcatgagaatgaatgtgggtctatccttccttctgtgtgaggaaaaggggaggtattgtggttaagcaagtttggagaactctggcctgaacaaaatcaaacagatgtctttcttgcaggacttagaagaaacttaaatctgttggtaactctttaagagggaaggggatataaaacccttgttttccctagatttttgttttactctatagctgtctctttttagaagcatctcatgagactaatgtttttaggaacctgctgtaggaaattcatttattcaaaaaatatttgttgagcatctgttatgtgctagtgactgctccaggtgcttgggatacagcagtgaccacctccaaccaagatcccgctttcaagaacttccattctagcagaagtgatgaactcatttttatggagcacctactgtgtattaggcatgtgagttatcacacattatctgctttacccctcacaacagcctggtgaggtagatggactattttattttattttattttatgacagtgtttcactcttgttacccaggctggagtacagtggcgcaatctcggctcactgcaacctccagcctccaccaggttcaagcgattctcctgcctcagcctctcgagtagctgggattacaggcatgcgccaccatgcccggctaatttttttgtagtttttagtacaaatggggtttcaccatgttggctaggctggtctcgagctcctgacctcaggtgatctgcctkccttggcctcccaaagtggtgggattacaggtgtgagccactgtcccaggccagatggaccattttaaagattaggtaactgagctctaggggtcaagagacttggccactttggcagctgcattgtcgtttttggattatgtcatcaaattgcaaggggaggtggtgaaataaggaatttctgcaacagaaattggagtctgcggtggggatgctgcaggccttagctgctgtatcactgtgtccgtttatgaaggcccgatggagaagaggctctgaatcaggccgggaaagaggtatttctctggaacaactggtttgtttctgtgttatgggcaccgagaagcgtgtggctcatcatgttttcctttggctttggttactaagcacctgagagctagatttgtggcccatcttgacacttctgcaggatgggaccatatggcatgcatttctatgtgctgatcttaccccaacctcccgccctccatcccgctttattattttctctatactcatttttgccttgcctggttctcttgtttgttttattcttttgtgttatttgtattattctaaaccaccacatatacttggtgggatggagctgggtatagttaaattttaaaaataatggtgagggccaggtgtggtggtttatgcctgtaatcccagcactttgggaggctgaggcaggtggatcacttgaggtcaggagttcaagaccagtgtggccagcatggtgaaattagccgagtatggtagcgtgcacctgtaatcccagctactcgggaggctgaggcaggagaatcccttgaacctggtggaggtcggaggttgcagtgagccaagatcatgccactgcactccagcctgggcaacagagtgagactctgtctcaaaaaaaaaaaaaaaaaaaaaagaaataatactaatgatgagatgacttgcataagatcccccagctactctgtggggaagtcgggctccaagccagctctcctggccccaccctctttccaacatactcagtgcctttctggattaggatccactgcaaggttcctttgcagtgggagccaggtctgtttggcttttgcagccattgtgttatgggttccagtggaagctgggctggctggattggaggtgttgaggggcttggattgacctaagtgtcacctgtggctcaagcaaggctctggactgtggattccttcttggtgagggctgttcagcctcacccaggagagaacccatacctctgcttcttgcttgtgaggcatcaggtttcaagcaggggtcagaccagatgagcactgttatgttcttcacagctgcttcccactcgttatcctcatagtagcccagggtagaaaaggagaggatgagtgggtggtattgatgaagaaacggagacctacagaggtgaaatgacttcacccaccaggtgatggctgagtctgcaacccaacaaaaaactctggcttgctggcatttctcaggccagacagttccaatgtgaacccacggtaccttctgcgggagaaaaggtggcatgggaagcaggaagagcctaggatttgggagttggatgccatggacttgagtcctggccactactatgtgcatatggggaagtcacttttctgagcctcagccgcctcatctttaaaatgtgggccctaatttctgccctgccagcctcacaggatggtcatgagaaactgaatgagaagatgaacatggaagccttttgtctggcattaaccacatgtgcctgtgtgctgggttctgtctgcattgtgctaatgatggtggtgatggtattaatagtaataatagtgaacatttaaggaacactgcctcctataatagtcaccatggtaaactttacatacattatcttaatgaatgcagaaaacaagcagatgagcagggaccgtctattattttcccatttatttttgtttatttttaattttttttttgtagagacagggtctcatgttgtggcccaggtcttgagctcctgggctcaagcaatcctcccacctcggttccccaaagtgccaggatcacaggtgtgagttacctcacctggctgtattttcccatttttacaagtggaaacagggggttcaaaaaagtttatgtaatttgcttaaggttgtagagatgttacatagtggagtccagatttgatcccaagtaggtgaccctactgtggtatcactgctatcagattggaaacagcagaagtctaggacctttttggtttggttgatgacatctgtgcacatcattctggtaggtaggggccatctgggggcaggaagttgggtgtgggtaggggttggccctggagaggcaatagaagctggggcttggctggataacaagcctggcacactgagtttgtctctgaggtttagtttctcacctgtaagatgatgatataataatgtgcctcatgggattaaagaaaataagagatgcctagatacttatacattgctataaaaatgtctgtgttataagagtgacatggcattccacaaaatgcagtgtagatgtaaattagttggaatggtgacctcacccctgctaggtagcactggcttatgtcccacctgagagtagtagcatctgagggctagccacactgaacaagccacacacctgacctcagcatcctcttctgtgaggggaatgctctctgctcttctacctgcatgcaccgtgtttgtggaagtgctctgtgtaggacagggaaagcaccttgcagagagcaagggcccactggctgcagagagcctggtgggtgatggaccagagataagggtgagggacagtttagagtgtcacagtttctcatagagctttgggcagtgacaccagtattagtctcaggaccatcattgactcctggttagtttttctgttttcaaaacactttatcagctgtaaagcacttaaaaatgtaaattagttcctgcaaaaacaaaatgcacaaaaaatgatggctctgccaggctgggttgggagatgaatgtgtatgcatgtgtgaatggattcatttctgatgataaaaatactttatgcttatttatgtgaaacttggaaaayagaggaaaagtataaaattgaaactaaaagtcatccataatccttytaagtagctttatcatttaatgttttagtatatttccttcctgtttttttttttttccttaattctgggtgtatgcaaaggattttgtaaccctttacattctggaaactgttcaacatgacttcttttttttttctttcaaccaatttgtggagagtccattttgcaaagccttagcacagtgccaagcacaagctacacacccgggatgctgctgaatgcagatgagagcatgccarctctgctgaagttgggggctgggggcagtggatggctgtgagtggtgtgaagccccgggccacagtgaagaccctggaatggctgagagactgggattccaggagaccgaggtttgaggggaggcttttcattgtttgattagctctttttttcttaccacatgtaagtcatcataatacttaaaaaattgctgtaaaaagcagctaattaaaaatataaatacagtctttttggagactagaaacagtcacaagagaagcagtttcagtgagaaccagatcctttgtcagtgtcagcgagggggaggggcgtcggggcccagccagcaaatccttccctccgaactgggggtgcggaatgtggcactccctttagttagacttgatgagctttggatttgagtaagtgacagccccttttatttcctgctttgttctctcccaggtaccagttgaccacagttttcattcatgcaaatggaagctgacagctgcccagggagggttagatacctgggaggatagagcagaggccctccttctccccgacccctcgcctctgcaggctggtggggaggggggcaggggagtcsagttaccctctctccacgctttcttcttgtgtatgtgtgcgtgtacgtgcgtgtgtgtgttgtgtgtgtgtgtcttgggggatggagaacccctctcaggagggcctgtggaaaggctggggtaagtggagtgagcccgtgggtcctgcccttccaggctgccaagagtttaagttgctgcctcccggtctctgtgcccttttcctgcctgtggaaggccctctctctgtttaggaacgtggatgtggcaggggctgggcgggcacttggcctttataacaacagaagaggattttcagtgacgaggaagcatcccgcccttctggttccctgtcttccacctggccccactgcgacagcctctccaggcctctgacttcactagaatctgcccctccaccccaccttcccccgaaccccacctcctttctctgagcctgagaggagttaattgtgttagagtgcactgagaaacctccaggaaggggccctagtccctgtgttgcctgttcagcaatcacatttgctcacgtctagaaagtacaatataatgactcaggttaaggggtgaaaaaatgtggtggacattttgccagggtactgtgttaactgttccaaggtatcaccctgtgtgagactcaggaacattcagtgttttggtttcccccctattgtactgaatgccggcagctttccccttctaattatttatcttaataatttgaggaaagttgatttgctttttaaaaactggcatccaagcgtaccctatcgcactgcacacagctgagagattaaggcagttctttagaattcctagtccgtgttgtgtacacagcgataggctggggtagtggttctgggtgcaactggggacaggcgaggaaccataaatttggcaggaaagatttgtgttggtaccctgttatatttgctttgcatcacatattgtttaaaaagagcgatattttcgttaaaggaaaaggaactgtgtatttgagataagaagtagaataaaatgaaatgaatagttgggtttcgtcctgtggccttcaaaatggcgttatttctgagatccctgtttctatgctgttccagtatttatacggaacttataaaatacaaagtataggcatgtcccgagatcctggcgaggctgtaatttatagtgttgttctttttcttttgttttacagagctgagtttggtgaaacttcaggaggttttagctagtggcgatccaaagacattaaatattgctttgtgggtacgwctccaccttgygtcttacttggtgactgttcagtggtaggcaaatgtcagaacccagtatgcaaatgtggaagtggacagatttgagtcagttatctcagctggtgttatgaaatacrgaaatttttggcgttggtggtggagggcgttggcataggaggcgtgaatgctctttgtttcttgctgttatgggagtatctcttgattgccccatcatcttgtttggtgtggccccgtttccttctagaagttgagttccctgggcttgtgagaacccttgtacatctgcctccattaaactcacatttggagatctcgtaaatgaacscagtgcagtccgggggcagagtgaaggctcagactgcagccggacatggctcagttaccctaggtgggttagcagctgagcaggtactggtctcaaaaccctctgaagcgaagctgcctgtcgattccacagttgccagcttccagcatggagcttctggaagtatcacggactgagttgggtcccaatgctggatgtccctactcttcctcctgcccctcccacgtttggatgggcaaatgcactaagaacagcccgtgggcaagtgaatgaaaccaaaaagcagcaagggatttggacagtccacctcagagtatctgactttattttgaggggcatgtgtcagagttgggtgaagaaagagattctcagatggagatagagaaagatccccaaaagggcaggctggctaccagtgatttatttttatttttcttacttttttaagagaatgcagggcattttactcttctgtggtaggagagtagactggccacagcccagcccagaacccttaacaaaaggttaagctgctgggcatggtggctcacgcctgtaatctcagcactttgggaggcagagatgggtggatcacctgaggtcaggagtttgagaccagcctgtccaacatggtgaaaccctgtctctactaaaaatacaaaaattagccgggcgtgttggcatgtgcctgtaatcccagctactggggaggctgaggcaggagaatcgcttgaacccaggaggcggwggttgcagtgagccaagatcacgccattgcactccagcctgggcggcaagagcaagactccgtccctaaaataaataaataaataaataaataaataaataawtaaataaataaaataaaataaataaaaaaagaggttaaggtttatacgcaggccatttctaatagatgttatggaagccccaggktttggggcatcagggttggaaaggaagccaaaaatgggtgtgtccaaaggacagatgcattgagaatgggttgtaaaatttcagccattgtgtagattaaccagcacggcaccctgcccctcagccattgtgtagattaaggagcactgcaccctgcccctcctcccccaagcatgcagcacctgagaaagaaatctgacaaagatgctttaatatgagtctagcgctttgagcctttcattgtcatctccagtgcaattgtctgtgggttttgttttgttttgttttgttttttcatttttattggactttgctttgccttttaagggaaactctggatgatatacttcattatttcacttgtcagatggttagtaatatggtattgccattcctgacctaaggcagcaagtgattccttctggcaaactctttaagaaacatgggcatggagcctggctgcctgagttcaaacccctgctctgctgcttaccagttgggtgaccttggtcaagttacttaatctccgtgcctcaatttcctactctgtaaaatggagataataatagaacctgtgtcattacattattgtgggaattaaatgtgttagtctacgaagaggggtgcctcaggcccatggtaaattttatgtaagtgttggttgtatataagatgatgaagtccgggcgcggtggctcatgcctgtaaatcctagcactttgggaggccgaggcaggcagatcacctgaggtcaggagttcgagaccagcctggccaacatggagaaaccccgtctctactaaaaatacaaaattagccaggcctggtggtgcatgcctgtaatcccagttactcaggaggctgaggcaggagaatcgcttgaacctgggaggcagaggttgcagcgagccgagatcgtgccattgcattccagcctgagtaacacgagcaaaactccatctcaagaaaaaaaaaaaaaattaagatgatgaagatgcagcgtggggccatgagaagagtcctggtctggtgagtttggaaacctggcttctggcctgtttctaacactgtatgtccttgggccagaccctttcccctggggtgctgatttcacacctgtaaaatgaagaagtttgacttgcacagtgcttttcttagactgtggtaaggggtggatgtgggggtagtgccaagaccaagtgaaagaggcttctggacctccatccttgcttcagccagagcagcgtgggttcatttcatttttggattttggtttgtgggaagaaagggttctcttgccggtgtgtgtgtttctgataaacaaagaagtgtggaagtggctgaatgagatgacccaaggactctttctgggaagatgcaggaggaagtaggtgagctgaggggaagctggtggggataggcctggtggggcctggggagaaggatttgaaggctcaagtcacacggtgcaggatgggactcaatatagggtgggatagggcggtgggtaaaagccgttacaattttgtccaaatggtatgggctgatttacttattagggaggtacaaatggcttcrtgttataaagtgtcaagatccttatttggataaggcaaccagagtgtagacgagagagtaagagtaagaaaacaaggagaaaaatgagtgtcttaaggatgtagaaatttagtttgctggaagtctctgcagcctgaacaaaacagctgttaggtttgccagaacttaaaccagagggtgcctgccagtggttcatattcttgctacctcttcctcctcttgtcttgtttttcctttccattctaataatcacgatgagtttccctgacatgcacgccccttcattcatttgtatgatcacttagagatgaggagctgccttgccaggtagaaaaaccattctcaggatgaatctttggctttctgaatcagagttttctttgggttttagaacttcattcttattaaagtgggaatttaccggccgggtgcggtggctcatgcctgtaatcccagcactttgggaggccaaggcaggccaatcgtgaggtcaggagttcgagaccaccctagccaatatggtgaaaccccgtctctactaaaaatacaaaaattagctgggtgtggtggtgcgcgcctgtagtcccagctacttgtgaggctgaggtaggagaatcacttgaacctggaaggcaaagattgcagtgagccgagatcacaccattgtactccagcctaggcgacagagtgagactcggactcaaaaataaataaataaataaataaataaataaattggaatttaatatctcttatcatttcttcaattccagtttttattagatccacaacttttttggtcaaaaccagaattttgattatgtgtgccatcctaggctacctcaccatccaaaaatcctcttggaaaaccccacgcttatcaggaaaaggagatggaagtgaaaaaataaaaatatatataaaaaaaggaaaacctagtgttagcaccccttatscagcaggccccccacctggacccccacctgtattcacattcctcccacacttacagtcagtggcttcattaatctctaaggttccatgttctgctccccaaatagactgtttgctcattgaagacaggcaccacacttacattttttttctttctttctttttgttttgagatggagtctcactctgacgaccaggctggagtgcaatggcgtgatctttgcttatttcaacctccgcctcctgtgttcaaggaattctcctgtctcagcctcccgagtagctgggactacagacgcatgccaccacagccggctaatttttgtatttttactacaggcagggtttcaccatattggtcgggctggtctcgaactcctgacctcaagtgatccacctgccttgcccttccaaagtgcwgggattacaggcgtgagccactgtgcctggtcttatatttcttttctatttttctaccctgatcaaccttttcttttctatctctctcactgtttctacgatcaaagtagtggagtcagtttccttgcatctgtcccaagcagccgttgctaatgggaatgagtgtcaggcactgtacatcagccctgttttgaaactctgtgcctgctgcctcattgactagctggagagtgttgaacatttggttgtagaatgtatgtggattgctgagtttcacgcatgagctgtgttgtcatttcattcattctgagtggcatctgcgccagggctacctggagtttttccagctccccaggcctagcaaaggcagggatcctgtctcattcagctgcatttcttgagctgtgcttagaaggcctgccacacagtagggaatcaggaacagtcgcgtttacagagctctcgggtgatagaagggaaagtaaaggtatattaaatttcttctaggcttgctgcctaatcccctaaggggccttctcatttctttcagcagtgccatctggcaggcctgagagtatatgggaataagtggggtgctggatcttgtgggcaggctatgggatctgggaaaggggttagcacctgggcctggagggacctggaatctaggggggscatacatctaagctaaatgtggctgtggcttgcaaactcagaggcctttcgggcagcctggtgaaatgataaatgggcagttgctgtttattctcagtcctagagattaaaaagaggtgcccccattggaaactggaggttacatgttctacccaaagggagcagctgccagtcggcttcttgcgatgtgaaagtacagccccagaaaacccaggttaagtgatgtcccctaatttttaaaagttggcaaccaattcaactataaaatcatgcctgctggcctctgagcagtaggcagggctggtgtatgccggaggccaccaggggacataacacctgccatagggtcagaataggtgggtgttagtcaccatccagatggtcagataccggaattgccacagaaatgaacatgacatgcagagcaggcagagcaggtgccaaaagttggtatcaaggaggcgaaggtcaagttctttgcccaccagaaagccttctgttccttgtctccttcccttcctgcacctccaaggactctccactgctccctacagcttaagtccaaatttccctgtctggcattcaaggtcttccataccttccttacaagtgccctttaggcgctctaaatggcgcgtcagctcctatgtgtggcctcagcttagcagtccagtgttccctccccctgaatccctccagactgcccaggctgcatctgcctcagacagccgggtgttcccaagacatgctgcactttcttccctctctgatttgctcatgctgctcctcttcctggaatgctcatccccccaattatggaaatcccactccccactcatccttcaaaaggctctggacaaaaggcacattctccctgaagtcggctaccctcccgactctgtaaatttggaataaatcacatctttcagcttctatagcactcaccctgcatctccaccacagcccttatgacatagctgttgagaaaggtctgtcttccttggtagatgatgaggtcattgtggaaggttcgagtcttacttactgtgtccacagcatttggctcagggcaacagtcaacagaggcttagtgacttagacacttgatggtagagtatggaaaactgattctcatgaggaaggtgcttaaggtctttggtaagcctgggaaaggggcagttggctggaacagagggtgtgagaggagcaggtaaagctggatccagctctctttcagcccaaggcaatacctaaaaccctatctctgacttggaaaggcagtatcctgctgtcttcctgctgtggccatgagcctcactggggcttgacttgaatgttaggactttttttttttttttgagacggagtttcgctcttattgcccaggctggagtgcaatggtgcgatcttggctcaccgcaacctctgcctcccaagtagctgggattacaggcgcccgccaccatgcccagctaatttttgtatttttagtagacatagggtttcactgtgttagccaggatggtctccatctcctgaccttgtgatccgcctgccttagcctcccaaagtgctgggattacaggtgtgagccaccgtgcctggccatgagtaggttctttagtggtgatttgtgagattttggtgcacccatcacctgagcagtatacactgaacccaatttgtggccttttatccctcacctgcttcccaccctttccctctgagtccccgaagtccactgtgtcattcttaatgcctttgcatgagagggaaggctttttaaagggcccttttcaaggtttgaaataaggctccatgacaatggcctgatttggatgggtcttggaatacccttttttttttttttttttttttttttgagacggcgtctcgctttgttgcccaggctggattgcagtggcgcgatctcagctcactgcaagctctgcctcccaggttcacgccattctcctgcctcagcctccagggtagctgggactgcaagcacctgccaccgcgcccagctaatttttttttgtatttttaatagagatggggtttcaccgtgttagccaggatggtcttgatctcctgaccttgtcatccgcatgcctcggcctcccaaagtgctgggattacaggcrtgagccaccgcgcccggcccggaatacccttaaaatatagccagaaagggctgaggatgggtaagaacccaggatatagagtcttcccataaaagggagggccatcatgcaagatgaacaacttggtcctgatatggatggggctagaatctccgtattgttgctaataaggtggaactgaatcccctccctgttccccaacacaataaaacttcagtgtcgtctgggtgcagtgactcacgcctgtaatcccagcactttgggaggctgaggcaggtggatcacctgaggtcaggagttcgagaccagcccggccagtgtgatgaaaccctgtctctactaaaaatacaaaaaattagctgggcatggtggcacatgcctgtagttccagctgctcaggaggctgaggcgggagaattgtttgaacctggcaggtggaggtgcagtgagcagagatcatgccactgcactctggcctgggcaacagagygagactctgtctccaaaaaaaaaaaaaaaaaaaaaaaaaaaaaaaaatcttcagtgcagggcctgtctgctctccagggaaggctgcagtattgtcaggtttgtttctttttccccacaaaactgcttcggagagctcttaggtcccaagtttgcctgcatccagggtccagatgcttccagggtccagatgcttccagggtccaggcagtgagtggaagtgaaggaggctcctctagtgaaagaaaaaggcatccagtgttaatagtatttcttcccagttgcatggggcttgcatattagagataaaggaaacatcttwgctactactgagccataagtggtctcacctttcttgaaacataaggccgtcttggtttgttgttctgttttgtgcttttcacagaggcatggacactgaaagacgtttctctgacagtggagatataggactgaagagtgacatggcttgcagagcactacctgtccccctaatccacactgtcctctctcctcatgggcagcctgagaatgtggacccaaggtagcccatcatgcagttcttcatgaaatctggaaatcttggcatttcatgggaaatctcatcactgctaaagtaggcttagatttgttttaaaaccttgtgtgggctgggtgcagggcattttactcttctgtggtaggagagtagactggccacagcccagcccagaatccttaacaaaaggttaagctgctgggcgtggtggctcacacctgtaatcccagcactttgggaggctgaggtgggtggctcacctgaggtcaggagtttgagaccagcctggccaacgtggtgaaaccccgtctctactaaaaatacaaaaattagccaggtgtggtggcgggcacccataatcccagctacttaggaggctgaggcaggagaattgcttgaacccaggaggcagaggttgcagtaagcagagattgtgccactgcactccagcctgggcaacaagagtgaaactccgtctcaaaagcaaacaaacaaacaaaaaaccttgtgtgggtgaatcaaacacgtctgcaagcctgattcagcctgtagcccaccagtttgcagcctttgtttagatccgtagtggagaaagaggttaaagctacaagttaggacccctgaaaatgaaagatggtttggaagtgaatctgaagtaaattgtcactgtatggtttcagaccgttttctggtagtatgtgctgtgtgacacaggttgtccctgtgttgtgcagtggttttgagcacaacattggccctaggcctgcagtgtggggtgcaggccctctgctgagggctgcagatgctgccgggagtgcagtggatgaggtcctgcccgcacagcctcattcggcgttgatacccatgcctggaggatgtgggctcatcttcttgggtcaggtgagcctcttacacctgtgttcattgcttagctcttttgatgtcattgcatattggttcaattacttttcccttttcagagccatgaataataactatgattttgctagagggaaaaaatgaaatgatcaaggtaatgcatttacatgttacataaaattcatatcatacagaaaggcagaaggaaaacagggagaattacttgttcccttttctctcttcccctcccaattcctttaacaggaagaatgtctcactagtcatgtgatctacagcaaatcctttaacctcttcaaacccgcatctcttatatgttacaggacagtaataaaacttaactcatattattgttattttttatttaatgtggattaagttagttggtatgaaattctccaaatcctatgcatatataaagggtgctcatagagcttttttcttcttttttgtatatccaggatttctttagcggtcttttgtaattatagtaaaagcactgaggttagatttatgggttttttttgaggaggatagactgaatccctttcccgcctcaaggctatagtgggtcggcacagtttgtgtttgctaaacatatctttagctgcgtaagagaaagaaggaaaatagtaaagatgaacagtactgttttctacttgaagttctagttggcccccmctcccttccatgtaggaaccttagcttgctttccacaccctcccaccactggactcacaaaggcccctgatgagtgcctccggtaagacagggggaaatttttatcttaattagaaaaaggcttagtatcttgattgtatgttctctggagccagtgatagagatagtataagaaattctggacattcaaatgtaaaacagattaatttgtaggaatgttggatttttatctggacagatgttttgtcttttatggagttggttgggattaagaagtgggggcagggtcatgttggtattttatttttgctttgggcttatgttacttaggattaactttagctgtgtataacaacagcaacaaatcagatttatagtcagttaacggaggcttaagtgatgtaaagttttatttctctctcacatagaaattagttagaggtagtagtttagggctcttagagsscccaggctgtcatattctacctgcttacacatggctttcaggatctaggtcacctcacagtccatgatggctgctggggctccatcccccttgtctgagtcatatgttggcagaaggaggaaaggcacagatcaagaggaggcctttcagctgggcgcggtgggtcacctgaggtcaggagttcgagaccagcctggccagcatggsgaaacaccatctctactagaaatacaaaatttagccgggcatggtggtgtgtgcctgtaatcccagctactaggggagctgaggcwggaggatcgcttgaacctgggaggtggaggttgcagtgagccgagattgtgccactgcactgcagcctgggcaacagagcgagactctgtctcaaaaataaataaataaataaataaaataataaagaggaggcctttcctgctgcatcagctctctctgagcagcgttcctgggaagttccatggaacacttctgcttatctcattggtcataactcagtcagatgcacacactgagctgcaagggaggctgagaagtatagtctcttagtcccagatacaatatgtataaaattcagaacaagggtccttttactaaggaggaggaagagactggatgttatggatatgggcagcaagcagtgttttcaaagtactgaaacagattgtagaactttgtaaactggctgcctttctactcctctgctcacctctaaccaaagagccacctaattgttctgcatggtgaccattrcctgttagattcttggtgaatagattcctagcctcatcttttkttatttttatttttttaataaatggtagaatgaggatgcaggaaacttggaaaagcagagtcaaagttcaactagcacaggagcagaaggtaaattctgttggcttatagaatgagcccagaccctggtgtcagaagacctgggtcagttctggtctgtcctctcctgggactcagtaaagtctcttggctctctgagctttccacatcagtaagatggggaatgacaacccttatgggactgcagtgaggcttagccaagttggtgctgtggaaggccctactggattccaaagcatgatacrgatgatgaatactttatgtggctgaggtgcttccagcaggcacgtgggaagcatccatgtaagattggggtcatgcaaaatggggtgggatcacatcgcgggatgaagcacttggatgcaaaggcctgtgtggtccagcctgagtctggctcaacacacagggtyggatcctggctgcgctccttactgctgtatgtacagatttggctcagagggaatgcaggattggcaacatgcatctagtctttcttgtggtctcctggtgcctctcatggtgtgcttattcttattctgctacggagagtgtgacttaagcatgtaatttgcatatagcgtggctcctgaatgcaagccactaacccattattttacttagtaagttccagtgttggggcttgggggatggtgtgtcctttgccagtgaatgcttatgttggtacatttcaagggttattttgcttatgcaccctccccacccccgtcaacgttagagcttagcatcatatgaaaggcagtgtccctgtgactgtatcatagggttgatgaggatgaaatgaagtaactgcaggcagtgtccagcccagtgcccagtgctctgtccaggctcagtgagtgacctttgctgctgctgctgctactgcgtccagctggctacatggggctggtggcagagggtgactcagttctcagtgtgtcttttcctgccccctgccaggttgcttcccctagcctagttccctttttttgtgaaatgctcatccctcagctctggacttcaatgtactgttggtttcaaaaccttatgaaacacaacatcaatgggggaagggagaagagagaagctgagaagcctaacccaactctgacagctgagcggctacagaggacttctcagttgggcttcaatacttcttaagaactttcaagttaggcctcagatgtgattttgtttgctgactttctctttgctaccttggcttctatttagttaacaaatctaggccgggtgcggtggctcacgcctataatcccagcactttgggaggtggaggcagaggtgggtggatcgcctgaggtcaggagttcaagaccagcctgaccaacaaggagaaaccccatctctactaaaaatacagaattagtcgggcgtggtggcacatgcctgtaatcccagctactcgggaggctgaagcaggagaattgcttgaatctgggaggcggaggttgcagtgagccaagatcatgccattgcactccatcctgggcaacaagagcaaaactccatctcaaaaaacaaaacaaaaacaacaaaaaaccccaaatctaattcattcattcagcgtgcacaatttattcaacacagtttgttccaaacactggggatatgccccaaacagaccaagttccctgtttcatggagcttacgtttggtggaagagagacaaatatagaaacaaaagtgtaggctgggtgcagtggctcacgcctgtaatcttagcactttgggaagccgaggtggggagatcacttgagcccagaagttcaagatyggcttgggcaacatagtgagactccgtctctattaaaaaaaaaaaaacaagtctaacatcaggtagacttcagggctgtgaaagaagtgacatagggtaagggaatacagcgtgttgaggggatgggtgctattttccaaggaaagcccctcctggtggggggccataggaaacagctggtgcaaaggcctggaagactcactggcatctttctggaatarcaaggatcagcttggtgggaagtggaatgagctgggggtggagtggggtggggtggattttggagtctgagcttgagatacctgcttggagatgctgagcagtctgcaggaaccaggagcccggagctgagggaggacatgaaggctggaattgtaagtttgagagaaatcagctttttgaagctgtgggacggggtaagatcaccgtcatgtgagaggatgggactggccaggtggtgcatgtgtccaggctcagcggatgttcctgggatacaagtacctgttcatcttgttgacatctaatctgtatctgcgcatagtgaccaaggataagccactgagctgctccaaacgtgtgctatgggatggattaactgtgtgggtgtggaaatccctcagaatgatgagacagggagcagtggagaggaagacagtcgatcattgatcggtgagcctgtacttgagatctggcctggatagttgtgatggtaggtggtacccacaatgatggcccttcaggggatttgaagattgtgaaggaggaccaagaggagctgtttggaccacctgtgatccaaggcrggaactaggaagacacctaccggaagtctttgtggatcttttgggattggattggattagcagatacagarcgtttgacctatagtaaccagctgactgttcagcaaacgcttcacttcctaaaaggcttcttctttccaaggcaaactggggcatgtgaggaacaggaacttacaagagcttctagtctgaactccaggtgctgacactgttaacagttgctgagtggagtccttctcacttgggtggaaagtaacctgtaaacttggcccaagtctcccttttcctgtcctttggcccatgctgttctggtgctagatgttggctctggcctttgcactgaccatctcctcgagatggcacgtggggaggatgtgctgtgttgagaagaacttggctggataggcaaagacttgagctagaaaaagaacaagtggttattcatttggtgcttccctttaaccagggcctttttttttcttttattttaaaggaaacctttaagaaaggagggctctcaggcctttcttagaatttaggtctcagttttacatcatgggattctgtttttcttgggtttccattagaagattaaataacatagtggctatgaaagcatactatagatactaggaactgttgctttgattgtgttaaaggatacctctattccccaggtcctttattgattcatcttatttttatttgtataataaatcattagaatagtgcctggtgctctattgcactcacktgcatatactgtataaagctttgtacatattacttgtttagtcctcacagcagccctaggaggtaggtactattattttgctcattttgcaggcaagaaaacaggcacagacagttaaataaggtcacccaactaacaagcagtagagctaggatttgaactgggggagcctggctccatgttctaggttcttcaccattatactccaaggcctgtcggttttcccatcaatctctactgaagaacaatggcgatggccatactggtaattgttgtgctttatatgctgtgcactgtgttgtgtatttcagatgcacgaatgagaatcttcatccccgcaagatattaagagcccgttttacagaggaggaaatgaaggctcagagaattgagtaacttgcttgaagtccaaagctgaggagtggagccagaattcaaactcgagtttgtctggcttccgaatcstgctatttcctcagcacagtggccgtcctccaaggctgtcacatgttccttccctggtgattcacggcacctggctacctccttttagactcactttgtggcccatggcacccagttgtgtcatgacaggacagtggctcccatttctccgggcctgactgtgaggccacatgagccaccccagggaggccagcagagtcagagcttggctttgaaagctgttaatcgacctgagcccctccatgtcccttgctccattttaagcctagggctttcctaaagcaccgcagatctccttttcttgtgagaagagattaggcagatgtatacatacacggtaatgtgcaagtgtctagtttcttgtcagcatcgggatgagctgtttgtagtgaagagcctgggcctggtgagcccccgggatgatgggtggggaccatctgtgctctcctggaaaggaaattgtggtttctttcttttcttttttctttcttcttcttttttttttttttttttttttttagyttatgggaaagggagacttgtgtctcaattgagtctttgtggcgttgtattacagagagtcacagaaaatgttctatgtaaatgactatgtgctctgattagagcctcaatgggcaccattgtgtcatattgctattattggcgattgcaggatactaaatgatattctcatcaggctgaaaaacttcagtgttagcagtgaaactcggggttaattatactgctctgaattagagcatggaattaagttgtagggagagtaagcctattgctttcttccccctctgtcttcctcttcaagattcttgctgggggtttgatcagaatagtttttaacccatgttctatatctgtactactggcattttgttctccatgagttactaccccatttggggttgggaaacacaggaccaatttataggacagtgggagaaggggagacatggtctacttaatagtgcattcttctcagtcaatagctgggtaaaaaatagcatgaagattgaagtcttaggggaatgctggactctctagaggggcctctttaatttagctcttgtctcttctgcctttgaattctcatctcttctgatcctgactcacctctttgaagaaatgacacactgacctacatcttggctgaaacagatagaagagtctatctctgttctgccccttcttggcattcccagcacagcctccaagggagtctgtcccagagctgaggcaggccctctcgggttgcatgccattgacttctcagctttgttttaactgcagagtttccagtgctctgctcttcttgaattgctcctgattgtcaccttcttgcattcctttctctcatttctttttctgtaaatttcatgtcactggtatcaggtttaaagtcgtattttttaaatccctttcaatgttacgtgggttgtaaatgtaattgttaatattatttaaaaatttttgaaaagtgatttttagtggtggccttatcatatctacatattattactccmccattttgggatgtttaggtcgaatcctggttttttcttcttttgctgttgtaagtcatgtatattggcaattagcctaggagagattcctagaaatgagttcactgagaatatgagcttaagagaaagtgaggatttaaagccagatctgtctgccttcaaatccagcgctctttmtactgatgtgagttctcctgtcttttttacctatcagaattctagaactctcccagagaaaccaggcagatactgctccacaccggtgagctgcttctcacctgggtagtctagggtggtttgctccagaattgtatttctgctttttctttttttaacttggcagtggttaaccattccctggagcagcaccaggtaagtcagcttgtatcagagtcatctgctttacctgacatgagcacacgttgtcatatatttgcacatgcagatatcatatgttaaacaatatcacattgttgaagaaaattacactggaaagcgtaaaatatagtttggatgccatattgagtgtaacttaatccacccgattcagaacttttgtagagtgcctcggagttcctatttggaaatatcagttagcagttttagtcagtagagtaacatattttctatatttatgatatatcaaagagactttctgaagcagaaccctgattgactcaagagtcttttccaaattctgtattctctcagaaccaggatttaataggaggtgggtggggggtggtccttggtcaaactggggaaaagcctcataatgagattgccaaagcgcttacagcatttgaaggctcagagagatgccgtggtcaggaagcttgtttgagtctgtctggaagccagtaagtcccacagaatacctactgataatcctgtggaataagcagcatatggaatgttgctgagctagaattaaagtccacacacggccaggcgcggtggctcacgcttgtaatcccagcattttgggaggccgaggtgggcggatcacttgagtccaggagttcgagaccagcctggccaacatggtgaaacctcatctctaataaaaatacataaaattaggtgggcgtggtgatgggcatctgtaatcccagctactcaggaggctgaggcaggagaatcgcttgaacccaggaggcagaggttgcagtgagccaggattgtgccattgcactccagcctgggcaacaagagcaaaactctgcctcaaaaaaaaagaaaaaaatatattccacacacctagtttttcagccctatacaggctgaccccatacctgccatctccttttcacttcctgttctttctggcctccgtgagtccacgtgtgcccttgtctctgcttgctgtgcctttctctttcctccacgttgctaaattccgtccatttttcaaggctcagttcagatcatycttctttgctttatcattttacatactgtgtatggtttggcctcttggtctgctgctctctgtgtctgttgtatggagcgcttttctatctggtattacggttatttgtgtgcatgtcttttgattcatctacttgaagacaagagctggtcttgggctgccattcctgcagtgtaggctctcacattgccttgcacgtagtaagtgctcagtaaatgcttggtgaacaagtgttcatggcgtaacttaatacttccagtggtgagagttcctgtcaagagtgttggcagtgaagttgttccccttggcaatttctatgctgatctcgggttactgcatgagacacagaatctgcgtttccctcccttcagcatcactggggaggacagccttactttggagttttttttctgatcagttacatgatggtttcatctttaagactactgataacaggcagctctgcctatggagtagccattcttttttttttgagatggagtctcgctctgtcacccaggctggagtgcagtggcatgatctcagctcactgcaacctccgcctcccggattcaagtgaatcttctgcctcagcttcctgagtagctgggtctacaggcgcacgccaccatgcctggctaatttttgtatttttagtagagacggggtttcaccatattagccaggcagtagacctgcagatctcatatcatcgccactgtggtgcaatgccctcccaaagtgctgggattacagacataagccatggtgcccggtggagtagccattctttatccctttactttcctaataaacttgctatcactttactctaaaaaaaaaaaaaaaaagactgaccaggtgtggtgactcatgcctgtaatcccagcactttgggaggctgaggcaagtggatcacttgaggtcaggagttcgagaccagcctggccaacatggtgaaacccccgtctctactaaaaatacaaaaattagctgggtgtggtggcgggtgcctgtagtcccagctacttgggaggctgaggcaggagaatcacctgaacctgggaggcagaggttgcagtgagctgagatcataccactgcactccagcctgggtgacagagcgagagtctgtctcaaaaaaaaaaaaaaaagaaaaagactattggtaacaaccctcatttttttgagcacttgctatgctgctaactgctttatgcacactatttctttaatccttaacactatttctttaatccttatatctacccatgagatagggttttgttattcaggcagtggcaaaacctgcggcttagagaggttaaaaaaaaaaaacaacaaactgcctcaaacaaagtcatatagtaaatggcagtgctggagattaaatttaggtctgtcttgttctgcagtccatataccatataactttgccaaatacaacactatggtgtgtgtgtgtgtgtgtgtgtgtgtgtgtgtgtgtatgcacatgtgtggcctttattgaacactgtggtgtgtgtgtatgcacgtgtgtggcctttattgacttattgaattgatcctgaatcttccctactcctttcctgtctcttttctctttctgaataacatcatttctttttctctactggacatggtctctgtgggtttcacccctcacccctcttatttttgaagttttattgaggcactggttgaggctttagggctcccactgttaagtttgacagtaataggtaagtgtccccccagtctcccttttgccctttctttttttttttttgagacagagttttgctattgtcatccaggctggggtgcagtagtgtgatcttggctcactgcagcctcgcttcccgggttcaagcgattcttctgcctcagcctccccattagctgggaatacaggcgcacaccaccatgcccagctaatttttgcatttttattagagacgtggtttcaccatgttgggcaggctggtcttgaactcctgacctcaagtgatctgcccgctgcagcttcccagagtgctgggataacaggcgtgagccacaccgcctggccgcttttgccttttcttgacattgccaatgcatcctgtccccgagcgtctctgagttttaagtctcagatttgttttctttggagacaaactgcaggtaggtgttacttctcaccgaagttcccagatagcacaggctttgctaaacaacacagcaccaggaactccatcatagagaccgcaggatgctgtgtgcgcgcacatgcgtgtgcacctagtgagatgtaaacatttacctggagtaaaagaaattctttccccagagcccaaatttggctagtctccttatgtacacagctttgacagggattccatatgttttgctcatctttgcttttttgcagcctccacaaatttattttccgtaccactgccactaaacagagttgtttctaaagtgcagatctggttgtgccattccaccgtcaaaaattattttttggctccttgttgccttcagggtgataggacaggtgactgctcacctctccagcttctcttactttctttcttcttcttcttcttcttttttttttttttttgagacggagtctttccaggctggagtgcgatggtgcagtctcggcttactgcaacctccgcctcctgggttcaagcaattctgctgcctcagcctcctaagtagctgggattacaggcacctgtcaccatgcccggctaatttttgtaattttagtagagatggaatttcaccatattggccaggccggtctcaaactcttgacctcaagtgatctgcccgcctcggcctcccaaaatgttgagattacaggcgtgagccaccatgcccctcttacattcttttcttctgttcactacagccgtggagagctccgggttgtcctgcacatgtgcactgccctctcttttatggaccttttaggctggctgcaccctccgtctgtgtcaccctcctgctcctcctccacctggctagttcctgttggccacttttggaaattcatgccagtccagtccaccctgagtacatcctctttctgtgtcactgagctcactatgctgggttttatctatgtctccctcgcaactagatcattcacgtcttgaagttaggcatcatgcgttcttcatttctgtacctcccaactcaatgcttagcacccagcaggggctcaagactgtgtgtggaatgaaggattcgtgtgaaaatgcagggagatggaaggctgagcgtttctgttccttgaccattcccgggtttgactaataactctcatacacactgctactcattgaaggcctactgtgtgcatgcattccatgtgtgctatacagtttatttattgttaacccacgtagaattcccagacacatagcgttactacaaacttcatcacaaaaataaagaaaccagggccctgtttctctttgtttctcagatgagaagtctcaccagagttgactgtggcttctgagcattatgaggcacatgtaggatttaaagctgaaaggctttatccctgagactcagggaaatatgacaatcttttattttgttttaattaatattttttgagtcagcgtcttgctttgtcacccaggctggagtgcagtggtgcaatcatggctcgctgcagcctcaacctcctgggttctagcgatcctcccaccttagcctcctgagtagatgggaccacaggcacgtgccaccatgcctggctaatttttgtactttttgtagagatggggttttgctgtggtctcaaattcctgagctcaagcaattggcctgactcagcctcccaaagtgttgggattacaggtatgagctaccgcacccagcctgacaattttttaaacagaattttaggtgcttgggccctggaaggttcccagttgtccaactcttgaggtggggggtgggtggggggtggagagagagagagagaggaaggcttttccttctcaaatagtttgcatttacacgaaggccacggtgtacttgtttattgaatcaataaagatacaatctctttgaatagttcagaatctgatatccctgttagactgagttcaccttttgtgaaggacacaggactgctggatagggtgttgcagcaatgaggagttatgttataaggggtctcttcagtgtctttttggtcatatgaattttatttgcccagtagaacatgactgatgaggctctgaatagtcaaagaaaacatctctcttatgttctgctcatgaatagaacactctgtgtcctgaattgttgctccactggggccagcacgtggtgtatttttctaatgtttgaaccaatgggctttttcattttggggcaatcaaggtaaagattttctggtgctcctgtgtgacagggaaagcatgtcttgtattttctctctctttcccttctgtcttttgagtttggaaaattatattttgagttacatgactaattacatgagtaattttagcaaatttactagaaattgatgttctgccaatgattggaaatcccttcctcccctccactcttctaaaccaaaacagtgctgtgtcctgaagctagaggggtgagtattcagtattggagtacagcggtttagaacattggagacatttacaaggataaatctatggccctgggttctgactttcttttgcctgtgtgtgtgtgtaggggtgtgtgtgtgtgtgtgtgtgtgtgtgagagagagagagagagaaagagagtaagagagagcgagctgggtttggggctgggaaggaagaatgattgattaggaagctgttgtgcagagtagaacaggacttcctgaaatgtaagacccaaagaaacatagatagccatattttccagtcctggaatcagactcaagtctgataaaaggttttcttttgatttgtgattctgataatatgaaaagtcttacaaaagtatagaattgtagctggtaggctgctttatgagaaagaaaataaactcccacagagtgggcattgacctgggagatctggagcctggtgcaagtgcagaccatggttttcacaatctttgatcactttccttttgtgttgaactttctcttttagctccatatttataaatggggtcatatttagccagatattttatttttatttttatttttaaagagaggcaggatcttgctgtgttgcccaggctggagtgcagtgccatgatcatagctcactgcagcttcgaacagggcacaagccatcctcccatttcagcttcctgagtagctgggattacaggcaggagccacatttcctggcttctagttgggtttttttgtttctggaagaacagaaccatactcctcaggccaggaagacctaggtagagcaagaccagcaacctcttggctagagggctgtgggagctgagcatcagtgagtgaggggaaagcagtggttttttgtcttgagaagaagttcagcgctcagttaaccagaacaagtgccacctgtataagacagcagacggtcaaagcagaagagggaaggaaatggttgaataattctttttttccttttgttccttctctgccctgagtctcccccacccccaaagagatatctcaaaatgtcaaggtccagtgaaatggacggtgggatccttgaggaggggtctgtggggtgggggtctctgaaggggctaagccatggtgggctaatggctctgtttaccgagtgcatgccctatgcctggcattgtgcttctttctcgaaaccatcctacaggtggaggaagcgggggtttaaagggagccagcagccagcgactctctatcttacagcttctaattggctttgaaaccacacaggctgctgctggaggaacctttgacatcctcagtgtgcagccctctcccctccctctgaagggaggcatactccttcactgttgctttgacactctaggatgttccaaaactaggtggtcagcttactcagaaggctctgggcatttttcctcctgcaggagggactgcgcacatgcgaaagacatgaggaagctctgatgctcagggctgtgggggctttggccttggcccgcacagccttctctggtatagtgaggtctccttttgggtttttcacttgtgtttgttttgaggcgtatgtgcttcatatggttgaactcattcctcgcccagctggacatagagttgactgcctcagtgggtcccacctcgggggtgggaaatgtaacctcatgagggccactgtatggttgggcagattcacagctgctctgaggtcaggcctggcaggtggcgagggcctaagaggaattggatcaccctggaacctagctggggctaggatggttgttgcatgtgattttcagcaggactctaagggatctccaaagctggttggctggctagygaggttgggcgagggaataactcatttgcttaacttttcatatgtaacaactgggttttgggtttcacaagagacaaggtaggcaggcaggctcaggtggttctgtataccccatttcatacatgagaaaatggagacttgtttcagatcgtaaggtagttggaccgcagctactcttccaagactggtattcgttcctctactctgttaaagccagagagaggatgcaggccaagtcaagtgaccaaagctaaaggggaaggaagggctggctggacttagcagtgaccacagacagagttgaagccttcacggttggcgttggycttgttcactgctgtgtgccaagctgctgacagcatctggctatcgcaggttcgtaataagtgtttgctgagtgaatgaaagaatattggtgttggggatgatctctttttcacttgctcagcaccttccagaattttgttcttctctttgccactcccttttttctcctccctgggtaacacctcttattgcaggagtaggatcaggttttgagtagcacctttggggtacccattcagttcctcttttcccccgtaattatgggatttgggattgccctttgggagaattaggtaactttaggttctgtatgttaatttgaggcctggattttgaacttccttctgatgcagatagaccttggaagggagtccttacttagaacctctttattttatctcctcactgggagagtagatcccagacaggttttgggaaccacctggtgtccccaagcgagcagaggcagagttgggcttgaatctcctccttcattgcagtgctttctctgccctgatcccattgggtgaccctggactatgaatatggattatgagtgggccctgagagtgatcagagacatccttcaagattgaagctgctttggttcctgccacatggaactgagtgggagaatgtctcaattcaggatggtgggagtgtctctttgtccaagtaataaatggaaaccgtttgctcccgacttttgcagatatcaagggcttgtctttccagagtttggttttcttcccttctctccgcctcccttttctctgcccgcctgtggttttgagcccctcatggctatctgggcagtgatgggtggaagggagctggtgcagtattcgagtagagaagttctgctgcagtgagtgtggggcaagtttcccagacccttgttgggtcagggcaggtggttgtggcccagttgtttggccttctgcaggctgcacccctgccctgctgcctgccagtggggtgagggcctggccacctggtacttaacaagtttggttctacatgtgttcccgtgagtggaggacaaaatgaaaatacctcctgatcgtgttcaaccattagttgaacaaccatttgaaatggttattgcaaccatttcagagttttcttctgtttgtgatgtcatctgtgccttataaggggtgacttgctaccttatggagcacctaggttgaggcccgggttgagcacagttccatacgttagctcatttatttattttgagacaggatctcacttctgtggcccagggtggagtgcagtggtgcaatcacagatcactgtagccttgacttcccaggctcaggtgattctcccacctgagcctcccgagtagctgggactacagctgtgtaccactatgtctggctaattttttgtatttttagtagagatggggttttgccatgttgcccatgctrgtcttgaactcccggcctcaagagatcctcttgtctccaaatcgcttcgcagaagtgctgggattacaggtatgagccaccatgcccagccaagttagttcatttaatcttcacagtggtacaatgggctaatatctctgtcttataggtaaggaaatggagactaagagctctttgccaagggttgctgtcatccatttattcatcaacaggtagttattaggtatctactctgtgctgggccctggcctgaacttggctttggtggatgagactgacaagttctctgttctcacagagctgagagtctggggataaagatcccttattatggtttcttttgtggtgttgtggggagagggtgatgattagggtttgggtactggagagagaattaggattttagctcattttactcaaatgctttatattgcaccatgttactacattttcccctgtgcttcccccctaccctatgtggattattacagtttacttgtgtgtaaacttaggctcagagaggctgggtaacttatcccagcttgcacaaaagaggacctgaatttgagcagaccgtaggttgaattctgtccttctatgctgcctttctatgaataatatgtttacatatatatatatatatatatatatatatatatatatatatatatatttttttttttttttttgagatagagtcttgttctgtcacccaggctggagcgcaatggtgtgatctcagctcactgcaacctctgcctcctgggtttaagtgattctcttgcctcagcctcctgagtagctgggattacaggtgcgcaccaccacgcctggctaatttttgtatttttactagagatggggtttcaccatgttggccaggctggtcttgaactcctgacctcaggtgatccacctgcctcggcctcccaaagcactgggattacagcatgagccacagtgccaggccttacataaaaattgtttaaaaagcagtttgcagaagaattatcaatccttttgttaacattttggtgaactcttgaacacattttttaaaaagttgagagttgctaacaagtaaagtgaagtcctgtgcctgttgtaatttggactgaggagtgtgagttgtcttggtctaaaggtcagagtgagggtctctgcctgctgcaggggtctcccggttagggttagggtgaaaagctttttaaaataaacctctcaaatttgttgtcaacattaacctatggtaattttttttttttttcttttttttgagacagggtcttactctgttgcccaggctggagtgcagtggtgggatctcagctcactgcaacctctgcctcccggttcaagcgatcttcctgcctcagccccccaagtagctgggacgacaggcgcgtgccaccatgcctggctaatttttgcacttttttggtagagacagggttttgccatgtcacccaggctaatctctggtaatttttaaactctgctcaaagttttagaaaacataagtctggaaattccaagttgagccactggtgacttgtgagcatgagtatggcatgggattgggggtggggtggggctgacgtggcctggggcagatgccgggtggttctgtttggaaacagaagttccactgcacatgcagccttcacgtcttgtgggggcttttgtgggggctgtgtacttcccagtttggttattagtaactttatttggttctggtcattaacggcttttgggggcgttttgggggcctgtttgaggcccctgaacatgcatttttcagttgtcgttgtccatgttattaaaaggatatgttggagggggttgcagtttagtctgctgctgtttcgaatccttttctttgatagtgtttgccttcctcccaccaaatgctgcactgagagtctctggtacctgggtccctccttcccttgcctttgcttgggaggtcagtgccttcatccaggacatctttgggcatacaggtaatcccaagcagctctgctcagttgttgataccccttctcacagaacctgatctgcctcagctctccttgcctcctaagtggcagtgccccgctgctgggaagactcctctctctgctggatgcttcttcaggcctgctgctgcacagcttacggccatgatgactgctgcagtgcagaaggcatttcagttggctgtttgtttttcatgcattttgtgtttgtagtgtgctggccacgggagcactctaaacacattatgggccgggcgcagtggctccggcctgtaatctcagcactttgggaggctgaggcgggcagatcacttgagcccaggagttcgacaccagcctggccaacacggcgaaaccccgtctctactaaaaatacaaaaattaaccgggtgtgatggcgcgtgcctgtattcccagctactagggaggctgaggcaggagaatctcctgaacctgggaggcagggactgcagtgagccaagattgtgccactgcactccagcctgggtgacagagcgagactccatctcaagaataaaaataaaaacaaaaataaacataaaaataaacactttatgtacacaatctcacatcactttcacagtcttggaaggcagatatttctgttatcctcattttacagctgaygcctatctaaggcttgtataaaagtcagtcactgtccaggctcacacagccaatgctggagggctgtgtggcacccagagagcacagttgctgcttggaataaaccttcacttatagtccggagcagggtggttctaaagctcccttagctttcccactagtaagcttccaggttctggtacagtttctcagcctcggcactactgacgtttggagtctgatgagtctttgttgtgagcgctgtcctgtgcattgcaggatgttaggagcatacttggcctctatccactagatgccagtagcacccccctcccaactctgcccagttgtgacagccaaaatgtctgcagacattgccagatgtcccctgggggacaaaatcttgcctaattgagaaccaccgagtcatggcaaccatttcaaaccctaagccaggatgtacgtggagatggagaaaggtacaacatttagaattggtactgttggctgggcacggtggctcacacctgtaatcccagcactttgggaggccaagacgggcagatcacctgaggtcaggagttcgagaccagcctggccaatgcggtgaaaccccgtctctactaaaacaaaacaaaacaaaacaaaacaaaacaaaacaaaacaaaacaaaacaagtcgggtgtggtggcgcacttttgtaattccatgtactcgggaggctgaggcaggagaatcgcttgaacctgggaggtggagattgcagtgagccgagatcgcgccattgcactccagcctgggcgacaatagtgaaactctgtctcaaaaaaaaaaaaaaaaaaaagaattggtactatcttagaaaacctggagcaccctgctgctttaactgcagccctctgtgtgggcagacagattgacagtgggcttaatgtggggtaacctttcatcatgaaaattaaattacactgcaggccttttgtagccctcctatatgaaaccctcttaaaatattttctttttgcaatggaagcttgggggaaaaatcatagtcttagatttattgaagttttgtggataaaagcactttttattaaaaagaaccaggtgaaaactagaagggcctcttttgagtctgctgacagacacgtggagaatatatagtcagcggaacattcctgtgctttccgtaaagctgtggatgaacctgcctttcaggtttcgtagcctcttcagtcagatggtttgagaatgcgtgttttgtggtgtatgcacacagactgtatgagtttgtttttttacacatgactagtaaacctgtcacattttgtcaaatgtgattttctttctttattaaaatagattttatttttagagtagttctaggttcacagcaaaattgagcagaaggtgcagagatatcccatatacccctggcccccacatatgcacggcctcccccgttagcaacacccccaccagagtggaacaatcaatgaacgtacattgacatatcactatcacacaaagtccatagtttctgttagaattcatgcatagcattctacattctgtgggtttggacaaggtatgatgacatgtaactgtgatttcctcaattcaatatgtatagttcctgttcacacatttcttcacacatttgttcctcagtgctcaaatgcctgctgtattccaggctgtatttgaagcccctgagcctttatttggagagttcattgaacattagagcatgcagtttgctgagatgtcttgtacttagaaaatccaatttataaaaaacctcaaatagaacagtaaatttagggaattttttttttctgatgataaaattagataactctgttgcatggattctgtaaaacacagctccctcctgttacgccatgaattgggttcaatttacaacacccctttaggcatactttttcagcaacacatgtctgagccgaggtgcactgtgcctctttctgtagcaggcagcttttagggggtgtcctagtggtcttatgttttatacatctcatgggagtggctggtttctaggaaatagctcacttgccagttttggtaaccctaacagagctgttttgccaaggcgtctggtgaatatttctgtcttccagtcaggactaatatagtacttttcagaggtgatagccagttaactgatgactttttttttttttttttttttttttttttgagatggaatctcgctctgccacccaggctggagtgcaatgatgcgatcttggcttactgcaacctctgcctcccggattcaagcgattctcctgccttgcctcctgagtagctgggattacaggtgcgcaccaccacgcctggctaatttttgtatttttggtaaagtcagggttttgccatgctgctcaggctggtgtcgaactcctgggcccaagtgatctgctcacctcggcctgccgaagtgctggcattacaggcgtgagccattgcacctggccgtgttttctgttttttatttagaggaagtcacttgatcatgcttttccccccacccatggcataggaaaatgattcttttgctgattgtgctgattaaatgtgatgtggaaaaacctactcctggtgttcagagaggttttccaggtcacagtggggtgggtctcatctggacatcagaatcattatgttaatgataactaagagcagttgactgcttactataagccagccactgacctcagggcattgcataactggcttcctttactcttcacatcagccctgtgggcttgggagtgagacctctacctagtttttaaacaaattacataaactttttggggctcagctccctcatctgaaaatcagaaaatgatacttctctggcattttgagcatgagttcaggagtcagacttcctgggtttgaattctagcttcttctatgactttgagcaaattactttaactttgctaagcctcaggtttctcgtgttgcataggcagatgatagtcatatctgaatgtaacgagaatcaaatgcaacctgggacacagtgaacacttggtgaacgttagtgccttggtaacagtgatgatagtgacaataaagatcgatgatgatgatgatggcgatggtgcttaacccagtatgaaggtgaagtgtctaagcttcttgagggcagagttttgtcttcttctgcactttctttctagtgtctagaattgcctgtaggtttacccctggatcccgtcaggatggggctaaatttagaatttttggaaagatgtgagctagcccgtctacagtgacatccagctcagtgtgtatgtttggtctgtgaacatagtagaggcatgattcaactgtgagtttgtgctgggagcatagatggatgcttttcaggctcttgaaatgtgcaagtgtggttcccttgcagcaggcattgcctctccctcgttaatcaagatcttttccttgccaggacttcaggagatcctggacatcctctggagcccaggggtggcctcacccgctccttgctttagcctggaatgcaggccctcaacattccagccttgggttagtgccagagctgtgaaagcagggcaggcatttccaccttgcttgacaaaggcttttgctctctgggtggttgggggtgcctctgaagccaggcgagaccagagatctcatgggtttgtgtttcttcattgatacttttaaggggagcaacttaatcagtgggaaaccagatctcaaaggatgggacagataaacgcagggtacagagaagagcttgggggagtgtcaagcttatttgcccaaaagggctgaccctaccttaccgccattaatacatgtccttcatgcatccctgggtaacagggaagtagtaccaaaaatcttacagtgcaataaacacttggcagaaatggagaaactagtaatggctgagcagctgtgccctctccaccacctcactatgcagtacgtgggccaccagccgctaggggcctggcagccacagagatgagggaagcatgctgaggaccctggtgtggagttggaggggtcatgtcctctgaaaggtggccaccactcatcgccagcccttactgtcatgtgagaatgtggctctgtgtttccagatattgtttttttttttcccctccaacagaagcaggaaatataaaaaatttatataatatatataaaatatattatatataaatatataaatatataaaaataaatatatattatatatataaaaatatataaatatatataaaaatatataaatatattatatataatatattaaatatattatatataatatatttatataatatatataatatattatataaatatataaatatataaaaatatataaaatatataaatatataatatatattatatattaatatattatatattatatataaatatataaaaatataatatatataaaatatatataaaaatatatgatatataatatatataaatatatatgtataaaatatatattatatattatatactatatattatatataatatataaaaaatatatataaaatatatatataacttcacggaaactctgaaggagaggtcaaatataatattatatattttatatatataatttatatatatataaaactatatatatatatttttgagagacagtcttgctgtgttgcccaggctggagtgcagtggtgtgatcttggctcattgcaacctctgcctcccaggttcaagcgcttctcctgcctcagcctcccaagcagctgggattacaggtgtgtgccaccatgcctggataatttttgtacttttagtagaggcagggtttcaccatgttggccaggctggtgtcgaactcctgacctcatgatccgcccaccttgacctcccaaagggctgggattacaggcatgagccaccgtgcctggccaggaaattatatttttatgagaaatattctgttgtttaaattctggcacctcgttcttttttttttttttttttgagacgaagtttcactcttgtcgcccagtctggagtgcagtggcatgatctcagctcactgcagcctctgccttctaggttcaagtagttctcctggctcagcctcccgagtagctgggattacaggtgcctgccaccacgcctggctaatttttgtatatttagttgagatgggggtttcaccatgttggccaggctggtcttgaacacctgacctcaggtgatttgcccgccttggcctcccaaagtgctgggattacaggcgtgagccatggcgcccggccctagttcacaaaatatatatggccaaacaaaacatgtctggggctagacttggacagggggccccattgtgcaacctcttatatagcaaattagagtttaccaggaagtttctgcccttcaggccctctgctctcacagaaactctatgaaggagaggtcatcttgtctatgtttgtaagaagtcacattgagagaaatgacatcttagctcctcttatgtgccaagtagtttgtctgcgttatcttcttagattggctccatctctcaggtgaggaaacagacttggaaaggtgaagtgacttgcccacctagttagaagcacatcatcttctgattcctgtctcatttcatttcaccgcttgtttgccctctctgtggtcttgcccacggacttgtagtccctgatgtacgccaggcctctcacagtgtggcccccgggattcccttttatgaaaaaaagttgagcatgagctgtaagttagagtaggttttaattctgtcctaccacggagtctgttttatatgagaacaagttatttaactcctctgagtgttaatttcctcatttttttcctttctttcttttttttttttttaaagggccagtccccattctcacagggtgtttggaaggagtaactgaaggggggtatataaagccgctggcagccaggcatggtggctcacgcctgtaatcccagcactttgggagcctgaggcaggcagattgcttgagtctaggagttcaagaccagcctgggcaaacatggtgaaaccctgtctctataaaacatgcaaaaattagccaggcatagtggtgcatgcttgtaatcccagctacttgggtggctaaggtgagaggattacttgagccagggaggttgagactgcaatgagctgtgattgcgccactgcactccagtttgggtgatgcagtgagatcccatctctaaataaaaaaaaaataaataawgcccctagcatggtgcctggcacatggtaggccctcaaaagatgaccctccaaagtggccaggactcaccatgcattcagggaatatggattcttttggtggcagcaggctgcatttttgcctggctgaatgcctgcaagcatgggaacttttgatgcaacagtaatccttggggtctgaaaggccccaaatctcccgccagatctctgaggttaacatccagtcaaccttttgcttttcattcttggcctctttcctcctcacctccaccagtgtgacagtcatatcctctctatgtttctggtaagttctggccttgagggctggtcttatgactgacaagtgaagagcagtgccaccctctactccacattctcagaagcgtctctaggttccatactttaaggcaggctagcttccaaggcatactgacagacatccctgtgcagtcctgggggcacgagggtcccattccaccctggggcttcagggtcaggtgaggaaggtagatccctgaagttgggtccagaaaaggccactgggctagcctgtctctcgttctggtcactgacctcaggatccagcaggacgctgctagcttgcttggctcagctctgcgagtgctgggagcaataagcagtgctgaaaacgcgatgcatttcaacccaaagcactctgatccctttccaggctttgggagaatgttttttccagctcggttacttgctggcatgcataggtcaatatacaaggtgttctcagagaagccggagctgaatgttgacttttgtgctccctggggtgtgttctggggaggaagtgggttttcaggttgtggtgcgtgtaggatgtggtctgggatgattagtatcacacactgtggataaagttaacacgcattgtggagcttttttcctcttttgtacttttgggcgaaggtgcctcaaaagcagctttgtttatcaaggaggtgcccttgattctgtatgcatttttaacatctgaatagaagttagacgcacacataattgctttacttgatgcagtaaatacgtttcagccagataatccataagaccctagttcagatcctgactttgatccctcttagttgtgtgagctctcaccagtttacttgacctcactctctgagcgtcagattcctgagtgtaaaataggtacaaaaactcagattgttgtaaggtttcagtgagttgttgcgtgtaaagcatttagtatacagttcttgtcacaatgtttagtaatggcagctattatcttaactattagagcggcagtttggcgtggcactaataatgatgatggtgacagtttcactgagtgcttactacctcagctattcttccaagtactttgcatcacttagctcatttaaccctcacaataaagcgataaggtaggtgctgttctaatctctgttttacagatgctaaaactcggcagccaggtgtggtggctcatgcccgtaatcccagcactttgggaggccgaggtaggcggatcatctgaggtcaggagttcgagactagcctggccaaaatggtgaaaccccgtctctactaaaatacaaaagaattagctgggtgtagtggtgcatgcctataatcccagctactcaggagacagaggcaggagaatcgcttgamtccgggaggaggaggttgcagtgagccgagattgtgctatagcactccattctgggcgacaagagcgaaactctgtctcaaaacaaaacaaaacaaaactcaggcacagagaggttaagtaacttgcccaaggtaacccagctcataaatatgaaaagagcagggactttagagtcagaagacctgggtggcacgcttgcatgccgtgtcctggtggtgtggcctaccgcagagtgactgactctgattgccttcccaactgtaaaatggtgctaatgatacagaccgccccccattgcctggtgtggtgcgcggctgtgagtgcttaataataggtgcttaggcatcatttgctaattaactgactgtgttaggttattaggaagttccagtgggctaataaaagctctgggtaaacgttagttgttcttttaaatgtcctgaggtgcttatgattggagtttaaacagcacacctgtttttcagatttcggaaccacttaagagaggcacagtgtaaagaaggtggagatgagaatatcacctttactcctgatacagtcttggagaatgcagcttagttgtggggcagcattagctttctgatatgaagctgagattaggtggatgtaccaggccagtcacgggcagccttgggtacccagaggccttctcacgtgggtcgaggcaggtggtggaggtggtggcagcggtagcccccataatacttctaggtggaagaacagaccacctgagtgagagaaatcactcctgagccctgggggagaactgtgtggaggggcagatgggagcctggagttttgagggaaaaaaaactttccttttggaagccagacgtagggaagaagcatattgatcacaatgactattaaagaaagctccccaacaccccagcaaaacacccacaaaacaagaaactacttctgccaatggttctagccagttttcttcaccacagttcatgactgcttcatccttttaggtgatcacacccaaaacttttgggtcttcctgcctttttttttttttcttttgagaccaagtcttgctctgtcacccaggctggagtgcaatggcacgatctcggctcgctgcagcctccgcctcccgggttcaagtgattctcctgcctcagcctcccgagtagctgggattacaggcatgtgccaccatgcctggctaatttttgtatttttagtagagataggctttcaccatgttgaccaggctggtcttcaactactggcctcaagtgacccacctgcctctgactcccaaagtgctaggattacaggcatgagctaccacacccagcctttttttaaaacaaaaccaaaaccaaaagagacagggtctctggtgtgcagtggtgtgatcatagctcactgcaccttgacctcttgggctcaagcaatcctcctgcctccacctcctgaatagctgggactacagatgtgtaccatcacactcatctaattaaaacaattttttttttggtagagatgggatctcgctatgttgcccaggttggtcttgagaactcctggcctcaagcgatcctcctgccttggcctgctaaagtgctaggattacgggtgtgagccactttacccagccttgggtcttccttgactcctgactctcaaacctcatattcagtccatctgccagtctgtgggttcaatcttcaaagcaaacccagaaccttactacttctcacctctccccagccaccgctctggtccaagccaccatcgtctctcacctggattagtgcggggctctcttcctggtctccccacttctgcccttgtccctcttcagtctatttctatgaggccaccagaattatcttttttaaaaactgaagtcagatcatgttgctcctctgctcaaagccccgcagtgattccctggcacgccgaggggaaaaggcaagatcctcccaaaggcctgtacgatctgcccccggcagctccctggcctcttcattttgtgcctcctctgccccctctgcagagccacactggccctggtagtttctagaacacgtcacgttcatgcctgcctctgggctttgcatgggccttcttcccaggcacaacgtggggctctccccacttcttccaccctacagagaggccggccctgatcagctgttttataatagctcctcccgatcagtactcctgatcgctccctactgtgctgtgccttttttttttttttttttttttttttgaggcagagtctcactctgtccattgcccaggctgtagagcaatggcgtgatctcagctcactgcaacctctgcctcccgggttcaagcaattctcctgcctcagcctcccgagtagctagaacacaggtgcccgccaccacatccggctaattttttgtatttttagtagaggtggggtttcatcatgttggccaggctggtctggaactcctgacctcaggtgatccacctgccttggcctcccaaagtgctgggattacaggcgtgagccactgcgcctggctgctctgctttttacccatagctctggctctaatatatgacactgcccctccctgaattagaatggaggctacagggggatgctggtctgttagttgactgatgcatcttcagcacttaagacagtgtctggcacagagtaggaacagaatatggtcctgtaacaaatactgaaggttgtgctctgtgcacctgggatagagcaggagcaagacacatcattcctgccctcacagggttatggtctcctaggtgacaaggtagtgcacacttccatagstcttactctgggacaagtactgtgccaaatgcttcctcccagccgcctgatgaggtagctactgttagttatcaagtctgatttacaggtgaggcaaagaaaggataagtaattgacccaaggtcacacctagcaggtggtgaagctgagccatgggtcttggcttcaagaatctgtgctcttacccaccatacctgctgctgccggattcaaacccgaattgcattaaggaatcatcataacctgtttgattgaagctataagggaactttgagcatggtgaatggggcgctctatggaaaaggggttctgggaagcctctgtggaagggaggttttgttaagtgaactcccctggtaaacggagtgattggcccccaattagcttgctgttcggattaactgtartacatcacactttcgaaagtgaagatatgcctattttttcccctctaggtctataaagtagatttttgccattagtaaaatttaaagtgattgggggctatggttactgagaattcaagaggtagattgacgaaataatatttgaatgcaattttattttttgaaaaatgttttcgagatgtcctgtttttagccaggaagcaaactccaggaaaactctcttttccattaaagtgtggatggtgtactgtaaacaaagactagctctcttgagctgccacgtttctataacttatagaaacagaagctgttttttttttctaaagatccaaactcatgttgccacacaaacaacaaaataaaccagtgtgttccaaaaacaagcatttgctctacccacacgcacagttggaaagatgcaggtttgattgaagaagtcggaagccagtgaggtaatggcagattcttttaggggctcctgttaattttagtaagcttggaagaagcttctaggttgtttagtgtttctattagaaccatcacctcaacgaatttgttattgtagagattgattaggggatctgcttcctttgagcagccaggatcccccagctccagcttctagcctgcttttcttcctcatctctactctttcagaataatgcatggctttcaagtcctgtgtgataggtggcttcttagcgggcctctgaaggggctgagatttgttcctggggctgagactttgttcctttgagggtgcagaggctgctacctgctcaggctgcccccaaattgctcttgtgtgcagtgtgctgcttggggaccagtcctggctctgccaccatggcggacactactggcttcctcttaatctcaatctcttcttctcctttctttcttttttttggagacggagttttgctcttgttgcccaggctggagtgcaatggcgctatcaatcgttcaagcgattcttctgcctcagcctcccaagtagctgggattacaggcatgtaccaccacacctggctaattttgtatttttagtagagacaggatttcactatgttggccagtctgatctcgaactcctgacctcaggtgatccgcctacctcggcctcccaaaatgctgggattacaggcatgagccactgtgcctggccctcttctcctttctaacacaagcctgcttctcagtttcacgcacacataggagtggccacctgaccctgtgttggcaaatgattgcaggctgttgtcaccggtggggctcctggaaaagccctctatgggggattgactctggcatgactggggtgtggatgctgtgctcagaggtgctgcagtaatggttctgctgctgctgatagtaacacaggcagtgctgtgtcatgcacagtaatcctgtaagggagatactatcatgatctctgttcggtggatgaggaaacagtctgaggaaaggcacctgacctgttcaggccacacactaagtacagagctgggatcctggcaccagcatttgctctcaccacctctctgttatgtacctctcacacaggtgcgagtcccaccccagaggggccttgagaggctgcaagtgtcctgggtgggctgcctgcttcaggaggacttattattggggaaaaatacccccmctacttattactaagggccgaatgctttatgttcacacaacaactccatgttgtgtgactttggacatgttccttaactttctttatcttggtcttctcatctctgtaaaattgggatcataatggcaccaacttatagttttttttttttttttwtttcttttgagtcaggatctcaccctgttgcccagactggagtgcagtggtgtgatcttggctcagcccttgggctcaaacgatccccccacctcagcctcctgagtagctaggactacagacatacaccaccatgcctggctaattttttttttttttggtgggttttgctatgtttcccaggctggtttctaactcctggactcaagtgatctgcctgcctcggcctcacaaagtgctgggactacaggcatgaactaccatgcccggccaaacttctaggtttcttaaaaaagtgcctggcaggccaggcgcggtggctcatgcctgtaatcccagcactttgggaggccgaggcgggcggatcatgaggtcaggagatcgagaccatcctggctaaaacggtgaaaccccgtctctactaaaaatacaaataattagctgggcgtagtggcgggcgcctgtagtaccagctacttgggaggctgaggcaggagaatggcgtgaacccaggaggcggagcttgcagtgagctgagatcatgccactgcactccagcctgggcgacagagygagactccatctcaaaaaaaaaaccaaaaaaaacagtgcttgttgttcttttgttgttattgttaaaggatcattatctcattatcaacaacattggcaggtaattgagcaactgtttgtctccttgtcaatgtggagatagaaaattgcctacgaggttggacaaggtgctggagcagcgtcaaggaagagagatcgaacaagaagactgctttgcccttggacagctttgtttctgaagcactttctcatattctcccatttaatcatcccctccctgccaacttttccaacaggtgcatacttaggtagagctattctttatcagcctggggctaagatttgttcctgggcaggttatctttgtctctgcctggatagaggcaggggcagtagagttgtcatgcattccagactactagctatgcagaagcaggagcaaggtaagagcagatttgtatgaatgagggtgtcagggaatatcttagatgtccatttagttgttaaaaaagagaactgatgcctatatttcaaaacccaactttgatctggatgcagtggctcatgcctgtaatcccagcactttgggaggccgaggtgggtggatcacctgaggtcgggagtttgagaccagcctggccaatgtggtgaaaccttgtctctattaaaaatataaaaattagctgggcgtggtggcacacgtctgtaatcccagctacttgggaggctgaggcaggagaatcgcttgaatttgggaggtggaggttgcagtgagctgagattgcaccaatgcactccaggctgggcaacagagcaagactccatctcaaaaacaacaacaacaagaacaacaagaacaaaagaaaaaacccctaactttggagaggttatctcctgaaaaggagggttttggtctctttctcgcactgctctaaaatagtgactggcacatagtaggtagtcagtaaatatttgttgaatgaatgaatgaatgaaaggtaattggccttccctgctcagttctcattaaaaattctggttttcacatatatgggcagtgtcccaacaggctgctggggggtggccgtttgtgatggcctcaccagtctttcccagagagggaagtgcacatttttargctacttttgctctgactgatacacttggctgcctaacaaaaagccagagaagaactaagatttttagcatcattcaaaatgcttgccattccttttgctttgtgaaatcatgagctagttattttgagttcacataaaggtcagaacttgatctggggaaggaggttccccttggtttatgtgaggggaactttttcgcccttctgtttattttatccaaaggcttctgtttttctcccaagctaaaatctggcatttgttgtagaaagttctcagcttatgtgtgtgtgtgtgtgtgtgtgtgtgtttttaaaaagagctcatattttggctttagttttgattctcagtgattttttttttctgcctgagagttgattttctgcttcttcaaagtccagctctcaagtgggtgcctaaagttgtttcgttttagaggtgacttaatcattttttaggcctttaagtgctgctcccagcttgtgtttccttctgtttttagtttttatgtggggcagggtctccaaagtacacgggctcttttccccacccctctaccctcattttaactgtgcatcaaatgggtcctgtttcttcttcatgtataattttgtgagtcagggaaggtggtgaaggcccttgaaccctggctttgtcatggcccttccttaaggacctgaaggtctcttctcctaagggctaggttggttcagaaagtgagaagggctggaccttttgtggggagaggatacagcagggtccraacagctgggctgayaccgggcagcagcccagcagcagtcggagctgcagggtcagctcaccatgggctgaacttgggcattgcctgtttaggcagagtctgcccgagcctttcctgctccctgagaatcctcagcatgttttcctgctgagcaaggagtgaggaatgaagcccactacgaagcccgagctgcaaatgtatttatttatttatttatttagagacagagtcttactctgtcgcccaggctagagtgcagtggtgagatctcagttcactgcaaccaccgcctcctgggttcaagcaattctcctgcctcagcctcctgagtagctgggattacaggcgcccaccacgggcccgagaactgagtctcgcccatctaatttttgtatttttagtagagacagggttttgccatgttggtcaggatggtctcgaactcctgacctcaggtgattcacccaccttgaccttccaaagtgctaggattacaggcgtgagccactgcgcccggctctgagctgcaaatttaatagggaaactgaaggaagaggttctccacagcaccagtggggctgagacctgttttcctcaactacctttttttttttttttttttttttttttgagacagagcttcactcttgttgcccaggctggagtgcaatggtgcgatctcatcttactgcaacctcttcttcccaggttcaaacgattctcctgcctcagcctcccgagtagctgggactacaggcatgcaccaccatgcctggctaattttgtatttttagtggaaaagcggtttctccatgttggtcaggctggtctcgaactcccgacctcaggtgatctgcctgcctctgcctcccaaagtgatgggattacagatgtgagtcactgcgcctggccaactgctttggtttctgagtcctccctcctctaagcccgctcagtgtgtgtcattcctgggaggcggtggctctcccaggaccccatgccgaaatctgccttcttcttgtcttcattcccccacctggggtacccctcagtgttttcccattacacagattcacgtttacatgttctagaaacatctgtaagtctttttcctgtttgtaaattgtatatcctctgttagattaaaaaacttttaaaagtaagtgtctttctctgtggtgacctatttgtgtggcatagtataggttacaaagcccttttcatgcattgttttacttataagtaatgtttatagatgataccgaggtagaccctatggggtgcttactatgccaggtctgttctaagaatgttatacacattaccttactaacccaccccaaccatccattgtgttattgtcacccctgttacagggtggagagaagaaggcagagagaagtggaatgacactcctgaggctaggcatttgccaagtgaggtctgggatttgaacccaggcagctgaacttcagaatcctggtgtttaaccactataccatgctggccttcatgttattgagcaggataaggaattgtcactcttgacttgtttttgaaacatgaaaacccttctcttaaattcaaaagtaatacatagctgggcacggtggtgtgcacctgtagtcccagctacttaggaggctggggaagaggatagtttgagtccagaaatttgagactgcagtgagctctatagtcatgccactgcactctagcctgggtggcagagtgagaccctgtcaaaacaaagcaataacaaaaaaaaccaaagtaatgcgtattgcagcaagtacttaaataatgtagatgcataaaagcaaaaagtgagaatccccactcctcctccagtgctctgagatagactgaagtaactcttcagggatgagtgtaaacacaagggatgtcctcgaagactttccacttggaaagcttgtgtattttatacattaagtatcataaatatgtagttaccctaatgggtccccgccattgctctgcaggcagtgggctgaggttcaggagttaagtcagccccagggcacagggtggtgcaacagaagagcctgagtcgaatccagatctcccctctccactgtgactgtttcctgggaaactagtcaggggctggttttataggaattatccagtcgtattattattattattattattattattattattattattattattgagactgagtctcgctgtgtcgcccaggctggagtgcggtggtgccatcttggctcactgcaacctccgcctcccaggttcaagcaattctcctgcctcagcctcccaagtagctaggattacaggcttgagccactatgtccaactaatttttttatttgtagtagagatggtgtttcaccatgttggccaggctcatctggaactcctgacctcaggtgatccgcctgcctcggcctcccaaagtgctgggattacaggcgtgagccaccgcccccagccttccagtcgtattcttgacaaatggttttccatgaagttgtggacaccttccagggtcacaattaaatggttaaatgagtcacgattaaataatgattgtgggtacctcccagagtttcaatgaaaaagggaattaactttggacacagacagaataatgcaaatcttcagttttggtttagaaaatctgaaacctgcagtggggaatacagaaaagaaggaagtagaaggagtctgtccccaaccccgccccttccttttttctctcctctggagagagaagggattaggaggcctcctggaaaggagtccctttcctgtgatcaaactcaccccttccctccaccagagcaattacagagcctccggcctggaaccttcctcaccggcctggaggagacaccattctgcggacaatggggggaaggaaaggaaagcaatgccgctgccaatggtgcggatgacttcctcaatgccagacttgcttgcactttcaaagtccctcctcggaggtcccctggtaggacctggagataggatgtgctttcactctttacagactattgtccaggaaagaaagtttcagactttcttaggcagggaagggccctctgactgtgaatttatttggaaatttgaaagagaagagagtcttatcctaggaagtgttctttttctttccccctggatttgacaggccaggcaacagcaattatccaaaccactgctctgcaccaagaggcaaaccacaggaaaaagaaacccgaacaagcaaggagaatagaagttccccaaagcatgccttcttgtttttctcagaggacagtcttttcattcatgttttacagattggtccaacaagtgcagttcttctagtctcctatctagataagcaggatattagaaggaataggagaggcctgcaaaaagctatgatagggtggaaataggataggagaaactgaaaaaaggggaggcgtgcgctccaacacctccatagcccttggggacgggcttagtttctaatgagaatacagaaggcccatgtctcaataggccccgaaaaatattaatccagcccaatatgaacagtctgctaattatatgactgggcctgcttaggagatcagggcaatattacattcagagtactcagtttaggaagatgacacagtgtaatacatacagatttccatcatttcttttattcctcatttggagaggcaacagggctgagatagacatgttagcgatggctagattgattgatttattgactgaatgaatggcctgctttaggcagcgggaacactgaatgaacattttaaaatcagctggtataggtcaggaactgtgcaggttgctgggaatgggtagatgaaaagacattgctatggtttggctgtgtccccacctaaatttcaccttgaattgtaatccccatgtttcaagggtgggaccaggtggagataattgaatgggggggtggtttctcccatactattctggtggtagtgaataagtctcacgagagctgatggttttataaatgggagttcccctgcacaagccctcttgcctgccaccatgtaagatgtgactttgcgcctccttccccttccaccgtgattgtgaggcctcgccagccatgtggaactgtgagtcaattaagcctctttcctttataaattacccagtctcaggtatgtcttcatttgcagcatgagaacagactaatacagacatggaccttggctgtagggagtttgcactgtagtgacggcaagagctcacgtgatccattttaagatagaagagcgagctcaggcagaggaacacagagccaggatggtccatgcacggaatctggccctgcccttactttctccaggagcatgggctgggtccctctcctccctaatcctcactttgctcatgtgtgaaatgtagatcaagtaagttctacactcagaggtctcttgtgaagattaaatgagaaaaggcatggaaactgcctttgcacacagcctggtatatcctgatgtctgctgatactcttatttttatgttccttgacattccaaatctgccccagggagaattccaggacagctctggagaggaagtgatctttgaatccaaccttgaaatcaccctaggagatgcaaagaaggtgacaccagttaagaataagatgtgtacccattttcaaatgttcttttttttttttttcagatggagtctcgctctgatgcctaggctggagtgcagtggggtgatctcggctaattgcaacctccgcctcccgggataaagcgattctcctgcctcagcctcccgagtagctgggattacaggcgcctgccaccatgcccagctaatttttgtgtttttagtagagatgggatttcaccatgttggccagactggtcttgaactcctgacctcaagaatccacctgccttggcctcccaaagtgctgagattacaggcatgaggcactgcacctggcccaaatcttctcagttctaaatggctgtgataaaaactacattgacaatttttttttttttttttttttggagatggagtctcgctctggtgcccaggctgaagtgcaatggcgcaatcttggctcactgcaagctccgcctcctgggttcacgccattctcctgcctcagcctcccgagtagatggggctacaggcgcctgccaccacccccggctaattttttttgtatttttagtagagacggggtttcaccatgttagccaggatggtcttgatctcctgacctcgtgatccgcccacctcagcctcccaaagtgctgggattacaggcctctgcgcctggccttgcatkgacaattaatttgtttatggaaagccagttatccaatgatggtgaacaaatgcaacttgactgtataatacttattttggttttggaccaaagtcaccattaaatatgccaagttcttgttcaaggaaacagctaatgtcgtggacttgcatctcatttgtagttggttctccctgaaaagtcagtggtgtgggagaaatgatacttagtcaaaatcatcagtgaaaatcattgcttggatcatcccaaaatataatgaacaaaagtgatatttatctgccacattgagaaacattcaccatatctcaataagctctcctcagccagttggtccttttgtggttgaaaaaagtgccatatctttggttgggcatccaataaaatayggtatttaggggctacctgtatggaaaatccatatccttaaaggttagctcaccaggaggatgttgagaaatggcacagggggctgggcgcggtggctcatgcctgtaatcccagcattttggggaggctgaggtgggtggatcacttgaggtcacgagttcgagaccagcctggccaacatggtgaaagcccatgtctactaaaaatataaaaattagccaggtgtggtggtgggcgcctgtaatcccagctactagggaggctgggcaggagaactgctggaacscaggaggcggaggttgcagtgagctgagattgcaccactgcattccagcctgggtgacaggcaagactctgtctccaaaaaaaaaaaaaaaaaaaggcacacaggaattgggttgggactcagtagatcagtagatttagatctcccagcttagtctcatctccatagtgtgggtggagtagtactcacactatttaaattatttttatttcactacctgaatcccctcagcaagtatagtttaattcacctgagtaatacgcttatgcgaggggatttctccatgggccttttgtttttgctcctgctggtgatctgattttaaatgtgaacgtgccattgctaagagtttttgttctatgtattattctgtgtggaaaatttcttaaatgggattattgaagtatacttcattatttatcttctggcaatttatcaacaacagcaaatatcattcattattgtttggaggacagaactatttttatattctttaattaaaaatggctttgacattttcaaattcagagggaagttgataatttagtgctgtatgataggacctttagttggtctgaatgtcacataattgtacaaattgctgttaaagtatattattacttattttctgagaggtagagggacttggttatcctgggattgcataattattggttcactagaactacagatgagtgaaaagaagggttagatactctctagttcacttttcttccagtgcagggaacattctatggggttccgaacagatataataagctcataataacagtggccattgattgaactctttctatcaaacaatgtgaaaaacattagtagaggtgatatcttagtctgcttttgctgctgtaacagaatacctgagactgagtaattttttttttttgagatggagtctcactcttctgcccaggctggagtgcagtggcgctatcttggctcactgcaccctccgcctcccgggttcacgccattctcctgtgtcagcctcccgagtagctgggactacaggctcctgccaccacgcccggctaattttttgtatttttagtagagacggggtttcaccgtgttagccaggatggtctcgacctcgtgatcctcccgcctcggcctcccaaagtgctgggattacaggtgtgagccaccgcacccagcctttttttttttttttttttttgagatggagtctcgctctgttgtgcaggctggagtgcagtggcgccatcttggctcactgcaacctccacctcccgggttcaagcaattctcctgcctcagcctctccagtagctgggactacagatgcatcacgcccagctaatttttgtattttcagtagagacggggtttcaccatgttgtccaggatggtctcgatctcttgacctcatgatctacctgcctcagcctcccaaagtgctgggattacaggtgtgagctaccaygcctggccattttttttttttttttttttttgagacagagtctcactctgtcacccaggctggagtgcagtggcatgatcttggctcactgcaacctccgtctcccgggttcaagcggttcttctgcttcagccttttgagtacttgggattacaggcacctgccatcatgcctggctaatttttgtatttttgtacagacggggtttcaccatgttggccaggctggtcttgagctcctgacctcaggtgatccactcacctcatcctcccaaactgctgggattacaggtgtaagccactgtgcccagccccaagactgagtaaggggtgagcagaaattcactggttcacagttctggaggctgggaagtctcgtatcaaggtgccagcatctggccagggccttcttgctgtgctatcccatggcagaagtacagaagggcaaagaaagagggctgaacttgcccttttataatggcaccaaccccacccatgagggtggagtcctaatggcctaatcagctctctgagatcccatctgttaatactgttacaatggcaaytaaatttcaacatgagttttggaggggacagacattcaaaccatggcaggtggcaagaagtatcaaactactagatccttgggattgtgctttgtactggggtgtattttttccaacaatcctaaaaatcatttgaatagagatagcaatatatatcttacccatttggaaatgcacagagattcaggagtgttcacatagaaacagaagatcattggcttttgtccattcccaacgccagtgatctgtttttcttgactctttttgatctgtgtttctgaatgtgttgatatactgcgctactggtgtgcaggatgattttaaatgttgcacagatgaacattaatagtcatctattttaatatgtattaggaaaaagcccataaaacaatgaagcccattaaaaccccatggtttcttggatagtattacatagggtgaagctaattttatttcagtaaaaaatatgcaggtcaatttaaataaaaaaatagataatagtataaatgkcttgtggctacagtaaaaatgatgatggtacttgaatgtccaaattaatttaagtgatatatgtgttcatagataccatttcattttaacgtggttctgctggtcagaacagtcttacgatgggggtggtctccaggcttcaccttgtgcccactggctctgtttggttcctctgggctcacacacagggagctacgtatgtctctctcatttcctttggtatgttctctgggttaaatgtccccagctrtctgatctgttccctgcgggccttggccattcctgtcctggcctttactggcagtctctattctaaaatgtgggcatcccacatgaggtccagcttctcctgagatcccyggaggtgcagctgctgtgatggtgaccttgtttagcagatgctccctgcagtccaaactcccacccatcgtcctgccctttgatccatttcccatgaactgcttacctcagttttctcatctgtaagatggagagataactgtaagtgcttagcacagtgtttactagcacagactactgctattactgtcaagtcacttttcctttgctgccaataggtcattttctgtttatggcttcttcagtatgaactgatcaactgtaacttgaaaatttccagacttaggacttttggactcatagtgaaaggatcctttcccaattcccttgatcggtttttcctttaaaaaaaaaaaagatatttgacatcttttcactttcaagttcagtttctcttctcctttttttctgggtgatggtttattatttaaaaaatttctatgtatatgtgatttaaaagtaaacccacgtagctgaaaatgtctcataggtttttcttgcattttcagttgacccattcactttgcaaatctttagagtattatatttaagacagcttgcagctgttttcttatatatattttacatgacaaaattatatttaaaacatattaaactttaaaaaaccatagtttataatttataagccatgtagcatatttctrtttttgagacaggatcttactctgtcacccaggctggagtgcagtggctcgatcatggctcactgcagccttgacctcctgggctcaagtaatcctcctgcctcagcctcccaagtagttgggactacaggcacatgccaccatgcccagctaatttttatattttttgtagagatggggtttcaccacgttgctcaggctgtaatttttaaaaactaaaaaaagaaaaaaaagtgtttacaggactttaaattgagaaacttaaatatctttacatattctgtgttcctaatttatttttgcagcagtaattatttcagctgtctttagtattgacatgttggaacctcggattaatttgtgcatggatatatttagagccttttacttgacaagaatcatgtatatcatgactgaatttgtaatttcccagcatgagacccaaattaatagacagtatttagattctaggcaacgatgcattatataaaccagcatcatttagggagtggcaaagactctctccccaccagttctgtgaacttgggcaaggtgtgtaatctttctgagccttaatctaattagaccctttctcctgtaacccagagggggtgttagtaaagttggtgtgaaaaaagtcaattattgtactgatgcaatttgggtgaaactgtgaagttcagtgttcacatgatggttgtggagacactgaaccttaatccttaggccagggattcaaagttttttttgactctcatgttgaacgttgtctaaagtgcagtgtgccctagtttttaggtaattctgagaattctaaggcccttgctggaataattaatgagaatatgagatttcagcaaattagggccaggagtcagtgctctcagcatggaagaatctcacctccaaaaattttatgtgggttttacacattaagcaagcataggtgaggtgcagtgaaggggaagtgatggctgtcagtcgtttggccaggttcctttgcatacaggggagctagtgggtgtataccagctgagacagctgaaggaggagaacatgaagaatagttggaaactattgaacctccaagatttttctgtctttgttaacaactagcagttacatgctagcattatttatttatttatttagttagttagttagttcttgagatggagtctcactctgtcacccacgctggagtgcagtggcatgatctcagctcactrcaacctctgcctcctgggttcaggtgattttcctgcctcagcctcctgagtagctgggattacaggggcccgctaccacgcccagctaatttttgtattttgagcatgttggccaggctggtcttgaactcctgaccttgtgatccccctgcctcggcctcccaragtgctgggattacaggtgtgagccactgtgcctggccttatttatttatttttgagacagggtctcactctatcacccaggctggagtgcagtggtgcagtcatagctcactgcagcttggaactcttgggctgaagtgattcttcttccttagcctccccagtagctaggactatagtgccaccatgcctggctaatttaaattttttttktgtgtgtgtgtgtggtggagatgggttctcactgtgttgctcaggctggtcttgaactcttgggcttaagcgatcttcccatcttggcctcccagagtgctgcgattacaggcgtgggccaccacacctgtcctgtgctaggctcttaacgtccttcccagatgttatgtcccttcccttggtggctgctgctttctgccacattttaccttgccgttccgcaccttctaccatgtctccttttccagcctcattccctgagatgtagccggagttccagttcagccaacctgcccgttgttttctctcctggarctgggtgtttgagyctcctgcatggagtgttcttccttcccagctaaagtcctggtcatcccatttccatctgaaaggcccccttgttcatgaagcctctcatggtccttccccctaccccagccaggtatactttctctcctcttggaattaycctataggaagaacatggtggcttgacctgggttccagtctcacccatctgtttacctggggagtgatcttgagtgggtcaatttatgttctcagtgccttacaaaatggggcagaggatacctaacccccaggagctggtgtggctggggtaccttacacagggcctgactgtagtagcttctctccaagcattggtgtcttacctcttctgtttctctaatggtgttttgcacattcattgttgtattagagtttgtttttttgtcttaccttgttttaataaattataatcttatgggagatgacactgtcttttctttgtttcrtatataaaaagtgttttgctgatatacgtagaatcaagttggtctggagttactctggataagggatgaaatcagggagctcttgtgttcaaaggggccttcttcccttttttggttctttctcctcattttttagcttccatttttacttcctttagtattgagaaagtaccaggctcacttcaaagagttgacttcaaagctcccaccagctcagamatacttgcsactgaagcctgtaggaattggcatcaatggaagaccctgtggcggttgcatttaagattttttttgggacttctatttttataattcttttaaatggtaaaggrggagggttacaaaatatctgcgcctttaagatatcaaacataagccagtgaagttccaaaaaaaaaaaaaaagatgtcttagagaaatgaaaaggattttacaattggtagaaaagaacaactcttttttctttttctttttctttttttgtttttgagatggagtttcgctcttgttgtacaggctggagtgcaatggcgccatctcagctcacygcaacctccacctccccagttcaagtgattctcctgcctcagcctcccgagtagctgggattacaggcacgggccactatgcccggctaattttgtattttagtagagacggggtttctccatgttggtcaggctggtcttgaactcccgacctcaggtgatccacctggcttggcctcccaaagtggtaggattataggcatgaaccactgtgcctggccaagtcttttttctttaaaaaaaaaaaggttacttttactgttttgtcctagttacaagatcttaggacagaaataaagccttaacttgtatgtaacattttccaagatggctaagtggagttgcaggttacatagcagaaaacagaggcttgggcctgttgagacctcacacccagttcttcttggagctgtgggtgtgggctgaaagagaagacagggagattaaagaccagtgatttccctccatggaccctttgatgctcttgtttgttgactttttgaggcttggagtgaccgactcttccaggaatgagaaatggaatccctcccagttttgatggtcgtcccaggacatatttcctgaaggcctactctgtgtctcagcaccattccaggactccccccgacagccttacggagcgtgctacagtcttcctgatccaatatcctgccacctgcccactcattcaccctcggccctaccccatgcctttgcacgaatctttccagcctgagcagcctgagatgggtctttttccctgctccgaaatcctgacctcataatggctcatgaatccctattcaaccttcaagacctggttcaagggttaaatcctttaaggagacttctcctgatttttccccagctggttgctttgttctccagcgatttgtaaccttgtgaacaaatattctactcattttattctactggaatgatctatttacacttatctccctgcaaattgtatcctgcccttcaatggctaagtgaatggcataaacagatgctataggaattgagactaagttggagctgggtgatcagggaaggttttaaggaagagatctgggacaaatagctaaagatggattcagtgttttttttttctttttctttttttttttttgaggcggagtcttgctctgtttcccaggctggagtgcaatggtgcgatctyggctcactgcaacctctgccgcccagattcaagcaattttcctgcctcagcctcccaggtagctgggatgacaggagcccaccaccacgcttggctaattttgtgtttttagtagagacaggttttcaccatgttggccaggctggtcttgaactcctgacctcaggtgatccacccaccatggcctcccaaagggctgagattacaggcatgagccaccgtgcccggcctgatggattcagtttatgtgcaaaatttaagaggatgggtttcggcagttcaggttgttaggagacaagggtggaaaggtgtcctggagccctacagagatgggcttcaagtgccagccaaggtgtttgaccatttttagaagaggaatgagatgattaaagtggaacttttaggaagagtaggagtgagcgggatggatttaaaaggcggagtgagaggcatcaggaaggctgggtaggagagcattgctacagtctaggagggaggtggcaggggtgtagaccagggatcacaaagcaatggcttgccatctgcttctgtatacccagagagctaagaatggtttgtaccttattaaatggttgaaaaaatcaaaagaatatatgctgtgatatgtggaaattctgtgaaattcaaatgtcagtgtctgtaaatagttttttttttttttttttttttttgtggaacacagccatacttttcatttatgcattgtttgtggttgctttcacacaatcatgccagccctgagtagttgctgcagagaccatatggcctgcaaagactaaaatatgtacttatgtactatctggctctttccagaaaaaatcagcagaccccaggtgtagaccaaccagggtgaatgagtgtatgactggaaatgcaaagacgggcaggatcaagggacagtttagagcaggggtgtccaatcttttggtttccytgggccacactggaagaagaattgtcttgggccccacataaaatacaccaacactaacaatagctgatgagctaaaaaaaaaaaaatcacaaaaaatctcaaaatgttttaagaaagtttatgaatttgtgttggtctgcattcaaagccatggtgggctgcatgcgggccatgggttggccaagcttggtttagaggcggaygcagtacgggagagttttcccttctcttctgatgtaactccatgtcttggtggcggtgttctagatgtaggcatctttaggcaggggagtgtgcgtggaagggtgaaagggttgtgccttcatgacgctcgtgtgtgtgtgtgtgtttgtgtgtgtgagtgatgctgagctagtcttagagtaaatgcagacactggatggtagcgagttcagtgcagtttttatggagggacagcttgctgcctgctgatgaagccggacaagactgggtagtgaagtcaaaggcccacacctaactctgaggctcttgggggcaactgtgttgtgcagagaaggtaggagggcagaggaagaggaggagcggcccctgggagaatgccttctacccagctgcagcttctcaagggtgtgtttgcgtctgacctaaggtgttggagctctttgtttctggctgtgttcaggctttcccccgcttgcctttaggggaagctgatgactgctttagcgtaaagagagggccaggaggtcaacttccctacagtcccgtgcctgcttctgggttggggctggggagagtgctgcccactgaactctctaaatgttaaaagatacaaagaggaagcacagagtgaaaagggagaccccagaggacagcagaacatcccgaagcatatcccccatcagagaagaggcatgattttcacctggcttgcaggtgcaggatgggcatctcagatgctgtgagtctgagggcagatgcccatcagtccaggacagttcctggggacaaaagcctcttctcacctttagagaaattaagtcwtattggtagaaaatattttagagaggttctggtctaagcctctcattttgcagatgagaaaccacccaaggcccaagatggatggatttatcaaagccggttggtrctggaacttggatttaatttcaggtcttttattattactatggaacaaatcttaactttttcaagtgcataccatgtgcccggctatgtgctggatgtagatgctttatctgcaggtttaatcttcactacaactatgggaagtagctattgtctctcttttgcaagtgtgaagagtgaggcttagaaaggccaacttgcctgtgatcgggtaactcaagagggaaattggatcagagtccatctgagactgactccagagccaatgttcttagccaataggggcacataaaactgttctgagtggcttcctagctcctgtttccagtgtccaatccattctcggtttctgttcattcatcagatgtgcactgagtacctgcaagaagtcagaagggtgttgggttggtgaggacagattgtataccatcttggctttggccgagccaaacagaatgccaaagatcggcaaagatagggaatgattgttcttggcctcagctccacgctcccctcctctgtaaaactgcccctgacaccccggcaggattgaattcctccacctttaagctcccagagtacctcagctctgtctttagcacttcacactgtgtcatgcctccccttgggccctaaggccaagagcatgtgccatttatttttgtattcctacttctatagcccagtgcatattgggggcactcaggaattgttgagcgaataaaagaatgaatgaatacagacccagattgtcaatgattctcaaaccttattttacaaaagaatcacttgaaaagctggttaaagatcaaaactcctgagccctactcctggtgattgactcctaggtttggggtgggaccccagaatctgaatttcccggaagcgcccaggtgtttctgatgcgggtggtctgcaaaccacacttgcagcaaccctggcacaggtgcccagccttctggaataaagacaggaactaagcattaaaaatagcacgccattcatttgcttgtgccgagccgccaagtgccccctcctgctggcgacaggtccggatgtgggccagttctcagcccagggaaaatgaacagtgtcttctccrtggtgcccagaacagtctgagtcagtggaatgtgctggccagtcaggcagaagggaacttccacttcttttttaaaaccttggtggaaactgtgctggcaaggcaaacagggaggagaggaagctccatgtggggcttgggcttggcggacgacttggggctggccggactttgggtggccgccgaggaccattgctaaatatgcccctttcgtcctgaaatagtcacttccccggctggcttttgtgttggtcggtcgccacaaatgtgtggctgttgttcaaggaggcctcctgggatataaaaagagagaatggggccaggctgcggccagggctgtgtaggaagacaggagagctgccttttctcctgtcccaccacggactcattgtaagattcagagggagtggcttctgggccctgggtttacttttccatctgtaaaatgggtggggggaaggggcagcatcataaagcttctttcttctcctgaaagggatgttttaaggcccatgtcaagattgaacacagggctctgttgttgggctgatgctactgatgaagtctcaggaagctcgaagtttgtagttaactctttcagggtagatgtggtgaatagtctcttggtattgtgttgatggtggcccactagaacagaaggtcccagagggcaagggcttggtctttcttcttcctctctgtatccccactgtttagaactgggctgggtgcagagtagtctccataaatgtttatggggccaatatctccaaatattggcacctactaagcgtcagtcccatctctcttttgtcttcttcacaggtttaacttgctgtttgagaagaggcgatatgaggagcagggcatttttggaggaagaaactttacctctgttttcaacgtttcatccagtttctcttctttttacttatttggagacatggtcttactttgttgtccaggctggaggctgaagtgcagtggcacaattatagctcactgcagcctcaaaacacctggcctcaagtgatcctcctgctttagcctcctgagtagctgggaccacaggcttacaccaccatacctggcaaattttttttttttttttttttggagaggcagagtcttgctccgttgtccaggctggagtgcagtggtgtagtcatggctcgctgcagcctctgtctcctgggcttaagccattctcctgcctcaccctttgagcctccttaattttttatttatttattttttttttgtagagacagggtctcattatgttgtccagcctgatatkgctatttttttttttttaatggcgatgtagtaatcttgctttgttgcccaggctgttctggaactcctggcttcaggtgtgtgccactgtgcctggcccagttgctctttacatggtggaatatcagaggttaaagacttggtaaaaattcatgcggtgcaataaaccatgtattacataataggggtgacacttgttaacttctcccaggctcagtttcctcatgtgtaaaataggtgaatagtatctaccctccaggagttgtacaaggctcatgtatacatagtgtatgtgaatgtgctgtatgggtgcaaggggttgcagaagtgataatgtgtgtaaacagatggtgtggttggctcattggaggggtggaggccctaagtgggatgacctctgaggtttactcttcctagagtagttggaaagcaattcagcctcagtggtaagctctcagctcttctagggcaggtccctcttccaccaccctgtgtctgcaagcattttggtattaagttgtttttctaaggctgggtgcggtggctcacgcctgtaatcccagcacttttggaggccgaggtgggtggatcacctgagatcaggagttcgagaccagcctgaccaacatggtgaaaccatatctctactaaaaataaaaaattagctgagcgtggtggtgtgcgcctgtaatcccagccagctacttgggaggctgaggctggagaatcgcttgaacccgggaggcgaaggttgcagtgagctgacatcatgtcattgcactccagcctgggcaacaagagtgaaactctgtctcaaataaaaaatattatttttctaaaaagctcttattttattgtgaaacacttaaattagcaaatctcaggcttgctgaataaggcttcccaggcaaaccacatcccacatgtgcaaatgtctggtgacacagtgcttcatttttttccactagtacttactactacctgacattatagtgtaagtttacttgtctatttgtgtatggtctgcctctcctatgagaatgtgagctgcatgaggtcaggacattgttttgttcactcatgaattcccagcacccaggacagtgtctggcatgtagtgagtacccagtaaatatttgtggaatgaatgaatgaatacttaagtgggtgggaagttcttggaccttagtctagacccatggttctcaaagagtggtcctgggactcttggggattcctgagatccttttagggatctgtgaggtctgtgaggtcaaagtatttttataataatagtaaactatttgtcctttcactctcattccctcatgtatgcaaatctcagtgaactgatattttccaaataaccaatgcataaggccacaaagccatgcagggtaaaaagagctatgaacaaaagttttctagagaagaatttggaggaaagagagtttattctagtgaacagatcgcaaactgggagatgctgcgttggtgtaaaatgaaggtgcattccagagagcaaagagagaatctagttttttgttgttgttgttgttttgttttttaaattttgagatggagtcttgctctgtttcccaggctggagtgcagtggagtggcgtgatcttggcttattgcaacctctgcctccgggttcaagcgattctcctgcttcagcatcccgagtagctgggactacaggcacttgccaccacgcccacacaccctactaatttttgtatttttagcagagacggggttttaccatgctggccaggcttgtctcgaactcctgacctcaagtgatctacccgcctcagcctcccaaagtgctgggattacaggcatggcagaatctaggtttttatagcaaaatttctggcccatgtccccaatcaggtttgattatgcaaatgaagggggcgggtcaaacttgcttagttctgattggctgacacagctgagttctgattggtgatacagctgagccctgattggttgatacagctgagctctgattggctgaagcagacgagctctgactgcttggttcatgtgagctctgaaagtcccaagtcaaaagggtgtggggttttgggaaactcggagtacgtagtgtgacctctagtcagcaaatggccacttggctgtattttaaatttaggtacactttgctgcttggggtccatcttgaggggattgcctttttyaggttcatgtttgttcacagagccattcaaagtgcagtggatacattataaattgtacaattatttgtaattaaaaaaagaacaacagcaaaaaacccaaagtgcartggatgcaaagaccaatggattttcatgtaacagaatatgaaaagttcaccgacacagtttcacattccacgatgcagagaagtttttaataactgccatccacatgttgagttttggtgtaacagcaaagaaaaatatccacaactactgaaaaggctgagaaaatactccctttctcaactgcatgtttttgtgtgagtccagaatttctttacattattgtaacagagtgaacgcagaagcaaatatgagaatccagctgtttcttactaagcagacattaaagagatttgcaaatatctaaaataatgctatctctctcacttttttttttttgtattggaaacatcattttccatacaatgtcatttatgttaacaggtgacagatttatttatttttattttttatttttttgaaacggagtttcactgtgtcacccagccacccaggctggagtgcaatggtacaatcttggctcactgcaamctccgcctcccgggttcaaaggattctcctgcctcagcctcctgagtagctgggattacaggcacccgccaccacacttggctaatttttgtatttttagtagagacggggtttcaccatgttggccaggctggtctcgaactcctgacctcaggtgatccacccgtctcagcctcccaaagtgctgggattgcgggctgggattgcgggcatgagccaccatgcycaacaacagatttattataagcaaaagctctttggggtcctcaataattttaagagcataaaggagaccaaaaagtttaagatgtgctggtcaagacagagccctgtggactatggaagggattgaagccattctgtggatcctataggcttcttttctaagcgaatgattagtgtttattcagtarccctatgtcaggtggtttctgtatgaatgagaggtttgcctttccagctgcggcggggctttgggcaagttgctgtctctgtgctccttcgtttgctcatgtgttaaaaactggcccaggggtctgggggtggggtggtaagaaaatgggttgagtctccttcatctctaacattttcatgtttaattcttggaacctccacttgttagctctgttcactcctctgaaagagattggtgagaattgaaacagtgaaagaagattttagagaaaaggtgacatgtaaagctgaacaagggttgcctgtgaggcaggcaaaaaggacatttattatatttaaaaaaaattttttttttgagacggagtctctgtcgcccaggctggagtgcagtggcatgatctcggctcattgcaacctctgcctcccggttcagcgattctcctgcctcagcttcccgagtagctgggattataggcacacaccaccatgcctggttgatttttgtagttttagtagagacggggtttcaccatgttgaccaggctggtctggaactcctggcctcaggtgatccactcgcttcggcctcccaaagtgttgggattacaggcgtgagccaccgtgcccagcccagaaaggacatttatatgtggggaccactgcatcttgcagatgggtaaactgaggtagcgacaggtgaaggctcagttacattcatcctgggtcccagactgtctccaacctgtagcctgaagctttgtttccttcctccctagcccaggatgacagcagtgaccttccatgggatcttttcctgggatttattgagccactgaggtcattggcctcaggccacctgcgtctctcgactgaccagttattcttcaaggaagacactgtgtgtgtgtgtgttttagttgctcttctataacttccgggtgctcttctcagagcagcagtgctttaaaaaatgtctgtgtgtgtatttccccactttgagccatgaaatatgttcagtctgttttttttctagtccaaagtatttccatatcattgtgcacctgaggaaatgcatactttgatagaaaatggacaaaaaagttgtattggtagaattaaatgaactaatgcatgtcaagcactgagcactttgactcaatagtamtaataataataataacacaatgtatcattatgatagtgttatatctctttagcaatcttgatagttgacttgtataattcacagtacagaagcttattctaaaactaaaatgctttggttctcctgtgtgccaggaacagcagtaaactttatgtcctaagattagtatggttggaaatgcatgtggcagtggttcccaaacactggtgtgyagatggaacacagcccgtgaagttttcagcggtccttgttaaaaagagataaaggaaagagataaaggataaagtgctgagattctcgtgaagctaaatgaagctaaataaacatccttcaatgagaatatgtccttcctatagtttttggaggaaaatatttccttttgtgagacaaaagtgttagtaggtggtaagtactttttatttagcatagtacaaagttgtggccctctgtcaacccttcacattttggtgtgtgtaatgtttgaaactgcattggtctgtaaaatcccaaacccaggtagataaaaccaagaagtgacagggctggaagggatcttaggaattagttcataaagaacttcaggctcagagaagrcatgtgagttgcctaaggtcacacagcaaatctgaagcaaatcagggctagaaacccatagacgatggtcatgagcactggttttgagtcatccatttgaacacacctgtgttcagattctacctctgttacttatgagctgatttcttacctgtgaaagtgggatacctacccaaggggttcacgggaggatttaataagatgatttggattaggaaaaactgacaaatttccccttccttcttctccctgccttcccctcacctgttaataaatagatccttgtgaaaggtcagtgagcagcatcagccagaagggctttgttttcagcaaggtccctgcatgtatgattacaatcctaagtaatatcagctgttgcttgcgttggtttctcagctctctcttggtgatctctctctttagctgttgaatgagttcaaagatctgggaagagctttgaaacccctctagcagcatttctgtctccagtcccagcacaggtctttggaggatgagataaaaagggttttgcccagggtcaaatgctgtgtacacgcttggtcactcttccctttcttgagatgacatgtccccttcttggagacccaagatgattgacaacaataacattcctttacaacrttttcttctcatctagagcactgggaggctgccttttaacagagatatcacagagtagcaagcatgcagacattctcatgacatcctggcagatatcaagaccaaagaacatcccatgttccctcttgaaggcttgtaataactgccataaattrtcttgtgggaatggagtggccctggcctaagctgtgctgtaccggactctcctggtgacagttttagtggctgcatatgtttgcagaagaaggaagcgtggtaacttggcaaacagctccaaacgctcctggcttgctgccacaggattgtccttgagacttgggcacagtgatgtgtgaaaaatgcccacctttgctcttggtgtccagtgggccttctatgggccctctatagaggtcatcacctggggattcctgactctggccaggtcctgaggtctttccatgttactctccatgttacttgagtaacataagagcttcttatggctcttatgttctgcaggacggatgaactaggtacccaggacaggtctgtttgtgcacaaggctgtctccttctccccctccttggtttytctactgaggctttgttgtgcttggctcagggtgatgttagcaaatgcactctccaccctgctgtgccacattaaggaaacgcatgttgtattggcttctgccaagtcagctcacatgctttgttttagtgactctgtgaagagctcatcatctattatttattcaggtaacacacttctatctcctaatttcggtgctactcccatttttcatccccggttagcgtgctgtgcggccaggagggctgcctgttgtctttaagaaccactttgaacatttttgctttggttatttattcataccaacatgttgttgttaaatgacgtgaaataaaaccccattttaaaaagaaattgtaaaaggaagctatgtcctgtgtggaaatcatgacaagcccagaaacatgttacaaaaacattaaccaggagcggtggctcacgcctataatcccagaactttgggaggccaaggtgggcagatcacttgagaccaagagtttgagactagcccggggaacatggtgaagcccatctcaactaaaaatacgaaaactatccaggcataatggtgcaggcctgtgattccagctactcaggaggctgaggcaggaaaattgcttgaacccgggaggcagaggttacagtgagccgatattgtgccactgtactctagcctgggcaacggagcgagactccatctcaaaaaaaaaaaaaaaacaaaaaaaccccacacacaacaaaaaataaatattgcctgtacctatcacctgaggagcccattgttaatggttgtgtgtctttttagtcttttaaaaaatgtgttaaaaaatgtagttgtcataatgtccgtatataaatttttaagtggagttgatagatttcatttgaagggctgctgtgtcataaatgtaaaatgcttagcaaggtgcttggcacctggagctgttcacagtaaatggaaggaatttttatggagggtgtaaggtagagtgggctcctgagccagactgccctgttccaggcctggctctgctatatctggctgctagagcctcgagccagccattgaagtgcagtgccttcatttccccacctgtaaaatgggggtaattatcatataccccaaagtgctgtcataaggatttaatgaaatatcccatgtaagatccttagagcactgctgccggatggtcatctcatagtaggtattggttgttattattcaggaaaatgttggaaaacacatttttaaacaaagctggtgttcagtcccctccctccccccaaccaaggaaactctctttaattcccagtctgctgtgattcagtgctggcctgggagcagccctcgagggcagacacagcacttgtcccctacccagcacagcacctgcctgtgcatccttagctgatgaatgaggctcacagccccaggcgccctgcatccttcccttctttctggtaccctcttttgtctcctccaaacacttgctactcaggcttcagggaggaagtaggaagtaggaggtggtttctccctcccagacccccagctcacactggtcttgaagggcgtggcatctgacagagcccggtggctggttttcacgtgtctcctgaagccacccctaaggagaaggcttcgatgtcatcttctggtcagagccgagcacagtggtcctcttcagagacagatccrtgcagcaggatggcacctctgttgtcctcccagactagcagtaggtacacgtgggcttcgcaggctgttttctgccctggaatgctgctgttttttagacccagcatacctcagtgtcagagaaggctggtttgtttgaaacggtcagaatgtcataaataccttatgat[450 bp omitted]cgaggaggaaggcggggcaatgttaggagcctctgtgccttggagctgcaggcgagttgtctggtcttgggtgattcccttcctatgtttgcatctcaattttccctcttgtaaaatggagctgagagcatcccttatatcacaggaatgtcattaggattacttaaggtgttggaatgtttcctggcctaggggaagagctcagtagaagcttgctattgccctaatatcattactatcccagatatgcattttcttgttatttccctgttaggcgttaagtgtgtgaaagtgtgtgtgtatatttaaaaggtcaaagtaaaattctttagaaccttagggcaggatagctcttgtttagttaggggtgtttggtgactgctggagaagtcacctacccagctgatcttacaattactgtctgcttaaaggcagctcttgacttggccttctctaggggaaaaacatgtagtttatgcaacttttcttttccctttctgctctggatttgaccttttgttccttcaggtgattgaaaaaattcgraaagtcacctgtttcctcagaattgctttaagacaagactaagtgaaccaacaagaatgaagtcagctttttggaaatacctcccaagaggccttgctctttatgcaggactgttatttcaaaggatggtgtcccctccccaaccataagaacgatccaaacctgttttctggggcccagagtttgctgaggataggmctgggctgaagctttcattgctggtctgtggggtagaggtaagcctcccctgtgaagctggtaggttacatgctttggcaacatgaattgttatttctggagtcccctgggtgctgtttagaaatgcaggtaggtggctgggtgcggtggctcatgcctgtaatcccagcattttgggaggccaaggcaggcagattacttgagctcaggagttcgagaccagcctgggcaatatagtgaaaccccaactctacaaaaatacaaaaattagccagggatggtggtgcatgcctgtaatcccagctactcagtaggctgaggcaaaagaattgcttgaacctgggaggcgggggttgcagtgagccgacatcgcgccactgcactccagcctgggccacagagcaagatttcatctcaaaaaaaaaaaaaaaaaaaaaaagaaaaagaawaaaagaaatgcaggtaggtgcttctagctactgctgtgggatagcaaggtagttaccaaactgataagggtagcatcttacttactgctgaaaaattcagtgtcttttttctttttttttgagacagagtcttgctctgttgcccaggctggagtgcagtggcgagatcttggctcactgcaacttctgcctcttgggctcaagatattctcttgcttcagcctcccaaggagctgggattataggcactcgctaccacacccggctaatttttgtatttttagtagagacagggtttcaccatgttggctaggctggtctcaaactcctgacctcaggtgatccacccacctcagcctcccaaagtgctgggattacaggcgtgaactactgcgccgggcttgagtttgactttttgaaaatattccacctataagtgaagttgtgcagtgtttgtctttatgtgtttagcatatttcactcagcataatgtcctccaggctctgatgggcacttggcttgtttccatgtcttggctattgtgaatagtgccgcaatgaacatgggcaaattgccgtgttgagttaaggaagctcttttccagtctgagtttgcaaatagcttttcatatatgagcgttgaatattatcaaatgcttttctgcattcactgagatgactttatgtatttaaaaaaatctgatggcctatattttctatttctaaactactcgtgtattcctggtataaatcaactcagtgtgttactctcgtttttatacatagctggattcgttttcactaatattttgtttgagatttttgcctcagtgatcatgtatgtgattgctctgtaacttttcattcacattttgtccttgtctgtcctggtatcaaagttatattggcttcatagaatgagggaaatgtttatccttctaaaaatatttagtagagtggtctaagatgagagtgtaagtgagtaaactttctcaatcaaatattttgtgatatgtttcaggaatttcattacatgtttggttcaatttttaaagcatttctttttattatttaaaacttttagcattggtgaccatccatgtgctgcttttattgccagcttaacttgtttttatgacatcttcaggaagaaaacctctgctgtctatttaatggagatgaattgttaaacttttaccatttgcaactayacgtctctatgagtcagacttttattgatcgtgtacaactaaatgaaacccggaaatgaaggaaatgtaacaagcgattttatgtattttttgtttgctcaaattgcctttataaaatagattgatactctataataagcaaatgttgtgaatttggaattttcaaattgaggcttactaataatgttawctattttatccgagtttatttgggtttcttataaaatgtaatttctcaagaagattttgctgccctaaaaaaaaaaaaaagaaaaagaaaaagacaaaaagggaagccactggttgctaatggctcctgcggctctgacgatcctcgatgaagtgttctttgattaagtgtcaagatgagtggtgcagacctttgacagacacatgattgtggttggagaaagcccagcattaactgctgaccttgccatctgtgagcaggtgttgaatgagctcagttccctcccagcccttctttttccctggtgggtcattggctcctgagtargatagatgcatgcaatagaagagctgttaatagcatttactctttcttaatccttattaatcccattcatatttcagtgtctgaaacttggcaggatgtcaagaagccacagtgcaagtagggaaattgaacagcaaggaccaagtacaatgttcccctgatatttaatttgctaaaacatgtaagaagaagaaagttcttacattgttaggtcccaaagagagtgccacyaagcaaccttgccaaaaccaccttgctggagcttcttattatctttttttagcgaatggcaataaagtcattttgtcaagctaaccaagtaccataatgagatctttgtggcataaattaaccgagtggggaaataactttgacaggggttgatgtccgaaatgaagtgttgtttgtctgatgtcaagcctgtggggaatttgaaccttgcactctttcctgataagacattaacctctgcatgggcttgctggcccaaccttttgattaactggacctattttcttgtagatctaatacaaggatttggagaaccccagtaaaatgctggagggacttagactctgatctctattgggatgtgtcaaattggagatttggtgggcttttctgccgtgtttactgcgatgggtgtgtgtatttgaagtctgtatgtggcctttaaggatgtgtttggggcgcagaagttctgggtaacagagaggctctcaaacgttagattttggattagactttgggtcaacttcagggtagcaagaggatggatacccgagaacatgttttctccgacttcctggcccctgtcttctaagttctgggtagtgatgggtctttggaggggcagccctttctgccatgtgaatctttgcccagccctgagggggtgagggctggccaagggagccgggccatggtcggagagaaggctgaggctccttgagaagcatttggagtttgagtcagttgtgtcttttaaaaaaattacccattttggacttgcctgtggaagcaattagagagatcacaggaccgtttctgattcccaattctgtccagtgtctattcagaaaaatagaaaacagtcaactggaacaggggattatttgagcacacacagagtcctgttgtctcagcagcgtgccctcagacaatttgccttttagtgaagtttaagcccatgaaaggaaataaaaagtgttttattagatggcaaagaaagatggactggacttatgagactttgagaatttttgctttttctttgttaatgcaaactttggaagagagcaactctttctgtaatgcaatttatttgtacaatgtggtagttattgttaatagctaataatgatcttcaactgggtaaaataccattgtgtgtttgagagggagagagagagagaagggtaggaggagagggagaatatcttttgttcaaagccaaatgttgctacttctgaagacgagtgcaccttatgggtatagccagctataatgtttatcaaacatatactttttttttttttttttgagatggagtttttgctctgtcacccaggctggagtgcagtggcatgatctcagctcactgcaacctccacctcccaggttcaagtgatttctcctgcctcagcctccctcgtagctgggattgcaggtgcacgccaccacacccagctaatttttgtatttttagtagagacagggttttgccatgttggccaggctggtcttgaactcctgacctcaggtgatccacccacctcggcctctgaaagtgctgggattataggcatgagccaccatgccctgcctcaagcatctattttgtgcaagagcttgcagaagttctttcctgcyacagccgtggttggccacattgctcccccatgaatatgtggaaactgacacttcaggagaattggtggctcacccatggcattcagctagtgggttatggggcagagactcaaactcagccctgactcccacagcattgttctttttctgtaaattgctgacttactcagttgatcacagttcattgccgtttacagaatttgtctgcacccattgtgccttttaagtgtcgattttctttcctgaaagcacacaaagcaaagcacggctctgcagtgtgacccaccgtgtgctgtgtggacagatgatgctggtcagcaggcaggaaaacgatctgcyaggcgctgggggtggggcagaggattgttcttcctgaccttggtatgaaaaccgtrtggagttcttagtgaggaaaatcactcttagcccaaattcctgcgaaggccgatgggattgtttttaagatttgttggattgctggatttgttgaagggagaactggaagaagctatcagaagtttacagggcatcggagggagacactccctttggccactttctccgccaaaactatcctggttttagcccaacagtttcccacgcccgcccccacccccacaaccttgtttgtttaaagaccattaaagaacgtcttcaatttattctggattgagttttcctcaaaccaaaccacccctcagttcaccccccagagctgttsaggcccttcctgggggcttgtggctgtggctgcctcagatcagagcagaccctgggctgcatcatccttccacattgtctctctaaagtacctgaagccagtagttctcaaactttggagagggttttgagtcacctcgagagctgataagaacagaggcccagattgaagttgaatagtgctgggcctttgtttttaccaagttccctggatggttctgctacctcctagcctgtgagaactactcctttgtgatttcttgccattgaaattttttctcaccttcttcttggcttgagtgctcttctgggttccttccggctgtccaaatcaaatttaattttcacacccagaccttgtccctgctctcatccttcagcccaccctcctgttccccattcagcyagaccccctgccagtcagttcaagtgctaggcatggggtatcgagtctcaggccggtccacagacattccagcacctggtggtaagaggtgagtgctgcgtggacccactgaggaaggctctggctgtgctgggggaggggagtttatgctcrtcctcatagaaggataagcaggaattaagtgggcaaaggagggagtgaggaagctctcactttctaggtagtaggaccagcatgaaccaaggtaggggatgacaacatggctcattcagggaatttgaggtatgttgatacatggaaaaatgtacctgaaatgtgagtcctgcttttgtgactcaccctttcctttacataagcattgatttacatctgttgttttttaagatagkgtgtatgttgaaaagttcagaacaagatcaagtggagacataaaatggtaagatgtgaaaagttgttcttgccagattaaatggttccacctgaagaaaattttttttttttttgagatggagtctcactttgttgcatgggctggagtgtagtggcgtgatctcagctcactgcaacctccgcctcccgggttcaagcaattctcctgcctcagcctcccgagtagctgggactacaggtatacactgccaagcccggctaagtttttgtattttagtagagacggggtttcaccgtgttgccccaggctagtctcaaactcctgagctcaggcaatccccagcctcagccccccaaagtgctaggattacaggcatgagccaccgcacccggcctgaatttttttttgttttgtttatttatttcttggttttgctggcctttaagcaacccaagactagggggctttcactccgtccttagagagctcaaagggcctgacttaggggacacagtcagtgaaggggatgaatgaatgagtttcagatccaggtgttctggataagtcactttacctttctgggcctttttcctcaactccaaacagaggatgtcggtatagacaatccctaggatcttgtcccctttatgactgatcacacagttccactgcttgcccttgaggctttggtgtccrcgcatgcctattcagtctgacccacaagaggccaggccagctctgttccaggysctgaaaatcccattaaaactccactcactagcctgttccctgggggtgctgaatcagcatttaatggggaaggccacgagctaggctctggtgggtaggaagtgtgtgacttctcttacctcaacagtttctactgtaactagcgggataaggtaaatctatggaaatgcaaggcttatgccgaggctcacagagtgggccaggctgcataagtcctggacaccacagggcctgctttgagaaggcagctgtggtcccacagccttgaccaccaggcaccatcctctgttgccagtggacccacatttcaaatcattttatctcttaaataacctgtattcatttgttccttcccatgtcttatccaccaaaaatctccaattggaaattcagacaaggattgagaccctgtgttcttaaattgggttgattgaaatctagaaacaatgatagtaataacagagttatcttctctcgaacatctgcctcctgcctgatgttatttcgcttaattctctcaagggcttgaggagagtcctgccataatccttcctttcagaggggaagatcgaaatttagctcagatctcaagctagtaatcatcagaaccaggatatagaatcaggactagaccacatggtccctgctctgagctgctgcgggtccatccctgtggctctgtccagggtaaatggatgattcaggggaagggtcagcaaactatagcccatgggccaaatgcagccactgcttgtttttgggtggcccaagagccaagaatagtttccacatttttaaatgggtggagaaaacaaaatctacaaagaataatgtttcatgacacatgaaaattatgtaaaatatacatttaacgcttgtaartaaagttctgttggaactcagctacagtcgttagtttacatatcatcgatggctggtttcgcagtacaagggcacagtttaaagcctgccaggcctaaaatgtttactgtctggcctattacagaagacgtttgctgacccctgatttagggcattcatgaggcttgatgagatgttgaaaatcagctgtctcctcccgycactctcttctgattgtgggtaggctctggtgcaccagctctccagtgatctcctatctgatgctcagagttctttttccattgcatggatgtcaaataaaagtgtctgctttgtggcatttctggcttgagagtacctgcccaatgtgatttgccaaggtgccattttatcaaaagtcttaggatgactggatgggtttgccttgaatttgttttgcctttgctgatggttgtatttaggttatcattgaaagaggattgcagaacagcggcagtttcctgtgctgtctggattgaagttgaataatgccctaacttttaattgaaagggactgttgtaggcgggagactgtctaagagctgacctgtcaccaccacctgagatgtctgagcccacccttggactttcttggcacgtggggaagagggggcctgggtcctgggctcccacctaaactcagcagaccccactggcaggtgtgtgttgtgggggtgatggaggctttttggagggcattgagctccttgggtggaggtggggtggctgccttgggggctcagtgcagctctggccatgatggacagaaggagacaagaatgtagcttcttgttctgagaacttcagcccaagttcctcctttcatgcagcagaatccaagacactgacttgcccctctctgctgttgaggcttctgtgttgcagagataccttctggccctgctttatcctagtgaggcagctcacctctcccgtgtttcactgctcgaactctccttcccaaggctgtgctagtggtagtgatgacaataatagctactatttattgtgtgcccctcgtatgctaagtgcttcacgtagattatataatttaatacttgtcacaacagtcttatgaggtaaatactgtatatatatttaaaaagactatttttagagcagttttaggttcacagcaaaatgtagaggaagtttcacagagatatcccaagcaccccttgccattttctcttagttatgaaaatgatcaaatgggctgggtgtggtcccagcactttgggaggccaaggcgggtggatcaccggaggtcaggagtttgagaccagcctagccaacatggtgaaaccctgtctctactaaatacaaaaaattagctgggtgtagtggcacatgcctataatcccagctatttgggaggctgaggcaggagaattgtttgaacctgggaggtggaggttgcagtgagccgagattgcgccattgcactacagcctaggcaacaagagcaaaactctgtctcaaaaagaaaaaaaaaaaaaaaaagatcaaatagacttccaagtgcccatgtctcaggttcagtactgatcagcattttaccctcctttgcttcagctccctcctgtcattgctcattgctgagagtgggtaaggggctttctcaggttcctgtagctggtaggatcccgctgtcctcaaagttcctgcactcagtggctgacggtgccaggtgactcccccttttggggtccatgacatttgctgctgtttctaaagcccctactgtgtgctgctaatcccctcaccaagcttgcagagcggatggtaactgacaggtgaaaaaatgcaagaagttaggtcacgggtccggggacatcctgctaataggtggtggtgccaggcttcaaactcaggcctgacttcaagtcccgcagcttctctgccccaccctgtctctgtcctcctcacctctgtagtgtggtgggactcggtggggtggtcgtttgactgtgggaacttctgtttgcaaagccttggaaggacccaggtgactgcagatagttccgtgagaagcatctgggactgttgacctcactgctgatcttccttgtgagcctgtgatagggctaacccttggctttctggccagagtgtagacagagacccgattagcattttgtggtcagtcagaggcagtttgtgaacctggaacttggaagctggtttcctcctctgggagggatgtggagcctggggagccaggaaggcatggactgaatatacacccagctgggcagtggggaagggaggattccgtggggagctagccctgaacacagcaagcatttggtaaatggtgcctgttagctgtttttatccgtattctaaggtggacgagcggcgcaggagagaactggtaggattaatggagtggtttcattattcagatttaagtgcatgcagccagaagtcttcaactgaagaattgaaactctctgctcttttttgggggtcatggtggcagtgtgaggggctggttcatgagtgaggagaaaaggtagtggcaggcagaatggtacattttatattcatattgtgcacattattcacacctgacatgggccagaaatcctctcctaagagagacacttggaaagtaaacagtttgttaatcatttcaacccgtggactttggttgcagggtgcattttgatcaagggttacaaacaccaatgtcttcagggacatttggggacataaataaagggaatggacaaaaagatggaaaagcatactgcctctcagtctttcgcatgctcatgtttgatagagaaaatcaacatcgtgggggcagtgttgcttggcaactgccatttgtcctcagcgttggggtgacattactagggaatggctgtgaactccaagcacttccccccgggaagcgaggctgacactcagatccaattcatgtctttaatgtggccaaatgagaaagccagatgtatttctgagaagccaaaaaacaagatttaaaaaatgctatctccctaatttttttttttgagacagagttttgctcttgttgcccaggctggaggacagtggtgcgatcttggctcactgcaacctctgcctcccaggttcaagcgattctcctgcgtcagcctcccgagtagctaggattacaggccaccatgcccagctaatttttgtatatatatttttttcagtagagacggggtttcaccatgttacaggccaggctggtcttgaactcccttgaactcaggtgatccacctgcctcagcctctaaaagtgctgggattacaagtgtgagccactgcacctggcttctatctccctaatttttaaatacttaagattttaagaaacatcacaggtcaagcaatgcatggcagtgggctagattcagacaggggagcctcaatttaggacccccagatttatcatacaaggtggaggaagggttcagatagggacttggggattgccaactctgaccctctcttcagatgaagagattagccctgtggaggagtccaggatttgtattttagtcttggtactgggtgttctgggttgagttgctagaccattctgggacaagttgctagaccattctgggacttactttcttcctccataaagtcaaagggtaggtagatcacacatttttaaagtgtgctccttgaggtgtgtcaggggttccataagcatttgctttcagttttattaaaagcagcctgtactctcaaatttgagtatatttgaaattgtaatgagagcagttgctcaggatggagtgtggtggctcatgcctgccccacactttggaaacctgaggtggaggaaaccttcaggccaggagtttgagaccagccagggaagtatagggagaccccatttctacaaaaaacaaaaatattagctgggtatagtgggacacatgtgtagtttgaactactcggaaggctgaggctgggggatcgcttgagcccaggagtttaaggctgcagtgagctatgattgtgccattgtactctggcctgggccacagagtgagatcctgtctcaaaaaaacaaaaaacaaaacaaaaacaaattaaaaaacaaaacaaaccaaaaaaaccaaccaacacatttgcccaaatagtgaatcacatcaaattttaaaattcgctggaaactatctgcttcttaatttgattatacatcaattatgttcaaagtaaaaaacaaggtaatttgaaacagctgcttttatccaggtgtatacacggtgtatacatacacagatatgtatgaaatgtggaactctatacccgtatgtatggagttcctcataagagtctttttgagaaaatagttccattgctaaaaatacccaatggaaacttctggcctgggatttccaagttcaccctcggctgtgcrtctcaaagtccacacagcctcaccaaaatagcccttctgggtacttttttctgtgtgttcttggaggaggccatcgtgcctccagctccctaaggcggaagatgagccagcggggatctttgcagggtggttggttctcgttccttccaccgaagccttccatggcatttttgggacctggaattgtgaattattctgcctcttccccacagtccctgatgacagcatgaagttcagagagtttatttgcagatgaggcagggaagccggcctgttctcatcttgctgtgcctgatgccttgtgcttggggcactgttcactgtgctgcctgctggcctgcttgtctctgccttttggacgggagataggccaccccacagtgccacacctgccttcagggaagcttttgggtgttccttgtctggcttctgggttcagtgggagggcccacccagcctgtcattttaatgatttaccttagaggagccagttttatagggagttgttggataatcttcacaaggcagataaatgggagagcaggaagaatgatggcctttcagagttgaaatctgtgctgctccaaatcccataaactgctatttgattttaaacattgcttgaagcggttcacattttggttaattacgtcagtgggtaaaaataactattgtcatatggtgtgtgggcttggctttagaaggataaagagtctattgttacccattgtgctattcagtcacttattacccatccttaaaagcccaacgtggataacagaaaacctggagagctttgtcacttgctgaaatccaagctgccctgtgaatttatccccaaacactgctccttttgagaaacttgtacaagctgccttaattyagtcaattcaaatgggttgatgggggctgttcccaaggcccaggacaggcaggggtttgtgacctgcagccctggaactgcctttgggtttcatggtctcagttgagacctgcccagggttgaaccagcttagtgctccctgggggtggttaagttcaaggacttcagggtccgattgaccttgggctgaatcttgacctggggctgtaagatgctcggtcaggaccttaacttttccaaggctcggtgtctacatctggaaaatggggataaacacagttcctccctgctgggattattgtaaggcttgaatgagatgataaatacaacatctgacttgcgactggacggtagcaaagggtttagttaatattataataagtagaatggaacagcattagattctcacacagggtcactatgttgttttctcccattctacccctgcatattaccctgaagcacccccaagcctctccctccccatccctcaagcccctccctccccatcccccaagctcaccaggtcctggcgcacccagatctttcactgcttttcttgcctgtgagctcttggggagtcaggaccaccttaagcaccctctgcatctttggcacctaacctggggcctggggccctgcagggccacaattagcagcatggacaacagcatggacggagagggtctcagagcctggagagctcctaggggctggagcagtcacaggaagtcaccaagtgaattgaagggtggtggctttggaggttcagtgaggcaagaagaaggctgttaggctgggaattaaggaaccttgtgttgttcgagtctcaggacaactcagatatggggtctgtattgcaaatgcccctgcgtcattttacaactgatgaaaacaatggctccacgagaccctcaagtgccagagctcatgagtgacagtggaagttgaactaaccttttaaccaccctagtccacacctgtcaggctgacgggctttcagtggtgatgtgttgggagctctgtgccgcagatctctgtgtgctcctgagactctgcccgcctgtctctaccctgctgtgcccactaggaggaggctgacctttatgttctacaccagtgggtgcccttggtctccagcttccagtgggccagtctggcgagagaccctagctggagatgaggggaggtagccttggcctctctccttgcccttcctcrctgctgctaccccaggattcttgcccatcccttactggttttccttaaccccaccctcacccttgaaaacagactctttaaaactctcctcactcaccctcattgagtgtgtcatctgctccagctaggatattggctaataccgcatgtttcagaaagaaaaattcgcagttctatttatttttttactgtggattgaagggagaggcaaccaggtatatggatgaaggagtagggcctggctgtcaccactggtgttcacaaaaggctcccgtttaagtcctcttatattccaaatgaggggttataggtcgagtcagggcgttgctctaacagaagcaaaaccaaaaatacacggccgtagatacaaccctgttctggtacttcctaattttgtgtgtacatgtgtgcacctggagcttcaagaaatgaaaatggaaatggcctgagtgtttctcagccctaggatgaggctgtttctgtgatttagggctggaggttatgaagacttggtttacaatatgcacagtacagaagcggggaagtcaaggtgtgctgggcaaggaaacatctttatgtgacccacaaagagtgaagcagagggaagaaccagaagttattctggtttgcagactgggagacaggtttaatgacacagtcatgtcagagagaggggaagaggagaatacgtagggggtctgttttgatgtgtawgtacatgtaggattttcatgtagaggagttggggaaaattttagaagttttaggtgtaaatgcagctggtaagatccttatgacttagtttctttyttttcttcttttcttttctttctttctttctttyttyttttttttttttttttaagacagagtctcactctgttgcccaggctggagtgcagtggcgcgatctcagctcactgcaacctccgtctccccagttcaagcaattctcctgcctcagcctcccagagtgctgggattacaggtgcatgcaaccacacctggctaatttttgtatttttagtagagttggggtttcaccatgttggccaggctggtctggaactcctgacctcaggtgatccacctgccttggcctcacaaagtgctgggattacaagtgtgagccactgctcccggccttagtttttgagtgggaagaatctagtgttcagagtggaccactgatgtcatagctgcaggtttggctgaattgggatggtgcagaaagccgtgttaaccatttctttttctctgaggcctggaggaggakccttgtgactggaaccacagttgggactggcagtggtttttcctgctggcaaggaaaaaaaaaaagagaaaagaaagagttcgacttatcagcacaaagaaaggaggatgtgaaactagaaccatctctagggcagttctagcaatgaacaaggctggaaggctcaccggcgaggggtttcccctcaggaaaggggacagagaagcttccacctcctgggtagcattgggtgttcctgggcacatctgggtgactaacgggttttctgccacacaactggggtatatagggaagtctttggccagaactgtgggccgtactgcattcttcccgtgtctgtcactgctgagtcgtgagcttgatctcttttcttagtgtttgctccttttgtccagctatgggggccagcagaagctttgggtcatctgtaccagtgactttgctgtgaagatgtaagggagagtggttgaggtcaagatctgggttctggttcttgtgcctcctctctggctgtgtgtccttcaacaagctgcttactgtctctgggcctcygtgccctctgcaactgggttgttggtctatttaaatacttggagaaaaaagctgggcatggtggctcatgcctgtaatcccagcactttgggaagccaaggtgggaggattgcttgagcccaggagcttctgaccaatctgggcaacaaagtgagatgctgtccccatacagaaataaaaaaattagctgggcatggtggtgcatgcctgtagtcccagctacttgggaggcttaggtgagaggatcgcttgagcatgtgggatcaaggatgcagtgagctgtgattgcaccactgcactccagcctgtgacagagtgagaccttgtctcttaagaaaaaagttattcaaaaaatactttggaaaacaatgctggggagagtatgagcttcagattgcacattggtttctatcaggaggatctgagcctcggtggtgttacctgtaaaatggggataaaaatacctcacagggttgcagtgaagatgtaaggatgatgatgatgacaacagcagctcaaatagatcatttaacttaattctcgccaaagcaaggcagrtacaaagatcatcctgttggcagatacagacagggagggacagagaggttaattaagcaagctacctgcccgcagttacatggccagmagcagtggcactgaacgacttccttcaggcggtctgagtccaggtctcagctcttagccatcactccatggttctgtgctgagacaagggatgtagaaagcccagcacagtgtctgttacatagtaggtgcttagtaagttagacttcctttttatcctcagaatgcgtttgcaagtatagcctcccacagtgcttttactttaatctttccccttactgggcaaaaaaatgtttgctgccctgtgcgacttgcctagctattgacttctcttttttctgcctctctcctatgatccatcctagactgtggattgaggctcagcctagattaaagggcaggggctggaggaggaagatgagctgaaaaagggtaggcctgaggcgcgaaggagttgatggtagggtggaaggtgggaatgggaagtttgagaattggaggacctgggggcaagactttccccctctgggctcgttctttccttcctgtgccgtttattgagtgcctactgggtccaccattctaggcatggggcacagacaagatctctgttctcatggagcacacagtgtggttggaggagtcagtgatggacagagagtgaggggtgttggtttccatggctgctcggagaaggacttgctgaggaggtggcgttttgggcaggccatgaaaaggtctgggcagagtgtgtttgtgggagggaataaatatgtaaaggctctaggggagaatcagtttcgagaatgtgagggggcagtgagaccagaggggctagtgggctgtggctgagtttgaattttattctaagtgtcatggaaagtaggaggacggttttttccaccagggtcctttttgattattttattcttcgtgacgatcctacttaaaaaaaaaaatcttattcaccaaaaaggtgtgtttgtgaaacaatagagtgtacaaccttgaatcactttagatttttaaagtatagggaaacaattatggatcacaatgaatatccttgagggctgctcccctccccagctgacactgtcagctaaacctttaaggcctcttgtgtgtcaagcattaattcttcccaaagctgcttgacatgtgattaaaaatttttactgccacctactgatggaaagaagaagatgaatttttgtacaatgaaaatcccaaacacagtggatttctggtttccactgtgctgtcaggactgggaaatgggtctggggaaggggtgtgctgggcttggtatcccccccacccaaccccctttttttggccctgacaatctggtctctgcttctgtgtccttctgcttcagctcatcgcacagtgggtggagggaggtgctgacctggggagttgctccggggagagggctggaggtggggggatgtgtctggggagaaacactgggcactgggagtcagcagccgccagcccccacataacccagttaatcctttgtaattgaccccgaggttgcaatgattccctgtgtttaatgtcccaagacggcctaaccctgaccagcagacctttgcttaatgtgcttcttaccaccccacccccattattaaatcctcaactgctttatttctgatttgcattttccatggctgaatgaatctgctgacttccgttttctttttctgtttcagatcytgtgcgcaggtggcagtgagtacccttttcctctctattcttgtgttgttcgctactgccccctaatggacacacagcaacattaacagcaatgtgaaatgctaatttattaaaacctgctcggtttccaatttttctttttctttttcttttctttttttttgagttggagcctcgctctgtagcccaggctggagtgcagtggtgccatctcggctcactgcaacctccgcctcccgggttcaagtgattctcctgcctcagcctagcaagtagctgggattacaggcacgtgccaccatgtccggctaattttttgtatttttagtagagacggggcttccccatgttggtcttgaactcctgacctcaggtgatccgcccgccttggcctcccaaagcgctgggattacaggcgcgagccaccacgcccggccccaatttttctttagaagtaggagtgagggtggaaacaacaaatgaaagaaaaaattttaattaattgtgcaatcatgatgaaaatttatattttctgtaatttttttctagcctcatctgtgggcgatttaacttagttgaaattataatacattatttgtatattgtttatgtgctgttatcctttaagtattttcttgtgttgctacattgcccttttgttgctacattgctacatttaaagaatggggtggaagatcgtcataacctttggaaaatgagacctggactcccgcatgttttgctttcatgcacagggctgagtcccaactgctgacagtgctggttcattccctggtaataaaatgagaaaaataaggatatgactagaagttttttaaggaagcttaaatatattcagttgaaagcaccatccatccctggattatgtccttactaattttttggtcataaaacatttctataagaattgaaggccgggcctggtggctcatgcctgtaatcccagcactttgggaggctgaggcaggtggatcacctgaattcaggagttcgagaccagcttggccaacatggtgaaacaccatctgtactaaaaataccaaaaaaattagccaggtgtggtggcatgcacctgtaatcccagctacttgggaggytgaggcaggagaatcgcttgagcctgagaggtggaggctgcagtgagccgagatcactccattgcactccagcctgggcaacaagagtgaaactccatctcaaaaaaaaaaaaaaaaaaaaaaattaaaaataatagtagttggtagtttttaaaaaaatgtaccttttaggaaaaaaaaaaaaaccatggtttttgtttctccccaaaatttgggaactttttttttcctgattggtaaaatctcagtttgtgagataaaataattagattgtactcatggaagcatatatgggcagatcttgctgaaatcttctaataaagcaaatctcaattaataatggtaattagagcctgtgcaaacaatgggaagagtactgccgttggtttttcttcctgttaattagtttaataaataaactggtgggtaccttgtacaggcttgaatcactgctgcagaagaacacttctattcaaacatctaccgtaggtagtagaattgcgggaaacagaaatcatgagctattttaactgaaaggatttaccctgggaagtgagagtttacagagtcattggaagggccgctgtattagtttgccagggctgctgtaataagatcaaggtcttgggggttaggacttcaacatatgaatttgggggtggcrgagcacaagtcagctcataacagctggggaggaggctttaggcctggccctgagaaattactcccagactaaggctgcagaactgaccccctagagagtcaccaccttggtcatagacagcaagcagaragggaggaatcaggaagtccctgctgtagttgctggatccagcggtgaatgttctgagctgtgatcctgggatcaggaagctgcagccactgccacagtgttggttctagagccaggcagcatgagatccagtcatcgcatccacactacagctataagaaggaggaagggcagaaggttgtgctccaccctttaaggacacttgctagaagtcagacagaacgtctggtcacactctgtttgacagaagttagtcacatgcaacatctagctgcatgggaggctgggaaatgtggtctttgttcccaacagctatgcatatacagggccaaaaatctccaggagtatgatgaagggaaaatgggggaatggagtttgggggtcaagagtggtctctgctgcacctccctgaacagagactctaggagactagtaatgaattcaagataaagcagccagtgtggccaaggttctccttcagtgcctgagctcttggccataggagctcacgcctcctctcctttcctgtgaatgactgtgtgcagtgtaagcatggagcttctgcactctcgtggccaggtactctccatgtggccagaaatggcagtttctgaggggctcatgttgtaggtgatgatacaaagaagagaaagagagggatcagtttttccaagtgtgsatttcatttcagtgtaaatattktgtgaggtggggcatccctgtctcctggagaartatatttttaatctaattgtttactttctttgcatagcccctagtccaattcctgacccttcagtagcaactgttgccacaggggaaaatggcataacgcagatcagcagtacagcagaatcctttcataaacagaatggaactggaacacctcaggtggaaacaaacaccagtgaggatggtgaaagctctggagccaacgatagtttaagaacacctgaacaaggatctaatgggactgatggggcatctcaaaaaactcccagtagcactggtaagcataggcttttctgccagtcatgtttcttaaaggaaatcggtagaatttataaatgtcatgttttccaaatactgttcttcttttaattacctaagaaaatcttttwaaaaatttttataaagatagtaatgcatattcattatataaaacatagacaagaaaagaataacaagtaaatcattaactggagataaccattgatcacttgatatacgagttttataattttaagatatatgcatgcctgtgtgcatatgtatatacatatatatgttttattttgttttacaaatatcaaggtcatcctttacatgtagcttctcaccaatatattacaaatattcttccctgttagtatatacatttctacaggacagttttaatacctgcctggcattctattttctaaatcagggttggcagataataatggtccttgggccaaatatagatcactttctgtttttgtaagtaaagttttattgagtctgcctatggctgctttcatgctagaattgagtagtggcaatggagaatttgtggcttgtaaagcctgaaatatttattctgtggcccttacagaaaaacattgctgatacctgggttagataattgattctaaaactgtggttcagagatctctaggggtctcctagattctttcaaggtatttctgggtattgttttcataatactactaacatgttatttggcttctttactctcattktatcatgagtgtacrgtggagtcttgcagattctatatgatttgggatgacactgtcactcttacagctaatggaatgtatgctttcatattgtttaaaaaactttatcttttttatttctaatacagtatggtaaatattaatcaatataacccatataaacaaaaattctccgggagccttaataatttttaagaagttaaaagggccctgagaccacagtgtttaagaattacttgtctaaaagcattgtaaattatttaactgctcccctgttgttgggaaggtagattatttatttataatttttcataaaaaacattgtgatacaatagttttgttagttctagaagtattgataaaatcacatacacagttaaaataagtcattgaattatttctagggtaatatgagaaacttttagaaattcctaaggggctgggcacagtggctcatgcctgtaatcacagcactttgggaggctaaggtgggtgatcacctgaggtcaggagttcaaggccagcctggccaacatggcaaaaccccgtctctgttaaaaatacaaaaattagccgggtgtggtcatgcatgcctgtaatcccagctactcgggaggctgaggcaggagaattgcttgaacccaggaggcagaggttgcagtgagtggagatggtgccactgcactcccgacagagtgagactctgtctcaaaaaaaaaaaaaaaaaaaaaaaaaaaaagaaaaattcctagcaagcttatgttaattattgttacaaaaatttgggcttagaggttgggaccataccagatggtcttcccagaaatcactggacaggcttactgttgaagggcatttccagaggaagccaatctacaatgattggaataagaacctacttcttcaaatatacagacatcaacacagagtcacaaggatcaagaataatcagggaaacgtgatattaccagagaaacaaaataaagtgcaagtggttgaccataaagagatgggagatgtatgaactgtctgacagagaattcaaaatacatgttttaaggaagcctagcaaactttaagaaaatacagataaagaattcaaagaaatgaggaaaacaataagtgactagattgagatatttaacagagaagcaaacagaaattctgaagctaaaaaatactttgaacaaaatgaaaaatgtaatagagagcaccaagagtagaactgatcaagtagaagaaataatccttgaacttgaagacagattatttgaaaatatacagaggaggaaaaataaaaaagtggataaaaaggaatgaagaatgcctataggatttatgcaacagcatcaaaagacgtggtatttgaattggagttcatctaggggaagagaaagataaagaggtagaaagcttatttaaagaaatagtagcagaaaactctccaaacctggagaaagatataaatatccaggtacaggaaggacaaatgactccaatcagagtcaattcaaacaagactactccagaacataatcacactgtcaaacatcacagacaatggggatttggaaagcaaaaagagaaaagaagcaaataacatgtaagggagctccacttcagctagcagcagacttctcagcagaaacttacaggccaggagagagtgggatgatatattcaccatgctgagggaaaacaacctgccaaccaagattrctatacccagcagaactggccatcaaaaatgaaggcaagataaaagactttaccagagaaacaaaagctgagggagttcatcaccactagacatgtcttataagaaatgctaaagagagtttttaagctgaaagaaaaggacactagtgattaattgaaaacatatgaaaggataagactagtaaaataaatacacagtcaaattcagaatacatgaatactgtaatggtcatacatatctttaatatgaaagttaaaagataatacttaaaaaataataactacaataacttgcaggggggatatgcaatataaaaagatgtaaatggtgacataaacaattcataatatgagtggggaatggactagaagtgtagaggtcaatttgtgtgtgtgatcaaagttgtcatcagcataaaataacctgttataactataagattctttttataagcctcatggtaaccacaaagaagaacctttagtagatacacaaaaaataaaaagcaaggaatcaaaacatactactagagaatatcacttaacctcaaaggaagatagtaagagaggacggaaggaacaaagagtctataaaacaaccaaatggcagtagtaagttcttacctatcaataataaccttgaaagtaaagggtttaaattctccaatcaaaagacatagagtgcgtgaatgggttaaaaaaaaaaaccgatctcaatagtatgctgtctacaagagactcacctcacctgcaaggacatgcctagactgaaagtgaagggatggaaaaagatactccatgctaatggaaatctaaagagtggcaggagtagctatacttatgtcagataaaatagactttaagttcaaaacttttaatggagacaacaaacatcattttataatgataaagggatcaattcatcaagaggtcttaacaattataaatatatatgcacccagcattggaatgcctaaatatataaagcaaatattaatggatctgaatggacagattgactgcaatgcattcatagtagaggacttccaccaccttacttccagcaatggacaatgatccagacaggaaatcaataaggaagcatcagacttaaactacagtttagaccaaatggatgtatcagacatatacagaacattccatccaacagctgtagaatacacacttttcaactgcacctggaacattctccaggtagatcatatgttagaccacaaaacaagtsttaacagatttaagaagtgtgaaatcatatcaagtatcttttctgatgatggcatcaaactagaaataaataacaggaggaacttaagaaaattcacagatatatggaaattaaacaacatgctcctgaataactaatgggttgatgatgaaattaaaagggaaactaaaaaatatcttgagacaaacatcacttcttaagcaattttgttaacatatttctttttcttctttaaaatggtgccataacctccttcatgaaattgctgtgagacataaattagaaaatgcttgtacagcccctggtataggatctgtccccaggtcacttacagcaggtccccagcaggggtcatgctgatcttgccatctcccacagtaactattgttaattgttttgtcacaaatgcccctgaacaatcaatgggtcagtgaagaaattaaaagggacatttaaaaatttcttgaagcaaatgaaaatggaaacacaatatactaaagcctatgggatacaccaaaagcagcccttccaagaaagttgacagcaataaactcctacatcaaaaaagaaagctccctgggcacagtggctcgtgcctgtaatcccagaactttgggaggccgagatgggcggatcacttgaggtcaggagttcgagaccagcctggccaacatggtgaaaccccgtctctactaaaaatacaaaaattagctgggtgtagtgacacacacctgtaatcccagctactaggaaggctgaggcaggagaattgcttgaacccagagggcagagattgcagtgagccgagatcgcaccactgcactccagcctgggcaacagagcaagattctgtctcaaaaaaaaaaaaaaaaaaaaaaaaaaaaaaaaagcaagctcatacctccagcctgggttttgagagcctgtctgaaaaaaacaaaacaaaaccctcaagtaaayaacctaatgtagcacgttaaggaactagaaaaataagaacaaactaatcttcaaattagtaaaaggaacaaaataataaaggtcaaagctgaaataaatgaaataggcactagaaaaacaatagaaaagatcaataaactaagttgtttttttgaaaacaaagaacattgacaaagctttagctagactaagaaaaaagagacgctactcaaataagaaaatcagaaatgagacattataaactgataccacagaaatacaaaggaacaattatgaacaattatatgccaacaaattggataacctagaagaaatggataaattccttgccatataccatttactatgattgaattatgaagaaatagaaaatctgaataatccaataatgagttaggagattgaatcagtaatagaccatctcccatttctatttattactgttgttattctaagagacagtgactccctctgtcacccaggctggagtacagtggtgtgatcatagatcactgtaagttgaactcctgggctgaaatgatccttctgccttagcctctcaagtagctgtggctattggtgtgcaccactacatccagctaacttttaaaatttttttgtagagatggggtctcactgtgttgcccaggctgctcttgaactcccagcctcaagtgacccccaccaccttggcctcccgaagtgctgagattacaggtgtgagccacccagtcctctgccaaacctttaaagaagatctaatgacagttcttctcaattgcttccaaaaattgaggaggagagaatacttccaaactcatttaacaagagcagtattaccttgatacgaaaaccagacaaggatacaacccaaaacactataggccaagatgcaaaaatctttaaccaaatactagcaaacctaatttaacagcatattaaagagatcattcaccatgatcaactgggattcttcctagaaatacaaaaagggttcaacctgtgcaaaacaataaatgtgctacaccatattaacagaatggaggacagaaaccatacaatcatttcagtagatgcagaaaaaacatttgaccaaaaaatattgttaactgtgctttcttttctgaacttaagaacttgcttttccaaaaccttmccagaatccctgtatgaatcaacaaaatttagttcttaacacatttctccttctttaaaatggtgacattagctgggcatgatggtgtgtgcctttaatcccagctacttgggaggctgaggcaggagaatcgcctgaacccgggaggcagaggttgcagtgagccgagatcacgccactacactccagtctgggtgacgagcaagacttcgtctcaaaaaaaaaaaaaaaaaaaaaagaaataatggtgccatacctttctcatgaagttgttgtgaggcataaatgagaacatacttgtacagcatctgggacatggacggcctctcaaaaggagtgctgctgttcttgctacctgcaccactgtaactgatgttgtttcatcatcctcgtcaccatcattgttattgattgtaaatggaagcacagtggtcatcttccaaatatgccactctgactctgtgaacttgtcactttataaagaggaaattcaagcttggaggggccttctggcatgacgtttattgaattgtggggcacaagatrcttccctgcttgttccattttcctttctcttgtttattctcctgccttatttatttattttttcttttgagacagagtcttgctctgttgcccaggctggagtgcagtggtgtgatcttggttcactgcaaactctgcctcctgggttcaagtgattctcctgcctcagcttcccgagtagctgggatcacaggtggctgccaccatgcscaattaatttttgtatttttggtagagacggggtttcaccatgttggccaggctggtgtcgaactcctgacctcaagtgatctgatctgcctgcctcagcctcccaaagtgctgggattacaggcatgagccagtgtgcctrgcttcctgcagtttttttattgattggatgaatgtttgtatatcccatgagccagatgaggcacactgtccatgcacatagcaagatggtaacacttacaccatctttactcttttgggattagtcccaagctccttgagaatgactgccgtatcacctgggttttactcttcggtttctggttgttactcctcagtcttcagctcaattaggatgcatccatttggtagttttacagttagtaaccctgatggcttccactggtttacgatcttgtacatctaagatgatgaaactaaggttcagagaggtgagatgactttgagtaaaattgcatggtgagcaactagcagaattggaccctgaaaccagatttctaatgtccaaatcttgtcccttgtttatcatatcatggtggttcaataataattcttcgtgtttagtgtggtgtactagagctatcaacagagaaacttgagactgagaggtttgaagggactaattctaggtcacacagctaatggatggagcaggtctttaatcccagatctgggttccaagaccagtccttttctctttacgctgctctgyccctgctatctktatgtcagaaaaccactgagcttccttctagatgtcagggtttggcaaaaaagttatcatgtgcttctgcgtcatgcagcgttttctgagaatggggagagggactcattttgcatctttgatctctcttttttattttgagatggagtctcggtcttgtcgcccaggctggagtgcagtggcgcgatcttggctcactgcaacctccacctcccgggttcaagtgattctactgcctcagcctcccgagtagctaggattacaggtgactgccaccacacccagctaatttttttttgttttttttgtttttttagtagaggtggggtttcaccatgttggccagggtggtcttgaactcctgacctcaggtgatccacccgccttgacctcctaaagtttggtctctttttgtatcagcttctatacagacttaaccccatttttaagtcacagccagcatggtcaacttctgtcagttttgcttctgttccaaaggcttctgttttactaacatacacacatacatgtatgcatatggatttaaataaattctggtgcagggaagtctaggaggcaaagagagataaaactctgtgattggaaagtcacttctggaaactagacatatagagcagacctcactcttacatttctttttgaagtgcaataattttttttttttttttaacaatatagggcccagtcctgtgtttgacattaaagctgtttccatcagtccaaccaatgtgatcttaacttggaaaagtaatgacacagctgcttctgagtacaagtatgtagtaaagcataagatggaaaatgagaagacaattactgttgtgcatcaaccatggtgtaacatcacaggcttacgtccagcgacttcatatgtattctccatcactccaggaataggcartgagacttggggagatcccagagtcataaaagtcatcacaggtaagatgactggctcccagggatgatgacaaaccatttcttattatggtgtattctagggccttgtccgttcaagttgcctgttggaaagagaatggttttcataaactagaagaggagaaaaggtgctatgttgtttcaagcctgggatttctggtggccacatcattcagtattaaggccctatgtgttttgggaagttctaactacttctgtttggtttttaaaatcttttgttattgttggttaacacctacctttctgttaagactcaggagtagagacttccttaaaaacgcgtgtcttcatggtaattaccagccttttaagctcccaggaaattgatgctgtgtttatattcccaggagtttctgttgggcaggaaagtttggtgtattttataggggagtgtgtgtttcaaatgaaataagagtttgatgatatttaaattttaattcagatttgacagtttagattttgatttatcttagatgtcaataccgaagccatctattatagctgcaaacttagctttttttttaagctgaaaagaaccaaacattttaaaaaacaggtggagaaacttttttaaggtgaggagaaccaaaaattgaagaaagaggtcctctgttagttttctgatctagggggctggggagtgtgatctcaggggctggagtcggccatgggcgcctgagctcttggagcccacggctggaggtgaacgaggtccagcgtggagcagcaaatatgaaaccagtggcttccgacattttaagtcaggaaactatttctttaaacaaaaccttgcccaggagcccaaaaagtaaaaataaaaaactggagagaaaagagccaaagaaatgggagtcacgggcaccctgacaaaactcctggagctcctcagagcactattttaggggggaamacctgccataaaggtttgctctgttacattgtgaaagagagggaaaggagagcacagagagatgacagaagagaagagaatgagagaaaagagcatagaacttggaaatggtcatgaggacaaggtgaccccgagggggtggctgtgggaaaggggatgcggaggtgcaggaagcaccggtagaggggctgagtgtccttatctagcttaaagccctgagcacagggctgcatgggagcaggtccatcagctgctgcgtattgagcacggcacatgtgcctctctgtccttaatgttattttgtcctcacagtaaccctgggggctgcagcagaagacactgtaatgtggagaagttaagtttcttccggtgtctcagagttactgagtatcaagtggtggggctggaacccggagtctaactctagaccactgtggtgcagtgatgttcataacagctatccacagtcaccgagctrggaatttattggttctgcattacttaataaaacaaaaagacgcatgactgacctgatttagaactctttgcatgagagacatgtgctgtgaagaatcatcttaccgtttcggagctggacrgtgccttagaatcatctaggccgatgtctttaccttcaggcccctgcagccctcaggaggggttttgctctatctgcagcactacctgtgcttttctgtacatgaagctgcagccctgggttctcctgtccccactgctaccaggagtgtgtgttcttgagcaagcccccctgcctctctgggtcttcgtgttcttattggaaaagtgaggggagtgcatgtcattttgggtgaagtggtttgacttatgtcaccatcaaccaaataacgcgatgggaggaaggtccaggatatagtggagatggaacgtcttctgaaaaatccccttggtgctgggatattgaatgtgctgcttacttgaaatgtcttggtaatttaaaatgatattatttgcattatcttgaattgagacctttagattagtaaacagtcactttatttgaggctttgttcctgatatctaaaacacatacaattaaatgctaccatttaaaagggacagtttagaagagtgtccagtcactattggggttaatcttggagaacagtgtggatcctaaacaatttcagttttaaggtttttttcttctcttccgtgttattattttctcccccagccctgctgtgaaatgatggaaatgcattgggctctgatagaaaggaagtatttttagtgagtcacattgggacatcagtgacctcagtcattctttctttttttcttttaaaacccgctcccagcactgaaccccagtcattcttaatgaaggtgactgcatatatcttgttccattaatgcatgttgtatttttaaaatagarccgatcccagtttctgatctccgtgttgccctcacgggtgtgaggaaggctgctctctcctggagcaatggcaatggcacygcctcctgccgggttcttcttgaaagcattggaagccatgaggagttgactcaagactcaagacttcaggtcaatatctcgggcctgaagccaggggttcaatacaacatcaacccgtatcttctacmatcaaataagacaaagggagaccccttgggcacagaaggtggcttgggtgagttacaaagggtaccttcygtctcccttactggttcttactttcagtaactaaatgttctaaaaaataaattgctcttccatgtgtatggagatttagaatttataaagggcttttcctccacattttagtttgatcccccacctgcatgaggaaggaaggaaacgtgttctgattttacaggggaacacaytggggctgagaacagcaataggaattgaaactttttagagtctggcacccaggaaagttagaggcccctttagctttctatctaacagctgtgtcaacccaagttgggccttcagaggaacttatcacgtctgctggttgatgttggcgttgtcatttgcaggtttcatagcatttgcagaggatccccaggataactccatgaggaggacaggcacttaatctgcattttatacttaagaaaacagagctacagagtgggtgtcaggatccttgcttgcgagtgacagaaaccagactttggatagctcagacagaaggaacaatttattggctcatgtggattttcctgctagcgggaggccttagagaaagagatgaggcaattctcatccctccctcttgcttctttctgttcatcagcttcattctcagagcagctccctctgcacacttaaggagcccagctgctccygtttcacaccctgcagctgccycaccagccagctgccccaccaaccagggtctggtccagggaaacgtgtcttgagtggggtctgattagcaaagtctgcttcacagagctgtccctggaaatccatgctgggacaggagaagataacaacccaaagaagggagaatgacctgaaataagcagagtttgaaagagaagcaccagatatctgtggtgctactggaataacagtacaaatggagatggagctatcaggcctttttatggggctgcctctctctctggaggaggaagggagcagatattgatggagcaccaactgtggccactgtctgatggccatctgatgggrttggggctccgaaggaaaatgggggatgtgtccctcttgtggttgatgtctttttgtctcctgtgcttgaaacagatrccagcaatacagagagaagccgggcagggagccccaccgcccctgtgcatgatgagtccctcgtgggacctgtggacccatcctccggccagcagtcccragacacggaagtcctgcttgtcgggttagagcctggcacccgatacaatgccaccgtttattcccaagcagcgaatggcacagaaggacagccccaggccatagagttcaggacaagtaggttgaactttgtaaaatggtggcagccagagtttcctagcacaatgttctgtctcctgtgattctgattctgagtgatttcttgcataacagctagttttgatgtcagagggagcttcctggaggagattttggacagagcagatctgctcagtttcttcttaactccatgggcagtgcacatctctcattaagtgaaatcaaatacatggagcagcccctgtgtgcgggcaccaggcactgcctcacgccatctttcacagctttgcgtggtggctgatgagacaaactggcatcatactttcctcttaaaaacaaataatcattgcttgtttttcctttgctttgagttaagaaagttatgaaagtgagtttcattttttcacccgccttgtaattcataccgatctttctgttgaaatgcttgttgacatgcacattgctgcttcctcgctataatttatcagcactttcactctgtaagttcaccaatatttggaggctttggtgaaaagagcgggaggtgaacacatttgggaatacttagaggtagttactggccaggctgtgttacttgtacagggctagaagttttggcaagacattggtgagaagccattctgtaaggaatgacagtttttcctggtatccatgttgaaggagggtccatttgtgtccttccttccctttgtacttgttttgctaatgtgggagtgggtggggaggatgcggccgtaggacaggctgcctgacctcatggggcctgcagtgacctggcaggagtggcaggtgggaggctctcgggtgaggagggcttggattccagagggtgggttagttggaggaggaggaaggggctcctatgtgggtgcggttggcagtggtggggtgtcctgcacatggtaagcttgcgtgagagagtgaaaggggctgaaatctggtctgtgtgccctgcatcaagccatgcacccagggctgggtccagccaggggaaggtccctttgactgatttgctaaaaggacttgtagatttgtgtgggcctggggtccctgctttttaaagcagtttgagcaaaagcaaagtagtagtgattacatctcaggctcttggtggtgtgaattcacacacatcctgctttgggttgaactgtcttcatgcttggtaaataatcattatagtagcctttccctctctataaggggcgagtgtgtgtgtatagataagtcttagtcagtttgggctgctgtaacaaatggccatgcactagatggcgtaaacaatgaacatttatttctcagggttctggaggctggaagtctgagactggggtgcagcatgcctgggctccgggtgaaacaccctcttcctcttccaggttgcagactccctgggtcttcacgtggttgaaggggtgagggcgtggtttctctccagcctttttgataagggcactaataccattcaggagggaggtaattcatgatctaattacctcccaaaagccccgcctcctaaaagcatcacatcaggggttacaatttcaacataggaattttatggggacagaaacattcagtctgttgcaacacacacacacacacacacacacacacacacacacacacacatacagataaacaaacacacatttccacccaccccagagcaccctgcacttttcaagtgactagttaggtggggcagggttaaggagaccatcagaggacattgttgaggcacccaagacacgacagaaagccacctctagggctgaagggctagaggaggacagggtgtttctggagcccagtgagagctggggcagtggtggacacagctgtgtcaggacaggaggcccagagcaggaggygatggaggaaggcactgactcctttctcctgtggcccttcaggggcctgcccattggctcatagtggaacccggtcacagcccatgtggcaagaccccccatgatgccttgcacaaggtcagcctcctgggcccagagcaggtgagggaagggcagtggatatgtcgggaggrtggagtgggcaggtggtgaataactggcactcgggttatcttttcttgaggttaggattgctctccagttttataggtgaggaagctgagctcaagtggttttcctgtggcccacctgggtgtcatagcagagtgagccctggaayccaggcctgcctcrtcctgacttctgtgatctcgggcgatcacatagatcgcagtgttcgctcttgcatcatgtgtgtttgacaacttttctgggtgcccctggccctagggtaagacatgcatagagtccaagtcatcatttaggtcaaatctctaaagtcaacttacaaaaaggaacaaagaataaccctgcaggtgccattggccaggttgtttcttcaccgcccaatgatgcctgactttggctgggaccgtcatgctttcctagccacggttgatggtgcagaggaggaaggaacactcccccaggagagtttgctgggcttgacagcatgccctgatgacctctccctccctctgccttggccgttctggttattttgaactcctcttgtgttctcacagatgctattcaggtttttgacrtcaccgctgtgaacatcagtgccacaagcctgaccctgatctggaaagtcagcgataacgagtcgtcatctaactatacctacaagatacatgtggcgggggagacagattcttccaatctcaacgtcagtgagcctcrcgctgtcatccccggactccgctccagcaccttctacaacatcacagtgtgtcctgtcctaggtgacatcgagggcacgccgggcttcctccaagtgcrcacccgtgagttcatgcctggctctcaccaccctttcctgctgtcctgctccgtgccaggcccagacacaggatgcatgatgtagtaatggtgactgttggctgaccacacgccaagcttcgtgtgacatgctttccttgcactggcacattgtatgctcacaayagccctgtgatgtggttggaagtagccttattttatagataggaagccaaggctgagagagktgctagacaggtatcacagctggaaagtggcagaggtgagattaagcctctggtatttctcacctggagcctgcgcttgtaactctctttccagtgtggaggagacctagagtgaattgatacagggagacaaaaatgacctggtattcatatccccttgtgtcttgggtgctgacattataacgaatcactggcacagctgtatctcatctttgtttgtttaaatgtcccttaaaaataagattttatgcagcaaataaaaagctttaggtttcaaagaaggtccgataatgtaaaataaaacagtaatggtgcactagtagtacagtggtataatattgattatatactattaaacaatagtagtgacaccagcactgcattttgcactgtgccatgagatttatagacactgtagtggcctccgaggtaggtattggggtccccttttacagatgaggaaatgacaccctgatggctgaacagtttgcccaaagccacagagctagtgagtagcagagcaggacttgaactcaggggtgtgtggctctggacccaggcttatcccacaagaatgtccattccttcgcaggaagcacaccttagcattcttatagatgtattttggactggatctttgggaaaatgaaatatgcttgcatttctttaccttttactcttttactatttattagttaggattaggttcagccacgaataacaccaccaaaaacaacaacaacaaaacccaagtatccgtggcttaaacaagacaggggtttatttctctctcctgtaacagaagcccagtgctaggcaggatggggatgatagaggttatccaaggctcagttgtatgaaacagaaactgtgagctattttaaccaaaagggacttatcctgggaattgaggttttgcagaatcattggaagagctggtgtattagtttgctagggctaccagaacaagtaccaaaggctgtgtggcttgaacagaaatatactttctcatagttctggaggctgaaggtcaaagattaaggcaacggcaggtgtggtttcttctgaggcctccctcttggcttatagatgactgtcttctccctcacatggttgtccttagtctgcgtgtgcctatgccctcatctccctttataaggacaccagtcttgctggattagggcctaccttcatgacctcacattaacttaattacctctttgaagaccctgtctccaaagacagccacattctgaggtcttgggggttaggacataaacatacacatttgggggtgagggagcacaagtcagctcataacagttgaggagcaggctttaggcctcgccccaagaaatgactcctggactaagtctgcagaactgaccccctggagagtcaccaccttggtcacagacagcagagggaggaatcaggaagtctctgctgtagttgcgggatccaggggtstatgttctgagctgtgatcctgggatcaggaagctgcagccaccgctgaggttttggttctagagccaggcagcgtgagctccagtcattgcatccacactacaggtataagaaggaggaagggcagaaggttgtgccccacccttaaaggacacttcctagaagtcacccagtacctctgctcatgcttcgttgagcaaaacttaktcacattgcaacatctagctccatgggagctgggaaatgtggtctttgtttccaacaggtatgcacacacagggctaaaaatctgggtgggtatgatgaagggaaaatgggggaatggattttgggggtcaagactggtctctctctgctgtccctccctgaacagaggctctgggaggctagtaatgcattcgagataaagcagccagtgtggccaaggttctcctccagagcctgagcccttgaccacaggagctcacgcctcctctcatttcctgtgaatgattgtgtgcaatgtaagcacagagcttctgcactctcatgatmaagtgctctctccatggccagaaacagcagtttctgaggggctcatgttgtaggtgatgatacaaagaagacagagagagggatcaggtgtcctaagtgtacatttcatctcagtattttctgaggtggggcatccctgtctcctggagaagtatatttttaatctagttgtttactttctttgcatagcccctgttccagtttctgacttccgagtgacagtggtcagcacgacggagatcggcttrgcatggagcagccatgatgcagaatcatttcagatgcatatcacacaggagggagctggcaattctcgggtagaaataaccaccaaccaaagtattatcattggtggcttgttccctggaaccaagtattgctttgaaatagttccaaaaggaccaaatgggactgaaggggcatctcggacagtttgcaatagaactggtaagcaaataggcttttctgttaaaccatcatgtttcttaaaggaaatcagtataattaataaacataatgtttccaaatattgtttttsttttaattatctaagaaaaaactttaaaaattttcataacactaatgcttatttattatatgaaatacagacaagtaagtagaaaaaacttacatggaaaccatcaagcagagataatcacttttgatgtatgacattttacaatttttaaacatatacatatagatacacaaatatatgtgtgagtatacatatatttaatacatatatatttaatatttaatacacacacacacacacacacayatatatatatatatatatwtttttttttttttttttttttttgagacagtcttaccctgtcacccaggctggagtgcagtggcatgatcttggctcactgcaacctccatctcctgggttcaagtgaagcgattcttgtgcctcagcctcctgagtaattggaattacaggtgtgcaccaccatgcctggctaatttttatagttttagtagagacagggtttcgccatattggccaggctggtcttgatctcctgatctcaaatgatctgcccacctcagcctcccaaagtgcttggattacaggtgtgcgccactgcacccagcccacaaatatatatttatttctttcacaaacattgaggccatctgtacatgtggttttgtaatctgccttttccccaacttgccaattaattatgaatattctttcctcttaataaaatatttctacaggatgatttgaacacctgcctggaattccatcatctgaaacagagttggcagataagaatggcccctatgccaaatttggctcattgtctgtttttgtaaataaagttttattggatcacagccatgttcatttgcttatgtactgtctatggctactttggtgctagaattgagtagtggcagcagagaacgtgtggcttgtgaagcctgagatatttattttctggccattacagagaatgtttgctgacctctgggctagatcagtggttttcaaattgtggtccagggctctctagggatccctaggttctttcaaggggtctccaaggtagtattatcataacaatactaaaatgttatttggctttttcattctcattctcttttggagttttccaactttgatccgatatgggatgacattgtctctcaggtctaatggaatatatgctgtggattcttacattttaaaaatttcttcattttaaatccctgatatagtaaatattaataaatataacctatgtaaatacaaattctctgagagccttaataacttttaagatggtaaagaagtcctgagagcaaaaagtttaagaacctctggtcaagatgtgttagaaattaactactgtgctgtgttgggcaggtggactgttcacagtctttcctaaacaacactgtgatgagatactttgttagttctagaaggctaattgaaattgataaaatcattttatagtcagctacggtggcctgcacccatcgtcccagctacttgagaggctgcggcaggaggattgcttggcccaacagttgcagactagcaccagcctgggagaccctgtctcaaaaaaaaatttttttttatagaaacagtttaaattattaaattrtttctaggcctacaggagaaacttctgggaaatcctagagagtaatgttcattattgttgttttaaaattttgaaataattgttttttggaaaggttgaaaaacatacagtcttccttgatctaagattcaagatagttgaaatcttttatacagagggtagaataaagatatacctaatgtaaatgatgagttaatgggtgcagcacaccaacatggcacatgtatacatatgtaacaaacctgcacgttgtgcacatgtaccctagaacttaaagtrtaataaaaacatatatatatatataaaagaaatgggacagattccttgaaacacacatgaaatgagttacgcttttgagattctccttgaagaagcttcttcaactgtgctggttgggttaagcaccgatagtcactcagaggatctgcttctgaaataagggatctactaaaatgcatccctcagatgaaatgcagtattccctttgcaaatctgcatttcagactgttgacatgacgtcttaacgtcaacatgtttcttctgtcttttaaggatgtggataatggtaagaggatcaccactgagggagatgcatgatgttgtgctacttgctattgcccagaacttactgtaacaataatataatatgctgggggtctgcgaagtgctgagtgctctcatactgcattttacatttttaacacaacttcatggagcaggtattattatcatttctgtcttacagagtaagaaatgggggctctgcaaacttaagtaactggcccagagtgacaaggtggcaaactgacctgtgtctgctgtctaagaccaagtgcttaaccaccatgtagattgacactttgatgtggtacagcagtaaagtttagtattagtgaggagagggcatctcttttactatagtttattgtgaatattctttcctcttaatatcagtatttctacagggtaattttaacacctgcctggaattgcattgtctcaaaggacccgtttcattcaatggtcccattgaatgaaagtcaagaaggcttgctataagatctaaactcttaggggggttacctttctattatcaaataacctttattgttattggaaaaagtcagcttaacagcattaaaagcaatttcaaaaaaaggaaacgaataccatatgatccagtaattccagtcctatgtatatctccaaaagaattgaaaacaggcccctggacagttatttgtacatcagtgttcatagtagtagcattgttcacagtagccaaaggtggacccaagatcccatcaacaaatgaatggatagataaaatgtggttcatccatacaacaaaatactattcagccataagaaagaaagaaattctgatttatggtacaacatggatggatcttgaggacattatgctaagtgaagccagacacagaaggacaaatactggatgattccacttacatgagtacctagattaggcaacttaatattctacagaaattagaatagaggttaccaggggctgttcagaggagggagtgggcattattgtttaatggctacagtttatgctggggataatgacagtgttttgggtacaggtagtggtgatagttacacaacattgtgaatattgatgataccgaattgtacactgacaaatggttaagatgataaatattatggtatgtatgttttaccacaataaaaatgaaaaggaacaaatatctctatttttctaacccaactgaattccttttctctctgtgtccacagtcatacattttgcttgtatactgtaattattatacaaatacttttattttgtatttgaatttctttttactcagtctataccacaactttcccctatagttagcatggccttcatatttttagtggctaaagagtatttcatcatgcagccagatcacagtgcccacagccctccccatgttattgaatatttaggttgtttctaggtttttatgtttatagacaaaggctgcctttcatgggcttttgtctgtggaatccctttgacatcaggaatctgctggtaggaaacaaaggctcctcccagtggcttctctgtaaggagaatccacttaaaattaaaaaaaaaattaattttggagtagatagtacgtaaacatgrcacaattttttttgttttttggacaaggtgtttgcagtgaaagcatttcccttttttgtcccctacctgcccatttcctctccctggaggtgacgtttgttgccaggtaaagagagacagggttgaaagccgcggtagaaaataggcccagcctccgcggttacttccgggcctctatgtaggcatccctggtgcaggtggctgagtgggcagcgggagatgatcggaggatgggctcctgtgggagattccatttctgactctgctctgaaggtgcagggtgtgcctgttttcttcccttcctcatccgtcctcaaatgctgcaacttagtaaaggtcagctctccatttcagttttcctctttggtatgtaaggctgtgtcacgggaagatgtttccttctgagtgactgatttaaaaaacacaacaaaacaaaaaaacctctttattgagatataatatacataccgaaaagggatgtatcctcagcacatagcttcatgaacttttacaaactgaacacatcttgttaccagcacccatataaaaaaactgaatgtgatttccacttcagatgaccccttgaagggctttttttttttttttttttttgagatggagtttcgctcttgttgcccaggctggagtgcgatggcgcgatcttggctcactgcaacctctgccttccgggttcaagtgattctcctgcctcagcctcccaagtagctgggactacaggcatgcaccaccacgcccggctaattttgtactttttttgatagagacggggtttctccatgctggtcaggctggtctcaaactcccgacttcaggtgatccgcctgccttggctgcccaaagtgctgggattacaggcgtgatccaccgcgcctggcctttttttttttttttttttttttgagacaaaccctcattctgtcgcccaggctggagtgcagtggtgtgatatcggctcactgcaacctctgccttctgggttcaagcgactcttgtgccccagcctcccgagtagctgggattacaggcgtgtaccaccacacccaactaatttttgtatttttagtagagatgggttttcaccatgttggccaggctagtctcgaacctctgacctcaagtgatccatctcggcttcccaaaatgttgggattacaggcatgagccattgcacccagcctaagggctcatttttaagacaacaacaaaaaactggagaactggtaagataaactgggaagttcatgtgcgtcacagaagagctgaaattcttgagagcactgagtgtgtgcatttctcagctcgattttggagtgtgccttttgtgaactcattagaaagcgtaatggcaaaagagcaggtcctctcgacagcacttggagaggaagctgggcgtcatgatagtaacagttttcccttctccttcctttcttctgagcagttcccagtgcagtgtttgacatccacgtggtctacgtcaccaccacggagatgtggctggactggaagagccctgacggtgcttccgagtatgtctaccatttagtcatagagtccaagcatggctctaaccacacaagcacgtatgacaaagcgattactctccagggcctgattccgggcaccttatataacatcaccatctctccagaagtggaccacgtctggggggaccccaactccactgcacagtacacacgtaagtctcttaggatgcccytctaaggaacagcctctctaactgtctcttggaggaggcactggttaaatgatggccagtgtgcttctgggatccaggttgactctgaaactgctgaagttgaaaacattggtctcagcaatggttctgctgtcaccatggggcactgttcttcaagctatgtgaacttagaattgtcattagaaggaagaaatgattccttgggaatggtgactgaaatggttctagtcattccttgagaatacagagtagagaagggtcaccttgtcatgttggtattggaagatactgcccagatgaggagcttcgcctgcaacagttagggaggtgttttgcgaayatttgaattaaatacatggtaaagatgttagtttgtaatatgtttttagtatatttttctccatctattagatttaaaaaacagattagaaattaaatgttaaaaatatrtttgaaataaacttgaagtattaaaagaagcctaaattaaacttcttttgagacttaatctgtataattattttcttgatgtgtttttgggaagttttccatcttttgagccagcaaatactagttttattcattctttctaaaacgagccaggctatttttggatatagtaaatagtcctggaattctacttaatctgtgcttttacatgaattgccttttttttaaaatcaagggcccagcaatgtgtccaacattgatgtaagtaccaacaccacagcagcaactttaagttggcagaactttgatgacgcctctcccacgtactcctactgccttcttattgagaaggctggaaattccagcaacgcaacacaagtagtcacggacattggaattactgacgctacagtcactgaattaatacctggctcatcatacacagtggagatctttgcacaagtaggggatgggatcaagtcactggaacctggccggaagtcattctgtacaggtgagtgtagccccarctgcctcttggactcctccctgagtggtgctgaccttgcaggtcagtcctcccaagtctgtagtttgtctggttttgtgtgatgtgcagtgatggacattgagctttccgaggcatcctgttagcttatcggtgctgtctcgatgccctcatcatttctgcattcaataaatatttattgagcatataccatatgccagtcaagtccttgccttcttggaacttttcgaaggaggaagtgggatgtttacctagagtgctcaggaaaggcctcaatgacaaggtgacttttgagcaaagatctgaatgaagggaaggagccagccatgtggatatcagggcatgagaacattacaggcagaggcctgtgcagaggggcctgtgcagcatcaccactgtatctggaggctggaggaagagcaggaggcaagggtgggaggagtggacccgcaggaacaggaggatataggtgggaggtgaggcctgagtggggctgagccaggatgtggatgatatctggcattggtttgtcttttgtgctggagaagatgaaaagtttattgaaatgatgcccagcctttgcatccttcttgatcctcacctatctcacaactgaaaatgtgtgataaagagaagagccctctgtgtaattgaggatgctttcagggcagcccaggaaaggctttgcagacagtggtgggcacttctgctcacagtgctgactgtggcacctttatcactcagcacccgtgcactactcattttctgcccttctcgctcctacctcttccctttttagcccaggccattcagatatgttcaggctgatttggaagtgatggtctcatgggatcagcctccctggtagtataggagctccagccttgatggcctctggcttttcagtggtgagtggggtggccacagaaatccctgcagctttgggtcacttctgctccatcccacctggtctagacacccatctttgatatttgggtgcctttcattgctgatatttatcttagctatagttatttgtagcctatagcaagagaaaaactgtatctgagcatttatgactgggtgtgggtggaacaggagctgtaaaagtgggtgcagtgttcaggttacctttccaggccctgggtggcaaatgtgggtgttgcactaggtgccttggtagagcttctcctgctctaaaattctgtgacattcaattaatgataatactgtcctccagttgtaatatggagttttctatttacatcagtttgatgttagtcctcagtaaaaatctaatggccctcagatagagacaaataacactctattttgaagatgaggaaactgatgcatcatcaatggatgatgcagtatgttatgtgagtagagagtgtcttgaacttagacttagaaaacctgggatctagttttggcttcaccacctgccatgtcatcatcagccaattacttaacctctctgagcctctgtggatttatctgcagatgggacagtataggcctcacctgtctcagaagtatcatcaagagggccttggctgggctggtggctcacacctgtaatcccagcactttgggaggccaaggtgggtggatcaggaggtcaaaagatcgagaccatcctggctaacatggtgaaaccccatgtctactaaaaatacaaaaatcaactgggtatggtggtgcatgcctgtagtcccagcgacttgggaggctgacacaggagaattgtttgaacccgggaggtggacgttgcggtgagctgagattgcgccattgcactccagcctggtcgacagagcgagactccgtctcaaaaaaaaaagggggtcctcatgatgagatggtgcaagtgaggaggttgctacttctcacaggatgatacagctgactctcatggagccctggtctcttccaggcgtctttcttggtgcctgacatcattgttcaatttactcttcaaagagtcctgcagctgaggctcagagcagttgggtgactgacccaagctcacacagtttggtgttgcccaatttagggtcagcccctgcctcttccaccacatcacccacccaccttctcatccccaggattctgctactccctatttccatgtttgcaaaggcaaaagtcccggaatctcatgctgtgctgtacttgctttgcagatcctgcgtccatggcctccttcgactgcgaagtggtccccaaagagccagccctggttctcaaatggacctgccctcctggcgccaatgcaggctttgagctggaggtcagcagtggagcctggaacaatgcgacccacctggagagctgctcctctgagartggcactgagtatagaacggaagtcacgtatttgaatttttctacctcgtacaacatcagcatcaccactgtgtcctgtggaaagatggcagcccccacccggaacacctgcactactggcatcacaggtgggctacaaggcaggggctggtcagttggcactgtgatcactcctggagcggctgacccacagtgggtctgcacgtgtggactagaaatctgtttttgtttttttatttcccctaaaatatttgcttttactgacatagactggtttctcattctatagaaatcaatctaaaaaagcagagtaagaggggctcattttttacattctaaaagattccttttctttacagcataactcattgcctcattgccatgttttcttttatatttttttgagatggagtcttgctcttgtcacccaggctggaatgcagtgacgcaatctcagctcactgcaacctctgcttcctgggttcaagtgattttggtgcctcagcctcctgagtagctgggactacagacacatgtcaccacgcctggctaatttttgtatttagagatggggtttcaccatgttggccaggctggtcttgaactcctgacctcaagtgatccacccgccttggcctcctaaagtgttgggattacccacgtgagccactgcgcctggtcgtcttttarcccacatctgttggtggcttactgtgtgctatggtgagggatactatggtgagtaggggcgacagggcccctggagcataggactgagaagagcattgagagggagaggatttccaggtctggtggtgggtgagctagcatgctgctgccarttttgcagcaaggacctggggatggaccttctctggccagctacagggtatagagctggtgggaaatgcaggagcctgtgctagcagttgaccattaacatgggaacgccacctcccagcgggcactgctgccgcatacttgcgaggttgctgaagcttgtagttyagagcaggaccatcccactagatgtgcaatgtgagcctcaggtataatttaaagttttctagaagccacactgaaaaaaaagtgaaaaggaatagcygaaattggtattaatagcattttacttaacttagtatattaaaagtattatttcaacatgtaatttctgtgaagtattaatgagttattttatgtcttcttttgtactaagtctttgatatctagtctgtattgtgtgcttgtagcayatctgaatgcaaactggtcacctctcaggggcttggcagcygcatgtggctagagggctgctgtatcagcacaggtttagacaattatgttgtggttgttttggagttcagatttctgtctccttgaatcttgaatatatataataatgagaacaggctgggcgtggtggcttatgcctgtaatcccagcactttgggaggctgaggtgggaggattgcttgagccaggagtttgaaaccagcctgggcaacatagcgagatcccatctcatttattttttaaaaatatataaaaaaaatgggaataacccaaactgtatgtgtgagatgaatttaggtagagagagagagtgtgtggagtggatcatctttaattcagtgtgttctttcttttgtgttagttcagagagtggctccataccctggcttggaaagggggggtgtgcacaatcatggaggccatccatggagggtcctgtgggggcttttctggtttctgggaagaggatctgttgggtttctctaggtggtatttgagaccaactctgggaaaaatgtggggactgtttatgaagaacacagagaagtgctgtgcccaggtctcagcagaaagtgtgttctctcccacctcatctgtgattcttctccttggacatttgctccgtctttgctctcagctgaccagctgatcctggggccaagccaagtccatgtggtgtcattgtgcagctcccaaggccacaccttagagttccaccacagtctctttctcactctccttcttccaccccagatctcaggataatgaacccggctcatcttgagtcatatgggactgggggagaggacaagggcaggttagcttcctcatgcaaggatactagcttcttactctaatgatggtttcttttactgtgcaaaaccttttcagtttgatttaatcttgcttgtcaatttttgcttttgttgctgtgctttttgtgtggtatccaagcaaccattgtaaatactatgtcaagaagctcttccccaatgtgtttttttttttttttaaacaaattttacagtgtacagctttaggtctaatgtttaaggcttgaatctattcagagtttatttttgtgtctggtgtaagatagaggtccagttttattattttgctcacggatacacagttttcccagcaccatttgttgaagaggctgtcttttccccattgtgtcttcttgacatccttgttgaagataagttgactgtatatgtgagagtttaattctgggctcagtattctgttctatgggttgatgtctgtctttatgcctttaatatactgttttaattactgtagctttgaataaatatatcttgaaatcaggaagtgtgaggcctccagctttattctttctcaacgctactttggctattcctggtctttgattgttccatgtgaactttaggattttttttttatattctgtaaaaattgccattgggattttgatggagcattgaatttatagatcgctttgagtagtgtcaagtcttccaacaatgtgaagtcttccaatccatgagcatgggatgtctttgcatgtatttgtgtatttgtatcttctttattttatcgatgttttgtggttttcactctacaagtctttcatctccttgattgtattctaattatatttcaatcaatctgttaaaaaataaaataaaagcatgtactgttcaaaacaacaatagcaaaaccaaacaaggctgctgggtgcctgccctggggatttggctggatgccctgaaggggtcattgtgagctaggtgggtttcccaggatctgctgtctctgctcctcaccagtttccttccctgccttttgcttctggatttgctgttttgcacgagcccagcatgtagcttccagagtaagatcttgaggaggttgctgaagcatgttctctacctaatgtgttgctttggttttcaatattgggtgatcatgttttgttttgttttgttttagatccccctcctccagatggatcccctaatattacatctgtcagtcacaattcagtaaaggtcaagttcagtggatttgaagccagccacggacccatcaaagcctatgctgtcattctcaccaccggggaaggtaaggagaggcctccgtgggttaaacagcccatgagtgatgcagtgaccagagctttctctgtgcccactgaggcatgtgagtaatgcagacacacgcctgtcttctcactgcagccyatgctgtgtactcagacagagaaggagggtgaggtatttgcctgatggttgacaaactttctggaaagggccagattgccaatattttaagctttgcaggtggtatagagtctgttgcaagcattygactctgccattgtagtgtgcaagcagtcacagaagatacagaaggaatgagtgggaccattcccactagatgttatttaccatggcaggtggatttggtttgtggcccataacttgctgatctgtgatctaggtttttcttctcttttacctcactgggccttttaggtggtagaatattagttttaaccaactctgtctctctctctcactctacacacgtacacacatgccatcctcagaggatgactttcctttgaaagaaaatagaaaaagatttgcatttgctagtgggaatttgcagagtatctccttagctgagagaagaggtggattaaaagctgcttttccttaaagggctctgttacattcttttgtggtaggaaaggaatcattcgagagtctcttcggtagctgtgtttgagtgcttgcataaggcctagatttaaaagcccaagttttgttgggggggttccctcctccccctcccctcctccccctcccctatcatcatcgtcccattgtcctccaccctcccctctcctcctcctccccttctccccttctccccttctccttcccttccccttccctctttctttcttttagagacaagatctcaccatgttgcccaggctggtcttgaactcctggactcaagtaatcctcccaccttggccttccaaagtgctgggactagactacaggcatgagcctctgtgcctggtctgggagattctttatgcatgaataatgcagtgtttcctctgcccactctctcctactgtggtgctgtcctcatgtccttgaggaggatagagaccaaacacactgtcggggttagggatctgggaggatagaaatttgctggtgccataacctgtggcaaaatttcaaaaagtgaggttgaaatctctatcttttaattttgggtctgtttccagctcttagtcattttgctgtgatgcttgtcagcaagtcccattgaggaaggccatgttgcatagcagccagactgaccagtgctggcctgtgattagatgaaaccttgggctctgagcccgatgccctggattgggaacccaactctacctcataggcagtgtgaccttgtgcctggtcctgttagccttttgtaccttcgttttcttgtctgtaaaatggagacaataagcttatgtgatgggattcatggggatgaagtgagttactgtaggtgaaacccttagaattcaatgtaagtcaaacctggcacagagagatacttgagagatggttgctgatcactatcacccaacatcaccaccatgtagatatgcaggagaagaaatctctctgccatcactttcttatgattctccttctgtgtacctttcttagctggtcacccttctgcagatgtcctgaaatacacgtatgasgatttcaaaaagggagcctcagatacttatgtgacatacctcataagaacagaagaaaagggacgttctcagagcttgtctgaagttttgaaatatgaaattgacgttgggaatgagtcaaccacacttggttattacaatgggaagctggaacctctgggctcctaccggtaatgtcttctggttcttactctttgggggctgagcctcatgagcataaagctctacatgcctgcggtcagacacgtctcagggacctctttttgctctttgttatcccacagggcttgtgtggctggcttcaccaacattaccttccaccctcaaaacaaggggctcattgatggggytgagagctatgtgtccttcagtcgytactcagatgctgtttccttgccccaggatccaggtagggagaagacaacagtcctggcactggttcagtggcattttgctccacgtgtccatagaaggccagctgtgtacatgcctccctcagaccttcaggagggttggtgtgcccagctctcccctcccagaggttgagatgtcactgggtcaccgggcttactgggcttcctcctccgaggtcccacagcctggaccccacactctcccttctctaagtgccagttgttcttccaatctgcaaagattattgactccccttatctatgtgtggtcacttgtgggcccatatgccaggtgcacagtttgacacattgcattgaatccttaaatagtagaatcagaggaagccacataaattgtcttgttcaatcctctgtttatttttcttcataattttaattatgtttattgatttgtttattttattttatgttttttttttttttttttcagacagagtcttgctctgtcacccaggctggagtgcagtggcacgatatctgctcactgcaacctctgccttctgggttcaagcaattcttctgcctcagcctcctgagtagctgggattacaggtgcctgctaccatgcccagctaatttttgtatttttagtggcgacggggttttgctctgttggccaggctggtctcgaactcctgacctcaggtgatctgcccacctcggcttcccaaagtgctgggattataggcgtgagccaccatgtccagcctatttattttatttttgagacggagtgttgctctgttgcccaggagtacagtggcatgatcatagctcactgtaactttgaattcctgggctcaagggatcctcctgcctcagcctcccaggtgggaccacagttgcttaccaccatgcctggctaattttttgtagagatggggtcttgctatgttgcccaggctggtcctgaactcctggcctcaagcctccttccaccttcttccaaagctctggggttacaggtgtgagccactgtgctctgcctgctttttggaagtgagacttttaaggcctagagaggggaagtaacttgtccagggttacacgatggctttagaggcaggcctgaaattctggtcttggacccttgttaagtgcttctaccctttatcacatagacctaagtgatacaggagcttcagggatccaagaggggtgcatcccctaccttcaagccagaggctaatggactggctggtttgttagtttgtctgcttttctttcctagttggtggttgttgggcgcaggaaagaatgcctgccccagaagcaaagtttagggagtccccacatccttccccggtaaacaaatgggtttcctgtcacctgagcatggatgctgctgtaggtacctctgctcatatgtgggtgctagtctcaaaatgtcagaggtggcaggaaaaatatctgaaaatccagcccagttccctaaatttgcagttgaggagacagacctggagaggaacagtaactttctcaagaccatccaggtagtagtggattgggaacaggaacctggcttctgcatgcatagactagttttaggtccaaagctatttaactcccttgtgtgtgtgtgcgcctgtgtgtgtgtgtgcatgcatgtgtgtgtatggtatacacactttaactctctggtgttagggtcccaggccagtttttagcacattgtgtggtctgcatgaacacctcttgaagtgtctcccatttggacttttctcaggtgtcatctgtggagcggtttttggctgtatctttggtgccctggttattgtgactgtgggaggcttcatcttctggagaaagaagaggtgatattgcttatgctaataataatactctggtatttaaggaagctttctattaaggaacatttcaaactttgacagattcagaaggaatgatatgatgagcgccatgttcccttcacccatagtgttctgcatttggccagtcctakttcctctgcgcccccagctgggcgatgttaatgtgctcccagctgtcacatcaggccactgatagacgccacagtgtgggatgctactttcaaatgatatgttcttgtttacaagtcagtttcatagtattatgatgttaagagatttcatttcagaggtagctaagtttgaacaccagctctgtctttgaccagctgtttaggaagcttagccttaatgtcctcatctatgataggaggataatcattgtgcctaacttgtgaagctgaggaggattgaataaataaggcacttctcagtgtcttgtgccttgtatgctattactattattttatctgtacaactaccctgtgaggtcattaaatggtaaaagtagcagccctgttttgagtgctcaccgtgtgcctgcatctgtgctttctgtgaattatcgcatgcatgaggctctgcgaggcaggtccagtaagtcccttccaaggatgcagaagctgagtcaggaagtgtggaaatagaacttgaacctggtccttgcacttcatggcacgccctcttgtctgtgtagtgtgtgaagcctgtgtgtgttagttgggatttctttgctgtaaggtgctgccaaccagggaatctccatcctgccttaggggtcttcatgcggcccaggccggttccttgtgctgccaccctgccctgttggagtgacaggcagagctcatgctccagcttttaggttaggttctgtttttttttttttgagatggagtctggctctgtcccccaggctggagtacagtggcatgatctcagctcactgcaacctctgcctcctggttcaagtgattctgctgcctcagcctcttgagtagctgggattacaggcaccgccaccacacccagctaatttttgtatttttagtagagacggagtttcaccatgttggccaggctggtctcgaactcctgacctcaagggatctgcccgcctcagcctcctgaagtgttgggatcacaggcgtgagcccctgtgcctggccagattaggttctgattttggrgggggaaatggatcagtcagtggctggataaaacagttttattgtttcttgttaaaaataagagtaatacatgcttatggcaaaaaatatagaaaagaagagcaaaaataaataggaaatctgcaatcgcagaacccacacaaaactactcttaacattttgatgtgaccaaactcacacacaaatgtgtgcacacacatggaatcatgttacatgttagaatcaagcctgctttattcagcttagacattgttggcagcttcatttcatcacaattttttttttttttgagacagagtttcgttcttgttgtccaggctggagtgcaatggcgtggtcttggctcactgcaacctctgcctcctgggttcaagcgattctcctgcctcagcctcccaagtagctgggattacaggtgcccgccaccatgcctggctattttttttgtatttttagtagagatggagttttgccatgttggctggtcttaaactcctgacctcaggtgatccacccgcctcggcctcttaaagtgctgggattacaggcatcagccaccgtgcctggctcatttcatcatcattttaagtggctacagagtattcaactgtatgacagtaccatgatctagttaaccaatttcctaggtgtttccaagttttttttcttggccacagttacttatccttgtgcctaaatctttgggcacattcacgattatttccttaggctaaattccaagctaggcaagtgctgggtcagtgggtatgcgtgctttcagttttgatacatactgccaaattaccttccagaaagtttttcttaaataccaatgcagagttgagtcaacagtgcaggagtgtrcagatgcctcaccaacttgccagttccggatctgatatgttttttggtttattgcattcatttatcagaaaagctttctcaaaaacaaagtatgaaataacaagtcttgctttacattaaagtaatgccactgctatatatttgcaaggaagttcttaaaagtgacttggatatgatttttttcattcttttagatagtacaaaagaaaataacttcacaaatttgtaattagcatttgcagcttgggtcattaagtttagtattagggggcaggatttggtgtcagcggtgaactaatgcctgaggaaaaggtgtaacacctttatttcatagatgacatcaactccagatacacaagggaaaagcacaggaaggaatccttttttgtctaatgggtctcttttctcttaaaacaggaaagatgcaaagaataatgaagtgtccttttctcaaattaagtaagtctctcaaattatgagctttattttaaatcctccaatctgttcggtgactatctataaataatttttgatggaacttgctgtcatttttcctgattgrcacattttgaccatgaccatctggaagtttttgctagctctgttttctgcaaggaatctatgttttattagtctcctgaagytggcttccttgtcatgttctactcttctaccaataaatacggatttcttgattaaaaaaacgtcaaataggttatcaagatccaggggagagaagaacttacttaaagtcacaaaaccaattagttacaaagtagggtctagaaatcagatttcctgaatcatattktagtgttttgtgaataatagtactctgaccccctcttgccaaattatrccctgggttttgttgttttgggaagattgtttactrtcatttctagagtatgaatgagtctttctaattgcatattttttctttccctttctatcrtgaagacctaaaaagtgagtaatctctttattttttttaataacttgtacttttctattgaatatggacttcactgaatgtaaaaaatcctgataagttttgttttcttagatctaagttaatcagagtggagaattttgaggcctacttcaagaagcagcaagctgactccaactgtgggttcgcagaggaatacgaagtatgttgctgtaaatactgtttttaattgtgtcaggttccaacccaagctgggatcygaggggagttggtggatgggtggcaggtagctgaaagaacactcgagggactgtaggcagttgggacatggctttattctctctcctacagagtcagcagtgcagttatattactcacagacaatagtggctcaaagccaggtatgaactcacacaaacaggttacattaaatggctatataacgcaaggggttgttgcgctccaaaccctttgcgtcatactgtcctggatgtctacctyggactactcctgactgaagcacagccactttccttagaaattggcttgtttttcctgaaagttagaaaactgttaacagaaactaggaattcaagtcagggaactgttagccacaatacttaggaagctatatgagctggaaagaaaccaaatgggcatgtagaggtctggggcttgatggcagtgtggcctaggatggcttgtgaggctcacttctgaagccctgcacaaggamtttcttggccagtgtctgcctttcagttccccatgctgtgctccaaccagcccaggaaccagccctgctcagagtgaccatgcacactcgtcctcctgtgctgccctgtccagcatctctgcctttgctctcttgaaatcctgctcagcactcagcacagtgcacatgctgcttcctccatgggcattctgggatcccattaggaggacttgagttctgtgtgctcagactgccttgtttcccctgttgcttgttaccaatattcagcatttctttaattctgcctttttgtaatgttagttttttctgtgtacagtacacctctcctccaggttgcaactgcttgaaggcaagggttatcctttttcctatattctaacctttgtattagttctctaggctgccataaaaaagcaccacaaactgggaggctgaaaacaacagaaatttactgtctagaggccacaagtcccaaattaaggtgtgggcagggtcacactcccttctaaacctctgggcagcgcccttccttgcctccgcagcttctgggagccccaggcgtcccttggttttgtggcagcaacactctgatgtctgcctctgtgttcacatggccatctcccctcatgtgtctatgtctctttgtctcttttcctcctataaggacactagtcatatgggattcagggcccactctaatctagtatgatctcattttaatttgtttacatttgtaaagagccttttttttttatactttaagttctaggatacatgagcacaacatgcaggtttgttacatatgtgtacatgtgccatgttggtgtgctgcacccattaactcatcatttacattaggtatatctcctaatgctatccctccccccaccccatgacaggccccggtgtgtgatgttcccctccctgtgtccaagtgttctcattgttcaattcccacctatgagtaagaacatgcggtgtttggttttctgtccttgcgatcgtttgctgagaatgatggtttccagcttcatccatgtccctacaaaggacctgaactcatccttttatggctgcatagtattccatggtgaatgtgtgccacatttttcttagtccagtctatcattgatgkgcatttcrgttggttccaagtctttgctattgtgaatagtgctgcaataaacatacatgtgcatgtgtctttatagcagcatgatttataatcctttgggtatatacccagtaatgggatggctgggtcaaatggtatttctagtttcatatccttgaggaatcaccacattgtcttccacaatggttgaactagtttacagtcccaacaacagtgtaaaagtgttgctatttctccacatcctctccagcacctgttgtttcctgactttttaatgattgccattctaactggtgtgagatgctatctcattgtggttttgatttgcatttctctgatggccagtgatgatgagcattttttcatgtgtcttttggctgcataaatgtcttcttttgagaagtgtctgttcatatccttcgcccactttttgatggggttgtttgattttttcttgtaaatttgtttaagttctttgtagtttctggatattagccctttgtcagatgggtagattgcaaaaattttctcccattctgtaggttgcctgttcactctgatggtagtttcttttgctgtgcagaagctctttagtttaattagatcccatttgtcaattttgtcttttgttgccattgcttttggtgttttagacgtaaagtccttgcccatgcctatgtcctgaatagtattgcctaggttttcttctagggtttttatggttttaggtctgacatttaagtctttaatccatcttgaattaatttttgtcagtttcagctttctacatatggctagccagttttcccagcaccatttattaaattgggaatcctttccccattgcttgtttttgtcaggtttgtcaaagatcagatggttgtagatgtgtggtattatttctgagggctctgttctgttccattggtctatatctctgttttggtaccagtgccatgctcttttggttactgtagccttgtagtatagtttgacgtcagctagcatgatgcttccagctttgttcttttggcttaggattgtcttggcagtgcaggcttgtaaagagcctatttctaaataagatcccactcataggtattgggggtgagaaatccaacatatctttttggggcacagtttaacccatatcacctctacatttccactttgttcttttgctaccaaaacaccacgggtttggtctaggtcctgctcctcacctttacagaaagccaatcactgagatgacaaatattgccggggaagaaagctttaatcgggtgctgcagccaaggagatgggagctgaatctcaaatccatctcgctgactgactaaaaccaggggtttatacagcaggaaagaaatgtaacaatgtgtaagaaaacaggaactaggggctgggcatggtggctcacgcctgtaatcccagcactttgggaggccaaggtgggtggatcacgaggtcaggagatcgagaccatcctggctaacatggtgaaaccccgtctctactaaaaatacaaaaaattagccaggcgtggtggtgggcgtctgtagtcccagctactcgggaggctgaggcaggagaccgcgccactgcactccagcctgggygacagagcgagactctgtctcaaaaaaaaaaaaaaaaaaaaaaaaaagaaaacaggaagtagggaggggcaaggaggcatctggtgcagtgatctgactagtttcagttctttgttactccctgaaggycctttcctgagaaaggaactcagataaaacaaatacaagtttcaggctttaatagcagaagggtaaatttctatgtttattcaaaaacaacttgtctatgggactgttgggctggtttcactgtcatatgctatgctaaatatgaataatatttgaagactaaataaatgaacacctcatttgttttgttttcaggatctgaagcttgttggaattagtcaacctaaatatgcagcagaactggctgagaatagaggaaagaatcgctataataatgttctgccctgtaagttattttatctacagcatcttctctgtgttccatcagtggccatcacatctctaagtgtagaggggagggaatcagtgatcctaagtaaccacttccacaaccattcattagtcacctacttccacaaccatccattattcacctactatgtgctaagcactatatttaggtgcattctcttaaatcctcacaacagccttatgaagtaggtagtagaatatttgttttgcagatgaggaaaatgcacagagtggttaggtgatctttccaaggttacacaggtagtgacgggaaaactcggctttgtactaggtctgtctgtctcagtaagggaaaaggccagagtctgtgttcttaacccctctgtctcacaactatttatttcarttctataattctggaatgaaagtgagcagagggagacggggagtcacactctctgtgtccagacacatgggctgagtgaattccacagctaagtatgacttatatttagctcatttcctgtttttgagaattaacaatgtctgcatcttagtcaacaggattacagcaaattgagtttaaaataagaattatttattacatcaaaccattagatgaaatgtaaataattctccattgaaagttccttgtaatctctcttttgggtggggattagggcacagagaggagcataagcagattgtagccatgttctgatggagctgaaattgatagactttgcagataatttttacatcaggacgtcatcatctttattcgaagccgtgtttttcattcctggactaaaacattaagttctttttaaattcagcattttctagttcttgggttctttctctccatttatttccttgtacttgacaaggaatattggcccatgttctgagggaaatgcttttaaaactaggctgggggtattgcccttgtaagggtaatttgggattattggcccctttttgtgaatgtctgtggagattctcagatctggagtgggagctgggaagtgggtgtttgggtattgttcttattgggaagcctttaggctgagactcaggtcagtactagacttagcattgttatgttattttgtccagaggagggtgaggtagtacaatcagagacrgggaaactgaggtggtgctgcttctggctcakcctgacacttgcagttctaaggttattatttcatctcttaagttgggcaagtttgtgtgtatgcttttgagatgacaataatatttataaaacataattctgtgttttagaccctcctactcatagtagtcttatacattcaatttatacttgaacttggtactctgtttttataacaacttgtttatatgagaatagaggcagagtagaatggttaacctagggacctaccccgtcctagtggaaggggcactagatttgaattttgactgcccctcaccagatatatgaacttggagaagtcacttaatctctgtaaccctcagtttcctcatctgtgaaacagggcagtggcttgtagggtggttttgaggagtaaataaaattgtttagcatattccctcatggtagacacctgaggatgctaatagtaacaggttcattttatgtgagaaggcatctggtgtggttaagatcttgggtcctggtgtcaggctgcaggttcaaatcctggccctgccactcattagctctgctctggtgatcatgtgacttctctgtgccacggtcatatagagtgaccatgaggattaaatgaggtggtctatatgaaatgccacactgtgcatcttcaaagacacaagtcccagttttgccattttgaatttcatttttttttctgttttgtgtccaactttactaaaacatttgcttataatggggaccttttttcttttaatgtcacagatgatatttcccgtgtcaaactttcggtccagacccattcaacggatgactacatcaatgccaactacatgcctgtaagttgggggacggtctcacagcactggactgtttcgatgaaatcttcagtgtgctttgcttctttctgtttctttgaggttgactatgtgctgtttcccatttttagggctaccactccaagaaagattttattgccacacaaggacctttaccgaacactttgaaagatttttggcgtatggtttgggagaaaaatgtatatgccatcattatgttgactaaatgtgttgaacagggaagagtaagtatcttttttagtttttaaaatttaaaattacattaattgctttttattgtggcagaagggtatcttaaaaaccatttgtttctttaaaaaaactcaaacattagcactttattcttataaacttgttttctgtctttttttccccrtaagagaaatgtttaaaaacattctttaaacaattctattttgtcattatcttttttttggacaaatatcagtgtcttctgtttattacgttgctgctggagttagtaaatagcaaaatctcccaggcctagtgcaagatgctgttcacggtgtggctctgttcttcattggccccatgaacacggacaagcccatcatgtctctaagcaaccggtgtcttcatctgtgagatgagggttttcatcagctccatgattttcaaatttaggttgagcactgaacccctcctgcctccaccccaggtttttttttttttttttttgagacagggtctcctctgtcagccagcctggagtgcagtggtgcgatcatggctcactacagctttgaattcctgggctccctcccacttcagcctcctgtgtagctgggactacaggcgtgcaccacatgcctggataattttttttatttttagtggaggcaaggtctcactgtgttgcccaggctggtgtcaaactcctgacctcaagtgatcctgcttccttggcctcccaaagtgttgggattacaggcgtgagccatcacacctggcctggaaccatttctttaagcaaaatctcagacttatccctggataagcctcagcagcctcctctctcctgcaacgtcctgaaatccctcttctgcttccatcaaagataagattttttttttttagatggagtctcactctgtcgccaggctggagtgccgtggtgtgatcttggcttttgcaacctccgactccctggttcaagcgattctcctgcctcagcctcccaagtagctgggattacaggcaggcgccaccatgcccagctactttttgtatttttagtagagacagggtttcactatgttggccaggatggtctcaatctcctgaccttgtggtccacctgccttggcctcccaaagtgctggattgcagatgtgagccaccgcccctggccaatattttttatagtaataaaattctgcatttccatgaattgatgtgaagagaactgaaaaacacatgctaatctaaaaaaatgctgtgccttaggaatgggacttaatgttgctttatgagttgtttttaagtgtaggttcattgcttgaggaataggattcgattccttaagccagtggatctcaaactttagcatccatcagcatcaccaggagggtggttctaccctcagagtttctaattcggaattgcgtttctgccagtttctgggtgatyctactgctgtggcaccagggtgcacacttggagtggtactgtccccaggatagtgggagcccttcaggcatcatttcttttattgttctttaattcatggtaagctagcagatgtttatccagcccctggtatatgtaagatcctgtgctaggggctgaggatggaggagggaaagataacagagcagtaagagatgacgcccatcctcatgttgcttgtgatagagggtgggctccttaccctcttgttgaatcaggagaataggctgtaatagaaataaaagcgtttttaaaatgaatgctgataggctgggtgcagtggctyacagctgtaatcccagcactttggaaggccatggtgggcagaccacctgaggtcaggagtttgagaccagcctggccaacatggcgaaacccatctctactaaaaacacaaaaattagccaggcgtggtggtgcatgcctgtaatcccagctacttgggaggctgaggcaggagaatggcctgaacccaggaggcggaggttgcagtgagccaagattgcaccactgcactccagcctaggcaacagagcaagactctgtctcaaaacaaaacaaaacaaaaaaagaagaatgcaaataagctttttaatactgttgagcccagggccttatacatgaaacattcttataaatctatctgttagacaaacaaaaatgacataattacattaatggagaacatgaagatgaatttaaatggtcttttgttcatctaaaatcaagattgaagttagtcttagtgaccctgggtgaatggggaagggagtgtattttctgcactagattctccatatatgttattttttttctgtaacaaccctgtgaggtattatgatttcatagatgaggtaactgaggcttggggagtttaagaacttgcccacaaggtaggaacaaaaatatacctggtaagaggctgagctgggaatcaactccatgtcagtgtgtatccagatcctgggttgtttctttggaacctgggtctttaaagaaatacagatcccgcagccagagtcagaatctctggaggtagaacccaggcatctctttttaaacaaaacaaggccaggcacagaggctcaggcatgtaatctcagcactttgggaggccaaggtgagaggatcacttgaggccaggagttcaagaacagcctgggcaacatagtgagacccccatctctacaaaaatacaaaatagctgggtgtggtggcacgtctctgtagtccaaactcctctggaagctgaggtgggaggatcacttgagcctgagaggttgaggctgcagtgagccgtgatcgtgccattgtaccccagcttgtatgacagagtgagactgtctcaaacaaacacacaaacaaaaaacagaaaacaaaacccaaaacaactcaaacttctcaggtgagtcagataatcaattagctttgaaaactaccagcagtagagcacaccttagaatactgagtgtgtgtgcgtgtgtgtgtatgtggggggtgtgtgtgtgtgtgtgtatgtggggggtgtgtgtgtctgtgtgtgtgtgtgtgtgtgtgtgtgtgtgtgtgtgtgtgtagtcatttgccaaatgggtattcagatattcttggagagcaggtgtttcctggttatttctgttcacatctgcccaccaactttatagaaatcaaagaccccagaatgatttaatttgattttctttattggtgtgtgtatttgtattgcaaccgatgtatatctgaaagccttgggaaaaagtcctcatttcttccagctgtctggggttatgggagaagatgaggtcagtgaacagttgtggtggctactctaggggcaaagggagctggatggggactgtgtcctaggtcaagggacagctgctgctctgctctaaatcaattttcatgctgaaagcagggcctrttgtaggcagatctgatttttaaagagaaaataagtctggatttttatgagaaattttaagagttggcaagaattgtaaattaaaaaaagaaaaaacaattccaacaggtgctgtggtgtgcccatagacccagctacttgggaggctgaggcatgaggattgcttgagtgcaggaattggaggtggtagtgtgctatgatctcatttgtgaatagccaccacactccagcctgggcagcatagtgagaccctgtctctataaaataaaataaaaaaattcgaagggtcaaacaaaacccaactagaaggtctgattccatctctgatgccagttttcaatagccagtctcccttgtgaggttttagtgatggcagatggcatgatctgagtcttcttataaaaatgcaattttgttctagaccaaatgtgaggagtattggccctccaagcaggctcaggactatggagacataactgtggcaatgacatcagaaattgttcttccggaatggaccatcagagatttcacagtgaaaaatgtaagtaagaagtcaggatcagttgagctcatgtaattaccatatgttaatttgggggtgatatgttttaggttgatattaactaatatgttttcctatgcagtgagaaatgttttgctnctttcctttcagaacagaacaatccatatgcatgtatactccaaggcaaccccttgacttttctgggaaatttactttcttgggaataacctaagttattkctgaataaaatgaatcttaagagcatggctctacatcaggaactctttcctttctttccacttccaggtgacttgctcatagattttacagaacaaactgtagccttttggattatttggttagaaatatggcatcaggagcggccacttgctgttaggagtaattgataacagttacattaataggattccagggcatatgcacatggcctyccttcccctcaaaatttacaaaagcaaatccaattaaattgtgcaggcattctaggaagtcaagtttatgtgcyttttttctttttcaaggatgctttgaaaatagaggcagtgccatgaagcagcattggtatctgttgatgggtgtgtgcattggcataactctctgctgtttatatcacaggcctaaacattaggcatrtgctggcttgaagtctgagactatcctaaggaaataatctgaaatgcaaccaaaggcttattcagaaagacgagtctcagcattatttataatagaggaaaactttggaaaccatgcagacatggttttgtagcttttgtagcttttgcagaatggataacttaactatgactcgtctgcttataatatcattattcagctattagaaatgatggcccaggtgcggtgattctaacctgtgaggctaaggtgggaggatcgcttgagctcaggtttgagaccagcttgggcaacatgctgaaactccacctctacaaaaacaaaaccaaaccaaacccaaaaattagccaggcatgctggtatacacctgtagtcccagctacttggaaggctgaggtaggaggatggcttgagcccaggaggtcgaggctgcagtgaaccgagattgtgccactgctgcactccagcctgggtgacaaagcaagacccggtctcaaaaaaaaaaaaaaaaaaaaaaaaagataaataagggatgggtagactatataattaccatggggacatggtaggatgtaatgtaagagaaacattctaggagatgaaaatgtatgcatattatgaatagtgcataaaaggaaagccgggaagtatagattcactggagttgaatcttgaatcttttgggtgggttttgggggttgatgggttagggtctagtttatgagattatccttgaagattccacaagtcatggataaagtatagtatattaagtagtaattctttactaattgctgtgtctcaaagggtctggcctcaatatttcagttcctcctctggagatgccatcaaagctgttaccatgatctggccacctaaataatgcagctcacagtagtagaaaaatgtcatgcttatttcttttcttttcttttcttttttttctttttttgagatggagtctctctctgtcatccaggctggagtgcagtagcacaatctcagctcactgcaacctctgcctctcgggtccaagtgattctcctgcctcagcctcctgagtagctgggactacaggcacctgccaccatgcccagctaattttttttgtatttttaatagagatggggtgtcaccatattggccaggctggtcttgaacacctgaccttgtgatccacctgctcggcctccaaaagtgttaggattacaggtgggagtcactgtgcccggcctgtcatgcttatttctatagattttgctcatttgaactgactggcttctccttggttgcctccactgcttggggcttaccttgtggaggggaatttaggatggagttgtccacatcatttttaaaaattgctgttactatgattattattttttattaactaaactccagactttattcagatttcatgtttttccactaaagccttgttttgttcctggctctgatccaggacaccacatggcatttagtaccatgttattttttaattatacaaaatgcctgaatacattttcctttagaaaatcgagaaattacaaacagagctaaagatttcctttgactaccacccctaacctgagcccctttgcccctccacgaagataatactaagtataaccctcctcacttctccctcttcctctccccctccttctccccttgcccgctcccactccctttcctctccctcctccctctccctcctccctctccctccctttttcttcctcttcccccacctccatctctcacagctggtttctgtctttggatcagtacttctggttaaatgtgtgaatgttaactttatctgtgatgaggtcttctagcacctctcccttcactctgtctgtttttcctgttttccaaattttgaatactgcacattcttatcatgaatatacatttcaaaaaatgagtgtcaaagggcagctgtcataatggagatggaaatgcctgcagtgcagatgtaggtcacatgggtacggatgtaggtcacatgggtatggtcattccctggtatgggcataacgagtacagctgagtcagggacaggactcgccccagctggggtgggcttctggtgcttcaaggtatatgctttggtatgaggtagggaaccagtctgtgtaataatgagctctattgtctttcagatgttgaaatggatggttttttgggggagtcctttctcagctctctccaattctaaatatttgcatggtgcttgctagtggcctgtcactttattcacttctctaggggacatagtgaattatgaggccattcttgcctagaaggcactgattatcatggtgtatttgagtaaattatttttggttttattgtcagtgacattcccaggggggctcggggatggggctcatgcagctctaaggaggtgcaggtgtaagaatgtgagttcattattgataggcagctgtggcaggaagggaaggatctgaatgcagaattggaggatgagggacttctgttgcatctgaaatcagtgttgrggaaatgacttcacttctgtgaatctctgctgcctcatctttaaagggggataataaactctccttcttgagcatattgtgagggtttgatgagcaagcactttatcagctgctgtgcaaatgtaaagtttaatttttagtcattacaactcctggttagtactcaggctctgcttgatttcccctgcctttttgatgttgttaggcagcctttctgtctgnatctaaatcattttctgggcttttagatccagacaagtgagagtcaccctctgagacagttccatttcacctcctggccagaccacggtgttcccgacaccactgacctgctcatcaacttccggtacctcgttcgtgactacatgaagcagagtcctcccgaatcgccgaytctggtgcattgcaggtacgcagatggcacgtcacgtgtgacagatttcaaatgtcattatatatttatgagcactttacaaaagcaaagcctaagagggaatgtaataggcatttatgaattcaggaaaggtttggataaggaaccatggacttactccctaagccctgagcttccaaaacaggggttggcaaactgtaacccatggatcaaatctggtcagctgctgtttttgtaaataacattttctaggaacacagcatgcccatttatttatatattgtttatggttgcttttctgctacagtgacagaaagagaccatatggtttgcaaagcttaagatgttaactatctggccctttactgaaaaagtttgccaacccctaacaataagaagttagctttgaagctaaaggaattaatttaggacagaagacaggaggggctctgttgcccagtggggaaaaaatggctaaaatgtgccgccatcctgggttatgggcaacttgaatggaactgagattgaagaagcttgagcaaagggttatatgtgtggcatctgactcaaatgtgagtttgggacttaggccccagtcccaagctagtgctgtctgacttgctgaggcttcaactgagcaaatgtgtactgatcctgtgcattgccctcaaagtgtgacagtgaaggaaagcaagatatatgtacaaatgaggaactctaagagggttgcagtcgagggaacccactgtaataggcttatttctcttttctctcagtgctggggtcggaaggacgggcactttcattgccattgatcgtctcatctaccagatagagaatgagaacaccgtggatgtgtatgggattgtgtatgaccttcgaatgcataggcctttaatggtgcagacagaggtgaggccaagatctgtatttgacattccacccttcccctccatttnnnnnnnnnnnnnnnnnnnntttgacattccacccttcccctccatttttttttttttttttttttttttgagacggagtgcttgctctgtcgcccaggctggagtgcagtggcatgatcttggctcactgcaacctctgcctcctgggttcaagtgattctcctgcctctgcctcccaagtagctgggattacaggcacgcacaccatgcccagctaatttttgtaattttagtagagacggtgtttctccatgttggccaggctggtctcgaactcctgacctcaagtgatctgcctgcctcagtgtcccgaagtgctrggattacaggcatgagccactttgcctggcccttcccctccatttttaaaaggttgcattgtgtcatgcacttgtgttaaaatatgtcacccttccagatctttccagctcttggctgtgaactaacactggatttctttgcagactttaagctgacttggaattaaattacccaatacaagtgacatagtagtactgatgtcagtaatggaactactactgagatagtgtcaggattctttaccttgctgcctctgactcattaaataatcttaggacatctttgaactttggcttccaggttttaaactcataaaactggtattttccagtctttgtttctaagaaggtctgaccatctttaaaataagctaatgaaacaaactcatcaaacattaatgatgtgacrtatcataatgctgcttaaatgttaatacagcaatttatcctcacccagacttgtacattttaaagactatcaattatcatagctacagaagggtggctgaccagcggagaaaaggaacacttaatatcyatggtatagtttctgtactactgctggatttggttttacccaaamtgttactgagaagtgtttttgaggcatgttttcaacagaacatattgcaaagttgctttcctcaaaggggtgaatgttccttgaccaggatgagagcagaatattaattttgtatcaggctatcgtcctgtaccgatttagaactctatgaatatgtgctgtgtttttgagtctagcagggaatgttctagatgcctgggtacattgcrtgctctggggtgagcttggtggttgttgtggaaagagtgaaattcaactcctgtgttggtcaaaagagagattttcttttttctgctataattatataaagtagtatttctcaatcttttatccttttttgagaaacatagaactcttatccctgctactagagtctaatctcttttttatattttgaaaacaatacttattcatatgaaagcatttgacaatatatttttctctcctcttttttttttttttgagacggagacttgctctgtcaccgggctggattgcagtggtgcgatctcggctcactgcaacctctgcctcctgggttcaagcgattcccctgcctcagcctcccaagtagctgggactacaggcgtgtgccaccatgcccagctaattttttttttgtattttagtagagatggggtttcaccatgttggccaggatggtctcgatctcctgacctcatgatccgcccgcctcggcctcccaaattgctgggattacaggtgtgagccaccgtgcctggcctcaatatatttttctctgactcttccttccccaatcctgcttcctggaggtagccaatgtttatagtttggtgtacatctttataagactctttatgtacatctgtaaacacacacacacacacrcrcacacacagtactttgaaaaaattggatgctgttttttttttgagatggagtcttgctctgttgcccaggctggagtgcagtggtgccatctcagctcactgaaacctcaacctcctgggttccagcgattctcctgcctcagcctcctgagtagctgggattacaggtgtgtgccaccacgcccagcaaatttttgtatttttagtagagacggggtttcaccatgttggccaggctgatctcgcactcctaacctgagccgatctacctgtcttggcctccccaaagtgctgggattacagacaggagccaccgcgcctggccagatcctgttttatgtatgttgcttctctgtgattttttttctcctcttataatatcatggatatttttctgtgtcagcttatacccttgtttcctcttttcttcatcactatccacagattctgatatacctacctgaaggatagtcctcatccagctccacctgatcatctccttttaacctcgctcctcggttgagcattacagttgattcttactctgtacagtctcactagccaaggcaatcttgttggacatttgattgttcgaatgtgtgtgtgcattttttcctctacatttcctccttcctttgcccttccctgagactgtggcatttttccttggggaggggaggtgtggagtgtgctcttctggttgagaatcattgaggaaggacatcttgcttctgtgatttcagatttcactgcaatgttgttacctcttgaaacatgttcgcttgaaccgtttgctgttgggtggatggggtttgggagttgggcgggggaatgacctgtttgaaaataattttgggtgctaatttctgggacccatgttcattttctgtctctctctttcgttttyctatcaggaccagtatgttttcctcaatcagtgtgttttggatattgtcagatcccagaaagactcaaaagtagatcttatctaccagaacacaactgcaatgacaatctatgaaaaccttgcrcccgtgaccacatttggaaagaccaatggttacatmgcctaattccaaaggaataacctttctggagtgaaccagaccgtcgcacccacagcgaaggcacatgccccgatgtcgacatgtttttatatgtctaatatcttaattctttgttctgttttgtgagaactaattttgagggcatgaagctgcatatgatagatgacaaattggggctgtcgggggctgtggatgggtggggagcaaatcatctgcattcctgatgaccaatgggatgaggtcactttttttttttttcccccttgaggattgyggaaaaccaggaaaagggakctatgatttttttttccaaaacaatttcttttttaaaaaagactattttatatgattcacatgctaaagccaggattgtgttgggttgaatatattttaagtatcagaggtctatttttacctactgtgtcttggaatctagccgatggaaaatacctaattgtggatgatgattgcgcagggaggggtacgtggcacctcttccgaatgggttttctatttgaacatgtgccttttctgaattatgcttccacaggcaaaactcagtagagatctatatttttgtactgaatctcataattggaatatacggaatatttaaacagtagcttagcatcagaggtttgcttcctcagtaacatttctgttctcatttgatcaggggaggcctctttgccccgrccccgcttcccctgccccctgtasatttgtgctccattttttcttcccttttccctcccagttttctccaaagactcttctgttggcaacattttcaacccattggttgggtgagaatggcgactcaaatatcaccttgagaatttctgtgggtgggaatgggagaagcagaggaatcctacagtggcagaaatccttttcttgtccctgtattatcctttttctcatgtctgtatttggtatgaaggattatttaaaggtgcaatatgtgaattagtgattcatgatgttctaggtttttagtaacgttttactcaggttggcattttatgtgtctgtgtctgtatgtgtgtgtgtatgttcagaagcgtggcaatctgtgaacacttcagcgtgaattcagtgtcagattaatccctccttccccaaagtccactggctttcgtctctctctgccgtgacacatatcggaatctactgtatatatatatatatatatatatatatatatatatatatatatatatrcactaagctctcaaaaacagtcattcctatgaattgaggtgtacaaagtttgaatttgtatcaaagatgtaattattatttttaaaaccttttcactatactgctgctgtaattactttgatttttaaaatgtagattaattttttttttttgcttcaggtgtgtatccaccaagaatttcaaatttatgtggatttattttattggtacataatctgtaaacttcttaaggcattaacatgaaaagattttttctttttattttatattgtggctcaggttatattttgaagatgttttgagtttatcctccaataggcaatgaagttgacaaggttttatgaaggaataaccaagtccctggagtcctgtggctgttgccacagtaatgygtcctgctgtaaacaggacaggtgtgtcctgttgagaatgtgagcgggctcttccagcctcctggtccctcctgactctgccacgcccctcacctcactggcacttcgataactgactggacgtgttaatgggtcttttagggttctaaagggtgaaccacacttttaaagccccggctgtggttcggagggttagtgctgtatgccttttatttccctttccctttgaggtactgaaaggatgaaaaggtggtgtcatgttttggggagaatcttacttctcaaatggaaattgcactttttgctgaatcctttgcatttttttggtagtaagcagttcattgagtatcaggtcctcaaaggaatgagttggcccggctagggtgggccctcttgacctaacttcagagggggccttggctcagtaggtgtgaatcagggaagccacattgtcctcagggtgctgtatgaagctgggtgtgggcggattcctcccacaccttcacactggcctgcctccaactcatacagatctcggagcggtcggtacttcattcataggtccctgttcaggcagcagttctgtgggctgtggccctctcccctccaatatgtccgaaaccattgtgatgggtggcaaatcccagggagctcctaagccctgctctgcccacatcactgccacagagaagtcagaggaagggacttgttgctaaaaaatcctttaaaaggttaaatactttaaaagattaaagcaacataactgtaaacatatcgtataaaaatgaaaaacacaggaaccctcttcccttccgcctggtgtgggcttgggaaatgggcaagcggccccagcaatcatgggaggaactcttgcgggggagcggtctgggattccaaatgggcaggtcacacgaaggtcacgatgcttctctgcatcctgaaaagggctggggacagggccagtgggggtggtaagggtatttatagcacagtgcttgaaaagggaagattaatgtgtaaatataaaggacacacaggctgggggttggtcagaggcaagaggagggtgcctctgagcttcaacccctcccaggaacaatgagctcaaattggaagagtccagtggaatcggggggatggtgtgagcrcccctgttcagtctttgacaattgcatacagaaaagcagctggtatgggtttgggtgtcaatgaaagggccaaagactggtggccagctggtttgggggatttgggccattgatagcatctcccaggaacaacgactttttgcctccaaagttggatctagtgatgatcagcaccagcaggaaatgacatttggtgtctgcccactgcagccatactgtgacctccagccagacttccgcctaattgactccactggatttgtgctctgttgagtcagaggctcccgggggttggggatcgaggggcgggggtcagctatgcagcccatcacgtgtgtttttcatctgggatgaaaaagcctggttctcttttgaaatgcttgattgtacttattgagctaaacaagtcttggtgactgttgttgatttgcctcaaaagttttaagtcctgggttttcagactactgtgtagcagctgtgtgtttaacatactgtagctttttctcccttgggggcacatacaaataggatgtgttgatgtggactctaaactgtaattttcctgtaactattttggaatgatgcatatttctaatgtttgttatacttgtacagagtattgctgttggttgcttttttttttttttaaggaaaaaatggcctgaaaacatttttttaaagacttacaaataccaaatataaaaaaatgtcaatgcattatgcctttgcttctttctttcttcttttttccttcttacaatgtgccaagcagtttactggcctgcattttacttgggcatccttaacaaaaacacatttctctttgggatttccggattgttttagttttctagggctgttgtaacaagtaccaccaactggtggtttaaacagcagagatttacttcctacaattttggtggctgaaatccagatgtgggcagggttggtttcctgtgaggccttttttttttttctttttttgagacagagtctcactctgttgctcagagtggagtgcagaggcgtgatctcagctcacggcaacctctgcctcctgggttcaagcagttctcctgccccagccttcaggcgcctctcttcgtagcttgcagatggctgtcttctccccatgcctccacatggtcttccctctgcttgtctgtgtcctaatctccttcttttttttttttttttgagatggagtcttgttctgtcgcccaggctggagtgcagtggcatgatcttggctcactgcaacctctgcttctcgggctcaagcgattctcctgcctcaacctcccgagtagttgggactacaggtgcctgccaccacacccagctaatttttttgtatttttaatagagacagggtttcaccatgttggtcaggctggtgtcgaactcctgacctcgtgatccacccgccttgtcctcccaaagtgctgggattacaggcgtgagccaccgctcccggctaatcttataaggacacgagtcatactggatcagggcccaccctattgacctaattttaccttaattacctcttcaaagacactccaaatgtagtcaaattctgttttagtgggggttaggacttgaccatatgagttttggaagggacccagttcagcctgtaacacatattcagggcaatttagtgaagaggaggcttggaggaagtggctgtgtgtcttaagattgtgtgtgttcccagaaggttggaggtatgagcctgcaggtggatggatacccagttggttgggggtgtgttatgatatagttagctctcctgggctttctgcttagggacagcgcttgggctgcggataaagtatccatcatcttcctgttttgattcaggccaaagttgtcccagaacttttctgcccacagtgttggtttagaggaggcagggagacactgtattgctgacctgttatctgcatacttaaaaaaaaaaaaaaccaaactaggctaccctgcaaaatagcacagcattctctgctcctagcacttagtttgataaaaactaccttacccaggtatagcctaggaattgagatattgtgggaaagaaaaaccgaatgatcacctgtggttttataaaatgtaaagcttaagtgagaaaacaaattcatagaactataaacagagaacaatcccaataagaattaaataagtgcatagaagaaaagaaacacaactctagaataatataatagtgggattaggagtggattttatttttatattcacctgtttatagtttctaacttctcccaatgaatatggagtacttaagagtaactagtttaaaacttagcacttttccctccttgcctcaaaaaagtgaagctacagtatagttttaaatttactagtcaagttacaaaattctttttttttttttttttttttttttggagacagagtctcgctctgtcacccaggctggagtgcagtggcacgatcttggctcactgcaagctccgcctcccaggttcacgccattctcctgcctcagcctccctagtagctgggattacaggcgcccgccaccatgcccggctaatttttttgtatttttagtagagatggggtttcaccgtgttagccaggatggtctccatctcctgaccttgtgatccgcccgcctcggcctcccaaagtgctgggattacaggcgtgagccacgacgcctggccaagcttccaagttctgatagccatcccatcccttctggggtttcacagctctatttggggctgaacgtggcagatctctggggcctccaacatgagagcttgggctttacattcctgcaggcaggtgaagcctcctgacccaaaaggtgagtagtgggcccctgttggggccagcagttttggatgatgccactagatggcggcagagaactgggctgtggaagcaatccttggctaggctgtggcagggcagtggagcacataggattggaaaagaaaccaggaggtccgtaaggcaaggctaaaaaccagcaacagggcgaaggaagcgcccttgccagcagctggcagctttccgtataatttgttagataatatgttcatggtaaaaaaatttaggaaaagaaggaaaataaaaaaatcctatgttgtcaccattcaacaagatgtcccccaataatcctcccgcctggtattcacatttttgtgtagcccctcctccactgtagcagggttggtctgtgtgactggtagattgcagagaggtgatggcatcccacttctgagataaaactgtgcagtttctctctcgctgtctctctccctccagcccccctcccacggcactctctccaaaaccagctggcatgttctgagcagccttgagagaggcccacgtggtgggcttcttctgaacctcctgccaacagctacatgagtgggcctggaagcagattctcaggtcagcctttggatgacagtagccctggccgacagcttgactgcagcctcctgggagaccccaagccagaacctacccagactccctgacttgcagaaagcatctgagatgataaatgtttactgtttcaaactgctctgttttgggataatttgttacacagcaagagataactaatatgggctaatatatcccaccacataggaaataccactgttaacattttactgtaaataattctgtaacctttagaattctcacaaacaccacacacacacaccccccatatgtgcacacatgcatacatcttcatcttcatgtatttgctttcatctttttgcaaaactggaatcaaacatgttcatatttctttttaagattaacatatttctttgagtaatatttctactgaagcgtaatacagacagaaaaatgcactaatcataggttggctgtttgaataattgtccaaaaatgaacacacccatataaccagcacccaaattaaaaagtatatacgaccagcatgccataagccaccttggtgccccctttcagccacaccctggcaaagctaaccactatcctggctgctaaccttttaagttggttctgtgctcaattttttgaaacttgcttcttttttaaaattaaaaatttttatttttagagacgaggtctcactctgtcatgcaggctgcagtgcagtggcactgtaatggctcaccgtagcctcagactcctggactcaagtgatcctctcacctcagcctcctgagtagctgggactacaggtgcgtgccaccacacctggctaatgaaacttgctttttttttttttgagacagagtttcgctcttgtcacccaggctggagtgcgatggtatgatcttggctcactgcaacctctgccttccgggttcaagcaattcttctgtctcagcctcccaagtacctgggactataggcatgtgccaccatgcctggctaatttttttgtatttttagcaaagacagcgtttcactgtgttggccatgctggtcttgaactcttgacctcaggtgatccgcccacctcagcctcccaaagtgttgggattacaggcctgagccaccgtgcctggctgaaacttgctttttatacttgacatattgtgaactctttctgtgttattaggtattcatcctgttcaccattttaagagctgcataatactccatagtatggacacataccactctcgagttaactactcttttattgattgccattagattatttctgattttactctcctgtgaataaggatgtggcatctatcacagtagccagatctttgcagacatcacaattaatttcttagtaaacttttctataaaattaatgaatcgaaatatataaaaaggtagggctttaggctggtcgtggtggctgatgcctgtaattccagcactttgggaggccaaggcaggtggattgcctgagctcaggagtttgagaccagcctgggcaacaaggcaaaacgtcatctctaccaaaaaatacaaaaaattagccgagtgtggtggcacatgcatgttgtcccagttgcttgggaggctgaagtgggggggatcacttgagcctgggaggcaggttgtgccaagattgtgtcactgcactctaacttgggtgacagagtgagatcctatctcaaaaaagaaaaaaaggtaacgcttagatgaaattctgctaaatttttctctagatagcaatttacactctcattatagtgtgtgagaatgcctgtttctttacagcttcatccacaatgaacattataataatgaacacccygcccccctccttttgtaacttgaataggcaaatgaaaaagaagcaaactgtgctaggcctttcttggattgctgtaaagaaacaccacctgagactgtttaattgataaagaaaagaggttttagtttggctcatggctctgcaggctatacaggaagtgtggtgctggcatctgcttctagtgagggcctcaggaagctacaatcacggaggagggtgaccgggagccagcatgtcacatggcaagggcaggagcaagaaagagagggtgacagatggggggacgtgtcacatgctattaaacaaccagatcttgcgtgaactcggagggaaaactcgcacttcaccaaggggatggctgtgagccattcacaagggattcgtccctatgattggagcacttcccaccaggccccatctccaacactgggaattatatttcttcctttttttttttctttgaggcggagtctccctcttttgcccagcctggagtgctgtggcgcgatctcggctcatcacaacctccgcctcctgggttcaagtgattctcttgcctcagcctcctgagtagctgggattacaggctcccactaccatgcccagctaatttttgtatttttagtagagatggggtttcaccgtgttggccaggctggcctcaaactcccgacctcaagtcatctgcccatcttggcctctcaaagtttgtgattacaggtgtgagccaccatgcccaggaggaattacatttcaacgtgaggtttggaggggacaaacatccaaacaatatcacaaactcaaaacttctgggagcctttatatggagttgggagcaccggttcgagtctcccacttagtgagggccacacatccaggatctaaggaattctgtcctgtgtttccacagctgcagtcttgggtgtgagaccaggtgtcatatcaggagaccaattttgttatgtcaaaattgcatgctcaggggtcatggttgtgtcttggacaacctgatccagactcataggccctgatgctgcagccttggcagtgtgagggtccttctgaggcatttcatgttccctgacatgggccatagactccctagatgggaagaatccgtgaaggccctttcaacaaatccactggtcctatccactccacctagcctggaggcttaattacttccagaacctttagagggagggagatggcatggctctttcttggaaagtctggaaggacaccatgggctagaggggacagacacatgcctcatgtggcctcacaggtcagcctaggacctgtgacagtgacagggagacaggtttggcttaacacaaggaagggccttttgaggagcaaactcccctgaggggtcagccctctcatgggagcagctcaggggagaaggctcagccttggctg

SEQ ID NO: 95123 - DNA, 27849 bp, Homo sapiens
  misc_feature (1)...(27849): n = A,T,C or G
acttctatcgtttttcaggtggttttggttgcatagataagttctttagtggtgatttctgaattttagtgcaccagtcaccggagcagtgtacactgtactcagtatatagtcttttattcctcaccccctcctcaccttgccccacccccagtctatatcattctcatctgcatttgttttttgagaggtagggtgaggtctgctgcattagcccagagacagctgaggaggctggaaaggaaaatggctttcagagaatagggaaggaaaaagtctgaggaagcaaaactacttaaaaaacactgctctttccatttccgtatcatttaaccaaacaccatcctgtgggttctgtcacttgatcctcatgctgatctgagaactcggcagagctgggtcactgccttccccaaggctaacctggtttctaagctggcacaagaccccaggtgatctatcatctaaccacagagcccttgctggacagagggtgaagacattatgtgtccctggctctgttcagggaagcagaggatagacctgaagaatttaattacttgtcatagataaagcctagagaaaaggtgagggcgcaaagtatctcctccaaattgggaagactcccccagggctcactcactaacgccagttctcctgagcctttaaagcctgggggtgagggagccctcctggtcaaccctctctaccctagcctcagggagcttcagggccccagcattgaaggaacagggtctgacctcatttgccaccgtagggatggggagactgaggcaggaggtgaatgggctcccagcttggagccctttcccctcaggacttggtttccctaccctagctccgcctgcagggacagaaagacatggtctggaaatggatgccacttctgctgcttctggtctgtgtagccaccatgtgcagtgcccaggacaggactgatctcctcaatgtctgtatggatgccragcaccacaagacaaagccaggtcctgaggacaagctgcatgaccaagtacggctggagtgtgcctctgctaaggagggggcttgttctaacagggaggagaaagtcaggatggtgggagagggattgaggggtcagatacctccacatcctgaagttttcctgtgggagaagatgaaggtggagtaggaagagtggctgaggtgattttaggggggccctccccggaggtggataccatgttgacaatgatattgagtcgtcattcgatgggcacctgtcagttgtcatgtgttttttgtacaaaatttcatattcccaggggttcttggatgtaggtagatgatattctccacattacacaagtaagtgaaaatgaggctcacagaagcacatgggcccacacaggagctggacatgaatggcccctgtggaggggtaggaataggagtgggttaggctcctcctttggtgggtgacagactagggagtcgctggcttttcccaccctcactaagtgccatttccatggagtgccaagggagaagaggaggaggcccttctggctgtaatttgaggcacaggggctggacattcacacagtctatatacatgtatgccaggggattgcagccttattagactcaatgtctcccttttatgacagatttttttttagattctcttttctatcctgcaatgaaattcaaagaacctatttgtatgcataatttttgcaaatatcaacataatgctctgtaatataaaggagaaacacacagaaagtaacttgtaataaaataatatatatttcaatatgtcagttctctggtatgactacattagaaggcattaggaaatagcacatgcttgcttttgtcataaaatcattataagtggggagctacaaatgaagattgatacaggtatattctattggtgacttaaacactataagatactataatataagcaatgttgctgttgatgtcatacttttctaaaatagtgaataattctagtagaataaaccacatagtacagccttctatttcatggtatttgcagtcctggaaaacccagtctagattaaaatcttgtgaaaacatgatgtgcctatatgtaagatagagatacatttaaaaagtagggcttttgcttacttttttttttttttttgagaaggagtctcactctgttgcccaggctggagtgcaatggtgtgatctcagctcacggcaacctccgcctccggggttctggtgattctcctgcctcagcctcccaagtagctggggcacccgccaccatgcctggctaatttttttgtatttttaccagagacgaggtttcaccatgttggccagggtggtctcaaactcctgacctcaggtggtagacctgcctcggcctcccaaagtgctggggttacagctacgagccaccacgcccagcctggcttttgcttactttttccagcaaatattttcatgggcctactatgtgtctggcactggcctagccactggggacacagatcttactacatgccaagaagaataaatatattcaaactccattactccatggctcgctccctctcttcctttgctcaaaatgtcaccaatgtggcatttcctaacctatttaaaatttcagcaattccacattaccatttcctgctcatatcatttaacttttcccatatcatttatcatatcctgacataccatatatatatattttttaagtttcttactgtctgtctcctctgaccagaatgaaaattccatgaatacatatttctgtctgttttgttctcttctgtattcccagcatctataaccgtgactggcataaagtaggtgctcaataatttttaaatgagtaagtgaaaggactttttatgaagtgttacatacctcataaatgataactattattcccaagacagggtttcccctgggctcccacagtcccctgatcacacggttgtaattgtgtttcctccaagaaaggggttcctggaggcctaggagagagggaccatcatctgggaacctgagtgttctcaggacaacctgcctagggcagaggagtaagaaccaaatgggggagagacacgaggtggcaggaggaggagggtatggggaggcacttagtcctgtgtcttccccacccagtgcagtccctggaagaagaatgcctgctgcacagccagcaccagccaggagctgcacaaggacacctcccgcctgtacaactttaactgggaccactgcggcaagatggagcccgcctgcaagcgccacttcatccaggacacctgtctctatgagtgctcacccaacctggggccctggatccagcaggtagggtgtctccccccsacccaccccagcagactgccatccccctcagtcacttcaaggcgatggctgccagcatccctggctgagaggagccctgcctccccacctcccacccaggtgaatcagagctggcgcaaagaacgcttcctggatgtgcccttatgcaaagaggactgtcagcgctggtgggaggattktcacacctcccacacgtgcaagagcaactggcacagaggatgggactggacctcaggtgagggtgattgagttggggttaggaaaaaggagattgaggtagggtttggaaaatcttcaaggatttggggtggggtgaagatttctgggggtggccagaaatgagctttgggcccaggggctgaaagtctgtgtccaccatgcctctccctgcaggagttaacaagtgcccagctggggctctctgccgcacctttgagtcctacttccccactccagctgccctttgtgaaggcctctggagtcactcatacaaggtcagcaactacagccgagggagcggccgctgcatccagatgtggtttgattcagcccagggcaaccccaacgaggaagtggckaggttctatgmtgcagccatgcatgtgaatgctggtgagatgcttcatgggactgggggtctcctgctcagtctggccctgatgctgcaactctggctccttggctgagttcagtcctcccagactacctgccctcagcttggataaccaggctgggctcagctcagctcccacaaatgacagccccttaagcatgcttctattagtcacctaaccctctgtcacccagtctgttgctgctccatggtggggccaagagtcacttctaataaacagactgttttctaataattccatgtctgtggaattgttttggttgtgagtttgtgggtgggtgggagacagattctacggcttctggattccttcaaattagagcaactagacctgtgtttgaatcccagctctgctactttgtgaaaatgaaacagttgcttcactgctctaaacctttgtttccttctggataaaaagaggataatagtcctgccctcaggcttgtgaaatatacaggagctgttgcctagaaagcccgtgagcccagtgtctgcacattaatagtcttcagggatcctgttgttcctgttgccccaagtgggagccaggtcctgagcttatttgtcttggtctccaaacagcctcctggtcctccagcccttgtgcctggctctgtgctcggctctgtaacaggaaagctgggaatgggagtccaggaaaggattcagattgccagtgggatgaaaaaaattcacagtgggatgaaaaaaacgtgatgcacattgaaggagcagagttggggcctgggactctcagaggaaaaacagagccaattggagagggcagtgtagggggtttctggagtggaatactcaagagcctggaactggttcagcgctttggtgtcctggaggtgtggctggaagagttagaaacccttaagggcttcccggggtcaggagcctctggcacctttgtctcctcctgggattggcagatatgcctatcttgagggggttgctctgtctttgcaaagccctcgggagctgggcctaagttatctctgggtctcccaacacccctttccctttggataagtctttgtttgcacactcctactacaactgtccccagagaggcccaggtaagtctctgagaacaccctgcaggtaggtggcccagctaggactagaacccaggtgtgcagactcccagtccaggtctctcccccactaccaaggattcccctcacatcaggctcatcttttcttatactaaaaggtggctgatgagaacggtggcacagattgtaggatgagttattgggttctggaggcactgttgggtgggtgggtggatctcttagttattatatttatctagtgtggaaggccccacagagccccttccacgtcccaggctctgctccagctgggttaagtcaatgcatatttgaaatagaggaaggagctcgagggactgacccgggctccgtcaacaggttcaacgtagcaaagtgaaagttctctcccaggttaaagggattctcccacggcggcccaggagatggtggcggcgggcgcccggctggaggcctgcgcctttaaggagccagggggcggaggggcggggcaggaagacgactccccggagacgccgccaccggctaggtctttttttgggagggggcgggccagacccttttatgggctccgccccctttgcggctgccgcgtcccccttccgccctcggctggaggggaggaagctaggggggcgttgcagcggaccccgtctgggagctccccgctgggcgtccggcccgcggaggcgcgagtttgctgactcggagggagccgctrgggcgggggcgagtgctaataatacccgttcgttccgcagccgcgctttacagtttacacagctgtcaccttcgtttctccttaattaataataaaaatagccgccgttcgggagcgcgggctgggcgccaggcccggtgccgagcgcggtacgagctcggcccccagagccggccctcgccacaggatccccattttccagagcgggaagccgacgctcaaccccgcgccgcgacttgcccgaggtcacccagtgggccagcggctccgggaccgaggcgcggggcggggtgaggcgaggcgcggtgctgcccccggctccccggggcggcgcggggcggggcgggcggcgcggagggcgggggcgcgcgcggatggccatcttaagtggccgcctggagcccagggccgctgtccggggaagggggcgccggagcagcccgggaggtgggggtctgcgtgcggcggccgggatcccgggagggaactttctactagacgggccagggatcctcctggcttcggactgctgaaccccctcaaggcccggcctgcgggtgtggggggtggtgctggggaacttggccgagagggggaagggctctgcggggctgggaggggctgcgtgagaggctcgagaacgtcgcacctcgtctgggccccccgccagagtaagaatcttcagaagcctggttagccagggaatctccccgcaggctttgccgggggacggttcccgtggagttgggggttcagatctaagagggggctgcatttcgcaggagttgggggccccgcccgcttgggtggagggaagaggatgggtagggggtggtcctggatccttcgcaggtttggggaactcgatgcagccaagctgtaagggggacgagaggaagagccatggagtggaatcagacctttatggggcttaggggtcatatcattgggagaactgagaagcgctgaattctccagggggtgcctggatcccgaagtgtcggggccaggatggggggactcggatttcgatggggatttggggactggatctcctcgggtgaatgatgggggcaggatcattgtggggtctgggaggtcccgggcccttcgggaaggtgggggcaccgtccccgcaggaggagctgggggcaggggcggcccgggctgcgggccgagcggagggggagggggcggcagccggccctgcgctccgctcctgcccctcccccgccgcctctgaacaaacttttctttctcttcaagttgaggccggcgctgcaggcagcggcggctgcgcggtgaacgaggcggcctgcgcggcggagtgctgagtcccgatccccggctctgtccggcccacggatcctcaagcccgggccccgggcccggccccagcctcagccctgagcgtctcggggcggatggcgcggggcggcgggggcgggcggtgctgagccctgcgcgggccatggcctcggcctgcggggcgccgggcccggggggcgccctgggcagccaggccccctcctggtaccaccgcgacctgagccgggcggccgcggaggagctgctggcccgggcgggccgcgatggcagcttcctggtccgagacagcgagagcgtggcgggggccttcgcgctctgcgtcctgtgagtggggcgggggctccttgcgggctggcgtggaccgggagcgcgggcacggccgggtgtggaaagggcccgggtgagggtttctggggcggtgggacgccagacccgcctccaccccccagagtgggagccttggctttctcctgggtctgaggagggacgcaggggcacttcctgctgtgtgtctgggggcactttcaggagccttgagggtagagaatatggggttctgtggcccagtgtgactgtgatgacgaaaaattcgggcattccccggcagaccccttcaggcatcctccaggtagaagggagcaggggagaggatgtgcattccacgttgtgtgcagtcccgtttggatagggactgagtggtgagcaggagagggagtcggggcagagggactgacggggtgtgtggggatgcctggcagcttccttagggcccctttcggtgctttggggttctgcctggccgtgtatgggtggtgggggcggtgatgggtggtgtagagaggaaggcttggggaagcagaggctgaggctgtatgggaccttgccattatttctgaaccaatgagtgagtgtttgagccctggctctgggcttgagccctggttacctggctgccctagccctgagctatgagtgctgagtgagagcagagccagacttggtgcttctctgagtgggccaggtcctgtggctgtgcctttcagcccagtgtggttggtagtggtgctggggtgagttagcactcttggttttgcagccttctagcggctttgtacctcctgccctgcagtctgacattgagttggcttctgtgggcccagtgagtgggaatctgtgggggctgctttatttagatcagttatttagatctttatttagatctttcttagctctgtgaaccccctcccaaactcctgtcccactgtaccttccttacccctttgttctcctgacatctttggtcggggcgcacattagcctagaccaggggagacctttttttttttttttttttttgagaaagagtctcgctctgttgcccaggctggagtgcagtagtgcaatctcggctcactgcaacctccgcctcctggattcaagtgattcttctgcctctgcctcgccagtagctgggattacaggcgctcgccaccaagcccagctaatttttgtatttttagtagagatggggtttcaccatattggccaggctggtcttgaactcctgacctcaagtgatccacctgccccggcctctcaaagtgctaggattacaggtggagccacctcgcccagctggggagacatttttaattgtcacaactgggatggtgctattgacatctagtgggtagaagccggggatactgctaaacattctacagtgcacaagagagtcccccacaacaaagaactgtgcaatccaaaatgtcagtggtatggaggttgaaaaactctagcctaggcaattgacccaacaaggaaggggccctataagtcttagcttaggcctcaagtctgaggcccagtagggggagactaaggagggacagactaggcagatgaatatccccaagtcctgcttcccagccccctctgaggcataccccctaattaggctggggagggaggcaggtgctgggtcagctgttgagtgggagggggacagctggggcctgtgtctgggtgaggaacattattgtcccaggagggggagaatcctggcctcattgccaagggaggctgtgaatggggtgaggggtctgtctgtgagtgggggcttcaggtttgccagctgactctggctcttccccgcatctcaagagcctgggggtaaggatcagacgtgggcgatcagacgtgggcaatatcttagatttgccaaatacacacatacttgcttacctgtatacattccgggtgttcatggataacatgcaagacacgcccctgccccagcaggcacaggcaatctgaccagcaagctaggatactggccctggcttctgccatggtttaaaatcccaactccaccttttacttactctgtggccttaggaaaatcacttttattctttgagcctgtttcctcagctggagaatggggataataatatctgtttagaagtgtgagaattaagtaagatttataggacactgggtacccagcgtgtcacagataggattcagttaatggtatgctattgtaataaacacagatagtgtttgtaatagtctacaaaggaacacctggtgacagacactcacccagcataagcagccaggagagtcacctagggtgactcctgggtgactccttggggaagcatgccctgaggtgcggaggcagaggatcttccatcccccgctgattgtgcacctggctcagctgccacctgctcaactgcggctcctgtctgtcagcacccctcttgcccctccttggcttggggctcctagaggcccaggtctcccatgggggccctctttggtgggaaggcctagggtgatgcccccacactcctcggcacaagtgccctagacatacccgactccagcagagccagagagcagcataaacacaggaggcatacacacgtgttagcacgttgcccgtgtgtgcaaatgggctaaccaggcttctgaagactcttactctggcggggagcccagactggtaccacagcccagaggggctgtttagacagctgtggaggccacaaaagagctccctgttgcttctcaggccctgccctgtggtgggtgtggagtctgtgtaggtctggtggggagacgggggtgttctggtcattcctgcccaataggcaacaccaggagggtggaagtggaccggccacatcattaaccctgtgcagcctgggcaggtggttttagggaaaccaagctgagggggttggggtgctgagcttgctggcaggaggaaggggtgctttgggtcttagaccccagcctgggggtgacagattctggccctgccttggcatcaggtatcagaagcatgtgcacacgtatcgcattctgcctgatggagaagatttcttggctgtgcaggtaggagcttgggcccctgacccctgaccttgatccagcctagggcttggggacctgctggctgacccttcctcccacccttgctggcccacagacctcgcagggtgtgcctgtgcgccgcttccagaccctgggtgagctcatcggcctgtacgcccagcccaaccagggmcttgtgtgcgccctgcttcttcctgtagagggtgagcgagagccggacccaccggatgaccgggatgcctcaggtacttcccagtgtgcaggtcccctccctgcccctgtcccttggctctacctkcctcttcccatccccccttctcaaccccacctctcctgtaaccccctttcccttggccatgatgccggggccctttaaccctctttccatggaagtcactttacagctgcatcgtgcctcctactccactgagtgtgggaggcccaaacggctgcccactgacccctgcccacagatggggaggatgagaagcccccgctgcccccgcgctctggctccaccagcatttctgcccccactgggcccagcagtcccctgccagctcctgagactcccacrgctccagctgctgagaggtgagaccsccatsccatccactgaacaggagaccctttctcctctgagaactatttccctaccaaaggtggggaggccttctaagaccccaccagggacccccaccccacctcagcccagaggcagataacctgatccatcccgccctggttgccacaggtactatctcctctagggatggggcagaggtgctgggacaggtcagcaggacctccactgacttcttaacccctccccaaagtgctcccaatgggctgagcaccgtctcgcacgactacctgaaaggcagctatgggctggacctggaagctgtgaggggtggagccagccacctgccccacctcacccgtaccctcgctacctcatgccggaggctgcacaggtatctgggacatccagccccatgtattacacccttacctctgacctgtcctcacctgcttcccggctgcacaggtgccctgatctctgatcctgaacagtgaactagccattgcctcttgactttcctcactggtagcctttatccttgtggtgaggttgaggctacacccagcgcccccttccctatacttaggtcggggtgggagttcttttgatctgatgtcttccctagtgaggtggacaaggtcctgtcaggcctggagatcctgtccaaggtgtttgaccagcagagctcgcccatggtgacccgccttttgcagcagcaggtagattgtagggagacctctgggaggtgcgttcgtgttctggagcygggtgggaggctctgcttaggtgactcatgtacaagcctggttcttcctccccccagaacctgccacagacaggggagcaggaactagagagcctggtgctgaakctgtcagtgctaaaggacttcctgtcaggcatccagaagaaggtggcatgatctctgacccttgacccccgattcactggccactgtcattggcctagcactgatctcaaccctcagtctacaacttaacattggccccaaggtcaattgtgtccctccctgccccagccttcagtgtgtcccctgaccccgccctgcccttgttccctccaggccctgaaggccctacaggacatgagctccacagcacccccagctccgcagccatccacacgtaaggccaagaccatccccgtgcaggcctttgaggtacatggcagtggggcctcacagggccaagggtggttggaggtgaccagggtgctgcctactccaaggtcttgtcagcagcctccccacctggcctacaggtgaagctagatgtgaccctgggtgacctgaccaagattgggaagtcrcagaagttcacgctgagcgtggatgtggagggtgggcggctggtgctgctgcggagacagcgggactcccaggaggactggaccaccttcacgcacgaccgcagtgagccagggccagacctgggaggggtgggcagggcrgagcccctggcctaggggcacaggccyrtgtgaccggtcctccatgccctagtccgccagctcattaagtcccagcgtgtccagaacaagctgggtgttgtgtttgagaaggagaaggaccggactcagcgcaaggacttcatctttgtcagtgcccgggtgagcagcaggctgggccaggccactggggactgcgggggtcccccacatgggtgcttcccattggagggtaagaaagggaacacatgatgtaggcatgccatccctcctggcaggggtaggtctgacagggtagagggtgttgagaacgggtggcctgagggtggataacatttgccagcactgttatatgcttgagcagtgggtatgcagtggagaaccagacagaccctctcctcatggacatgagccaactggcagggtatccctgtggacggggggcttcctggatgcctaccygcccctgagtggctgctgttcccccagaagcgggaggccttctgccagctgttgcagctcatgaagaacaagcactccaagcaggacgagcccgacatgatctcagtcttcataggcacctggaacatgggtcaggcccgggctggggctggggcgggagagagggatggccccagagcaggtgcctaacccctccagacccacctcacccccttcacctccaggaagtgtaccacctccaaaaaacgtgacatcctggttcacatcgaagggtctggggaagaccctggacgaggtcacagtgaccataccccatgacatctatgtctttgggacccaggagaactcagtgggcgaccgcgagtggctggacctactgcgcgggggcctcaaggagcttacggatctggattaccgcccggtgagggggggtcatcttgtccaggaccctgtcctcacacaccacctccaaactagcctacttgacttcatgggcaaccctgggagcacagcttcactggctttttctctggtccctgagcatatcctttgggagatctgacctgagtccttcatgccacgagaggaaccatttctctccagtccgtcaggaagaggggtggcaagccttcctaccctgtgatggacacaaaagtctatttatagtgcagggggaaatgcaggcagtgggtgcagcagggcagtggtgaccatgcactctctacccagattgccatgcaatcactgtggaatatcaaggtggcagtgctggtcaagccagagcacgagaaccgtatcagccatgtcagtacgtccagtgtgaagactggcatcgccaacaccctgggtaagtggggctggcaggtgcccaagagtggcagcgtctctctgtccatggcttctgcttcctctcaagcctaggattgccccatttttggtgatcttagtttccccatatatagggtactttgaactttgaaaaacatattcatattctaaatctctcccagcaccactgggaaggcaaggccaggataattacccccttttcacagatgataaaactcaaacccagagtggttgagtgacctgcccaaggtcacacagcaagtaagtggtggagccaggcattgtgcccaggtctcctgattttcggtctggtgctctcccaggtagattctgcgcagaatctgcagggcctttcagcttcacccttggggtcccctgtgatctccaggggctctgctcacacatacagacagactcaggccatccacacagaccatgtgtgcccaatgaggacccccccctcccccagggaaggtgtgggtgtgtgcaggggcctgcccatgtcacagcgtctggtgggctcagcgggaggatcctctcactgcagctttgagaggcagaagggagagttgggagccctctgaggatgacccaggccttcctctcttgcttgccttaacagggaacaagggggctgtgggcgtctccttcatgtttaatggcacctcatttggctttgtgaattgtcacctcacctcgggaaatgagaagacggctcggtgagggggcgcctttcccatggtctctttacacccatcccattcacctgaggcctgttcccgctcccataccctagcccatgaccctcccgcaggcctgtctccagagaccccctgctctcttatcccaattcaagacccttctgttcctgaccctaaccttgtccccaggggcccggatctttaccccatccctgactcctgagacttcttccctttatgcctatccctgacttctggccctgaccctggggatctacccctccccaccacgcacccctcaccctaggaggaaccaaaactacttggacatcctgcggctgctctcgctgggcgaccggcagctcaatgcctttgacatctctctgcgtttcacacacctcttctggtttggggacctcaactaccgcctggacatggatatccaggtgcgagcagggccctgccatggctgtagggaggctaagggccacatgggctatcacccctggctctggctccggaggaatgtttctagcctttgtgtcctccaccccaggagatcctgaactacatcagcaggaaagagtttgagcccctcctcagggtggaccagctcaacctggagcgggagaagcacaaggtcttccttcgattcagtgagtgtgggcctggtaggtggtgatctgagggctaggagacttgcagtatccctgggtgtcagggccctgaaccccacctgtctcctgctttccttaggtgaggaggagatctccttcccacccacctaccgctatgagcggggttcccgggacacatatgcctggcacaagcagaagccaactggggtgagccaagaaaacggcatgggccttgggggacngcaggcctgcgatgaatcaagaatttgggtcaagggtatgggcctctgcagcttccactccagcctccatggcccctctgaggcctttgggtgatcctgggtattttgaggatccaagaagggaggtgggtgctagggcctctagtaatagaagtgtggggactcatcagctctggagtggggtccatgccaagcagcctcctagctgtcagctctaaccatgctgccatcccctgccccaggtccggaccaatgtgccctcatggtgtgaccggattctgtggaaatcctaccctgaaactcacatcatctgcaattcttatggtcagagcctcccggacagagtgatgggagatctggggtggtcaccatctggactctgccctaaccttgggaggtgggagccgagggtgggyatattcccyctgagtccccattcctatcccctctccccaggttgcactgatgacatcgtcaccagcgaccattcccccgtgtttgggacatttgaggttggagttacctcccagttcatctccaagaaaggtgactgttccagatatgcttgtgggtgtggcataatctaggtgggcacaggtggtggcctcgggatgtacataggtttgactatgtaagtgtgtgtgtgggtgtgtgtaccagtgagtgcaggagtgtttctcaaggtgtgatgtgtcagggtgtctgtgcgcctgggccatcacaagagttgtgtgcccatgagtgtgtgtgcatacgtgagtgtacacctatctatgtgtctgtgtctgtctagggccacgtgtgtgtccctgagtatgcctgtaggtgtgggaatcctgcaggcattctggtccccagcaccctcttcaatgggttttttatccttgggttgtctctttgctctggtccagggtctggcctctggagattccctgttggtggcttgggactggggaggcccctcctggccctgcctccttgctctggacccctgatttcctgtcccagggccctgtttctctgtcccattcctcctgtgatcctctcagtcctcctgtttgttctcctccctttctcctcagggctctcraagacttcagaccaggcctacattgagtttgagagcatcgaggccattgtgaagacagccagccgcaccaagttcttcatcgagttctactctacctgcctggagggtcagaggcgtggcaggggctgggtgtgggccaaggaggatgggaggcaagagggtgcagtcagccccctacttagggggaaaggaagctgagaggtggtgctcagttgggtgtctcccacccccaccccagaatmcaagaagagctttgagaatgatgcccagagcagtgacaacatcaacttcctcaaagtgcagtggtcttcacgccagctgcccacgstgaggctgtgggcagggcccctgcttatgggtgagggcacagagaggggtacataagagtktattggagagcctgcctgggagggagtgtggggccagcagagagagagagagagaktgtgtgtgtgtgtgtgtgtgtgtgtgtgtgtatgggcatgggcatgagtgaggataaaggcgtttgctttattttgggagtgtggaaccttgttgcagtttgttcattcattcaggagatgcttcttgagcttttgctagatgtcaggtcctgtgttagctattgagaaaattaattagttacagtgatgctaggtgctgtaaaaggcctgtatagggctgtgtcttctgcattaaggatttggctcttctctgaagagttgagtgtgagtgagcacagatgacctgagggtggggattgagtggtgtcagggggcagcgcgtaggaggggcaggaggaagtggcggggctttgttcctcactgggcctccctgcttcccagctcaaaccaattctggctgatatcgagtmcctgcaggaccagcacctcctgctcacagtcaagtccatggatggctatgaatcctatggtgaggggtgaggggtgctgaggggaacaggaagccagacagggccctagattagcttggtaatttgctggtttgtcccatctgcycctcaggggagtgtgtggttgcactcaaatccatgatcggcagcacggcccaacagttcctgaccttcctatcccmccgtggcgaggagacaggcaatatcagaggctccatgaaggtgcgggtgcccacggagcgcctgggcacccgtgagcggctctacggtggggactccactgggacatgagatagggtggtgtgaacagatcaaggagggcagggtgcggggggcatgttggaatctctgggatacctggaggttctgcagccacagctgggaatagtcctgccccaaggcatagctgggaaagggctggcaggcccactgggtgtctgtgggatccaggagcccaggtctcctctgagtctcccttcctgccccctcagagtggatcagcattgataaggatgaggcaggagcaaagagcaaagccccctctgtgtcccgagggagccaggagcccaggtgagctagggctgtgttgaatgtcatatgaaagggtacctgggggcatctggtcaaccccacttcatctctctcctgtgcatccctggcaggtcagggagccgcaagccagccttcacagaggcctcctgcccgctctccaggttatttgaagaaccagagaaaccgccaccaacggggaggcccccagccccaccccgagcagctccccgggaggagcccttgacccccaggtgagaggaggaacctgtcaccgcccccccttcccccacccacctctatccatcactatcccctgcagggtctcagggttggcctggagatcatcagctgcttaggtgccctgccactctgtggttggagctgccatggccttatgcctgtggccagccaggccacccttagctgtggctctgagtcaaagggagcagtcagcctttcctctcaattctgcctttaaaaatggaatgcraaattgtttctaagacagctccctccatgtaaacagacctagcttgagccttctatttggaggaggcacatggctcggcctgggatttcccagggtaccttctttggaactctgtcctgcaagaggccccagttgaaatgggtttgtggtcaaatgagtttgggaaatgctttttctagattcttttcttagacattcccagtgcatgttagtattagcaaaagctctgagcatgtggacaggaaggaaacctcttttcagctctgtttaatatagtttcccaaacttaatgggccaggaaacttattttccatgtagtaactattaacgttctggggaattagtgctctgtgtcacactttgggaaagtgaggcttgctttctaattatatccgattgttgcttaaacttacataaactcctaggtacagtttggtgctttttcactcatcttcagctgttgtcagtcaccccggttttatccctaggcttgaataagacccacctgaatctctgagaaagattctgcagcggattgactgtgggtgcctcragaggctttccaaacctggcctctcattggaggcttcttgccctgtcttctggcacctctattctgacccatttagcttgggtttcacagctacagataaagtcatgaaagatctaagtatcttagcaagtgaggcaagggattgtagggttatccattcaaagggttatcctccctctgacctttagagatgaagaaactaagggcaggtgatgtgctcaaggtcatgagaaagtctaggaccaggggactttctgactcccgtctagttctccttccactgcttccactgccttagacctgggttcctggatcctggcttagtcgttytgcttccacacccaggttgaagccagagggagctcctgaaccagaaggggtggcggcccccccacccaagaacagcttcaataaccctgcctactacgtccttgaaggggtcccgcaccagctgctgcccccggagccaccctcgcctgccagggcccctgtcccatctgccaccaagaacaaagtggccattacagtgcctgctccacagcttgggcaccaccggcaccctcgtgtgggagaggggagttcttcagatgaggagtctggaggcacactgccccctccagactttccacctccaccactgccggactcagccatcttcctgccccccagcctggatcctttaccagggccagtggtccggggccgtggtggggstgaggcccgtggcccaccacctcccaaggcccatccaaggcctccactgcccccaggcccctcaccagccagcactttcctgggggaagtggscagtggggatgaccggtcctgctcggtgctgcagatggccaagacgctgagcgaggtggactatgcccctgctgggcctgcacgctcagcgctcctcccaggccccctggagctgcagcccccccggggactgccctcggactatggccggcccctcagcttccctccaccccgcatccgggagagcatccaggaagacctggcagaggaggtgtgtggagcagggtggctgtctgtgtgtgcctgagtgtgcttgcccacagactggtaccctttcactccaccattcagcactcatggtgtccctgctaccctgaactgatcactgggaagttgggagacacatgtatcagcccagcccttcccttccttttccccagagcatgcagcagaatgtgactgcaggtgtttctatggggggcactcagctccccstgacatgccctgtttccttaggctccgtgcctgcagggcgggcgggccagcgggctgggcgaggcaggcatgagtgcctggctgcgggccatcggcttggagcgctatgaggagggcctggtgcataatggctgggacgacctggagtttctcaggtgggggaggggctggccccgggggcggagctggggccctcaggatccccttgcccatctcacttcccagcctgttttactccacagtgacatcaccgaggaggacttggaggaggctggggtgcaggacccggctcacaagcgcctccttctggacaccctgcagctcagcaagtgatagcggaggcaccacgaagctgtgaactcagagcccctccctgctaccaaggcccagctatggccccagggttgaaaagttatgagggtcagggcagtatctctctgcctatttattggggtgcctatttattggggatctgcattccccgctgcccaatcatttgcaatgccctaattagggcatcctgcccctcgccttttaggctcaggacggaaggtcagttgccatggttaccgaggaccctggttactctggtgctgtcctsttttactggaccccgcctcccagccccaggggtgcctgtgggggtccatttgggtacgtctgggcccccactttcaccagtttctgcggccttccaccgggcctgaaccacagcggaggagctccgctaagacctccccacccccgctgggggtgggggcgggtgtccgtccggaaatgaaggaatagcccgaggaccgggctggggtttatttaaactgttctgtgtgggtctggggagggagagcaccttaatattattggggttggttggggtggggcaggatctcagccataaagtgccagtttgcttagttctcactgtctcctggtctgtgctgccctgctctggggatgcacggcggcagggtgggggagggaggttcctcgcaggtctcagcccgggacagggtcttgcaagcagcctcctgggcagtcgtaagggttgcggcgtgatgtcttcaataaattaagttttatttggattgagtaaaacttcaataaattacaagtttttcaaagaaaaaggacaaccaaaaaaattagggaaagagaatccctctgtcccattccccaggcagcccctccactcctctaacaggtccaccctctgtgccagacgggctagggaagagaggagacacgtgagggatgaattggcggtggtcattaattatcccggcgaccaccagcctctgtacgggtgggcccgaggggtggggcagcgggctttcctgatcaccagcgtaaggggtgacccagccgctgcagagccagggaagggggctgtgccgatcctccttgaggaccttcactttgagggcactgttagggacaggcctcatgtgataccgcatccaaagaaggccaagctagaaggagctccggggttctcctggaggaggtcccggtataaagaactccgctctgctggtagagggtgggtgaggacgagagtggccctgacttggtctccaaagttggggaggacacaccgaggggtgagacagtagggagtggagacggatggggacttccaggcgggtggccaggatgggaggggctgtcaggtcctggaggggcagggacgtctctgggggcaggctcggagcctccagaggccggcagctagaagagattggtcttcagggcggggccgggcttccggtgaaaggaggacagaaccccggagaagggcccggggccggactccgccggctgccaagccttaagtagttcggccgctcccgcgccaggcccgccgcccccaccgcccgccacaccggcccacagtgcgcccttgagcggctgtggccccggcccaggtcccggcccggagcccagtgcgacgggcagcgggctggggctcaggcgcgggctggccaggccgggcgcaggcggcggcggcagcgaggcggtgctatcgggcgtggggctgcacgtggactccttggaatcgtcgtcctcggaggagcagcgcgcctcgccctttttggcgcccgccgcgcccgccgcgcccttggcgctggccgcgcgctcctgtttgcggaacttggcccggcggttctggaaccagacctgcgggcacaggggccagtcagcctggacgagggtcggagaacgcacggggtcagcccgcggccgcaaggctcgagtgagatcctggttcggaaagaaccgggcccgggttcttactagttggaggggccttcggccctccgcacgcagcccgctgcactccgcgctccactggcccctgcctccagatccctgggttcttgcccttgggatccactcacccgctgactctgctgcctcccagcactcttggtctcccggaggggaccctgccttcgttctcctcactctaagttcttcccccaattccttcttttaggaagctctgggacttccctcctggagtgttccagggccgtggagagcagtttagggcgccagtaaaccttttgtctagggcatccagtcaaggcgggccaactgaacatctgtacacggagttgtacaaatagacaacagtctgctctagcccggctctcttcggccctgtgcctgccacaaactcagcctcccgggctccgggttttcaaagctgcagcgccggggtagggaaccccaggggtgctgactggcctgccccctctcctcctcagctcggccctgaggtcccctgggtctccccctctagcccctcggcctccctcctggcttctcaagcatcactcggaactttctgccctaagagggagacagagcggaggtagcctggagctaaacagatcgggtctcccaagggcctccaagtccgggccctgctgcctcccgtagctgcccaagcaccctgggaccgcgccctgccttcgggctgcatctgcctgtattcccctacccccaggtgttagacattaagctcccacacctccttccatgcgcactctcgtacacacacgtgcatacacgcacctgcacgcgagcctcagtgaggtcgatcttgagcgccagctcctcacgcgtgtaaatgtcggggtagtgggtctcagcgaaaacgcgctccagctccttgagctgcgcgctggtgaacgtggtgcggatgcgccgctgcttgcgcttctcgtgcaggccggatggctctgggaagaacttgtagggcactgcgggtgtgtgcaggggggccggggggggggcaaaaaggatgggggagtgagaagcagagttcaacccgttgtgtccagctccgggggaatcacacgcctcccccgtccctggcctgatccctcgtcttggtcccggcagcctggggccgagcgtcctccctattactcaatggagccggcgggataaaggcggagggagatcagggagacctgagccccaagagcggccaaggggaaagcataatccaatactccagccaagacactccctcccccaccccacccccgtcgtcgccctcctcccaagccctgttccctccatctccccctgcacccccattcaaccgtgcctccgacccttccctcctgtctgtctctcagcccgtctgtcccctctgtctaccctggccctggatgtctgtcaggtctcatcagcattgccagtcttcccactaaccagttctgggccaaggctctgcaacagagaccctcccaccggccctcctttcagccctaccaccagccttcccaccggctctcagctgtatacagatttggctccctccacccatccacctctccccttcccaagcctcatttcttcaattctgccccactcccctgacccccattctcccctagatgtccccctctcctcttcctaatcttcctccatttgaatctctcttcaactttccatttctcagccactcttctctttgtgcccattgagaagacttcctccatcttctctttgcgcccattgagaagacttcctccatcttctctttgccctccttcttcctccccaggcaccttctccatgtcccatctcctccaaagccaacactgccccccaactctcttcctatacccatcccagtctccactgccccataggtagtgtttctgacagtacttcccttccctgtctgtaaccctggtttaagtcttcatattcaccaggggtctccaatctcatctttgtcccatccaggcctccatctcccctgattcttgtctccagcaccccatttgtattcttatcttcgtcatctctatttctaatcttctttggtccccatcgcctgatacttatctctatctccccaaccctgagtccccatttctcctaggatttccagtgcttccatctctgctcccatctctctgtaccttatccccatctctctggtctcaaaaccctgtatctctggaggctgtctcccctcttcccaatccctaccctcatctggctcagggtacccaatctccccaccctgggcctcatttctccaaatccaggttctcatttctcgtatctcttccccaaaccccagcctagggcccagtcttcttcttcttcttcttcttttttttttgagaccgagtctcattctgtcacccaggctggaatgcaatggcacagtctcagctcactgcaacctctgcctcccaggttcaagcgattctcctgcctcagactcccaagtagctgggattacaggcgtgggccaccatgcccagctaattttttttttttttgtatttttaatggagatggggtttcaccatgttggttaggctggtcttgaactcttgacctcaagtgatccacccgccttggcctcccaaagtgctgggattacaggcatgagccaccgcgcctggcccttaggccccagtcttctacttgggtccccggcagtcttcccaggagggaaggcgataagattacatagggcaggctgggactctaatcagagggctgagatgactgagaagctcagtgaggttgagggtttggacagggacttggatctaaagtcttggggatgcaggagctgcttccgggttctacagaactctagctgggagagtctgggggaatggggaaatacaagtggcttaaaaacccgggcccctttattgcgggctacgggatctggttttggtggctacagaagggttcggtcccaggcagcgtgggtccaagacagggcaggaggggcctgatggccacgcgagctctaggaagcttcccgtctgggcagctcagctgcctggagaggtccttgctgggggtcatgcatctcgtggggcagcggtgatggggtggggtgataagtggtgatagggctgggctgggagcctttttcaaagatccagcgcttgtagaggtttagtggtcagtctttgcaggtggtgaggggaaggcctggtaaggggcccagagctggatggggatatatttccttgacctgaagggcacgagacagagatttggcaacgagaaaaaggaacaggagagatgagagggtgaggctcattcctgcggaggagaacctcgtattctgggggtctctcggggcattggagggtctggccaaggcaggaatgggggcggctgagggggacagtcgcattcacttggcgagcgggcccagggattctgcaggaattggagggagggttgggccggggctgcgctcacctgccgagtagggcgcgggctggtggtcgcgtagggcgccaagtgcgcagttggaggagccgagcgcggggcagggcggccctgccgcggggaaagcgggccgcagggggctgtattggaagccgccgggctggctgcaggcgccaaagtcgccgtaggcggacgcctccatggccgccacgcacgagtcgtacgaattgaggtaggagtagtccatcggcccggggggcgggggcgggggccgggccaggccgggtcggggtcggggtccgggtggaggtcggaagggaggttcgagcgccaggctccgaggacccgaggccagctctgagcgcccgagagtccgcccgccccgtcgcggccgcactcagcccgggtgcaacgcaagtgcagccagcccggcccgcgcgccttttaacgcgcaggaccccgcggaggggggcggggcggggcgagctccgaaggggcggggcctaggaggcccagacaccgcccaaagccgccccgacccccaccccgaagggtccccgccgccgtcttagggctcagaggtgtggagctgggatgcgcgggaccctatccccggagtccctatcctgccccaatccggaccagaccttcggtctctacacagcgtccgaggccagagggtcccgacccttttcccgggcctccccacctgcggccccgcggaagggaggggaggcaggcctggcggcgctcgtgtgaagaagttaattcaattcgctctgataaccgagttattccgatctggcccctcagccccgcccccagcgaggtcccatcccggcggagactgcggaggcggcccaggaaggrggatggagaccgggaagagacggagcctgggatggggacagggaagggacgtggatagacagaggaaacagagaccgggagagaaaggggcagaaacagtgatggagacagggacaagagatacaggtacacagagggagacaaggacggaacatacacagcgaaagacaggatggagcggggacagggcagagacaggagatgagggtaagagagagacaggatggagcggggacagggcagagacaggagatgaggttaagagagagacaagaggagacagggagacagggggacgagaaagagagtgagggaggcatggagacagaaggggtcgggatgagacatggacggcaaccaggactgcggtggagagcaagggagggatgagacaaaacagaggcaggaatcgtgagacagacacatatgcccagggacagtctgagagagacagggccagggacagccacaagcgcgggagcagaggctgagagcggagagaaaacgcctccggggagcttagacacgagggctggagcgcagaggggcccagggatgatgctggaggctctggggtgcggcctccacggggctgcggagagggagggtcgtgggagccaggtccctctaccctgacttgtcccgaggcccacacgaccttgcaccttcagggcccgcctgcctctccccccgttccctcagctccatctgcagtatgcgaccctctcctgtgaccttgggctcaggatgcgatggatgtcagaaagggaacgtaccccgtgacctctttattgttcttcagtctcttacccctgttctccagggccccccgctttttttctccagggaaaccacctagactcagtctgcacctggcccagacatccctgcacagattcagtcaccagctccctcgtgctgtgg

SEQ ID NO: 95124 - DNA, 50518 bp, Homo sapiens
agaccagaaaccttggagttacttgattccagcctgcttcttatctttaagatgccataacctgtgcctgtcctctcgacttctccatatctttttttaaaaaaattaaatttttaattaaaaaattttaaatatattttttgaaacagggtcccactctgctgctcaggctggagtgcaagtggcgtgatcactgctcattgcagccttggcctccctggcttaagcaatcctcctgcctcagcctcctgagtagctgggactacaggtgcacaccaccatgcccagctaatctttgtattttttgtagagatggggttttgccatgttgcccaagctggtcttaaattcctgggctcaagtaatcctcccgcctcagcctccaaagtgctaggattacaggtgtgagccactgggcctggccttctccataccatttgctcccctgccatcttcacttccattgccactctgctccacacctcaatcctcacctgtggccactctgtccagcttggtctccttgcctggcccctattacgtcctatgacccacaccctgtttgctcagtattctctgccacagcagctgctcacctccctgactgtcatggctcttgatgcctctgctggcctatgaagggccaagccctcagtgcattcgggctgggaccccagccttttctcctagtcctcgccataccctgtgctatggccaagtgaaggtcttgctcctggttctcatgtgctcttccaccttcttgctgtctctgcacattcagcctatctcagtcctcttattgtaagttcagacacctcctcgatggaaagcattccttcatcttcttagcctgaaaccctctctcacttttatcagggaaacttctgctcacctcttgttaccgcattataaacagatttactagatacatctatttgccctcaaaatcctaggtgagaaaggaacatctctgggtatcagaattggaggggaggggctagagagaatctcaaagtcagagctgttaggttaggaatgggggctccagggagaattgagcccagccagtgcccagccagataaaggcaccaaggggccccttaaaaaaaaaagtttcattaaagtataacatttatacagaaaaaggcatacatcataagcatgcaactccatgagttttcacagtgaacacatcatgtgcccagctcctagaatgcccatgcagccataggaaggtggagctagaaccagacccctccatgaagcagggccgcagaggcccggcacttctgtgaaaagtaatccagaaaattggctctctagcccagagaagcacaaggaagcctgccatcttcccagggctctggggaatgcctactccctggctgtgaatttatacaactgcagggaacaggacaaccaagttgagatattcacacaaacttggtctaagactggtgggacccctgggtcctggaagaagcaaatcagaaaggcctcttagggacccttccaccacccaggaagcagagaaccctggaaaaaacacccagtatgaatgagctaaaaaaaaaaaaaaaaaaatcacaatgggcacttttttttttttagatggagtttcgctcatgtcgcccaggctggagtgcaacagtgcaatcttggcctaccacaacctccgcctcccaggttcaagcgattctcctgtctcagcctcctcagtagctggattacaggcatgtgccaccatgcccggctaattttgtatttttagtagagacgggtttctctgtgttgctcaggctggcctcaaactcccgacctcaggtgatctgcccgcctcagcctcccaaagtgctgggattccaggcatgagccacggcacccagccacaatgggcacatttagtcatgcagtataagtgaagaatggaggtcactcagaagacacagtttttcattacctacaaagttctacatcaatccgccctggttcccctacctctcgccgcccccctactcaagccatgtggcctccctgctgttctttgacagccttgttatggggctgagttgtgttcccccaacagacatgttgacatcctagcccccaggtacctgtaaacatgaacttatttggaaacagggtctttgcagacgcagtcaggttaagatgaggttattagagtaggcctttaatccaaaatgactggcgtccttccaagaggagaagacaggctgtgactgtggaggcagaggatggagtgctgcatctacaagctgaggaacgccaaggattgttgccaccgccatgagctaaaaaaggcaaggaaggattctcccttacaggtttcagagggagcacagccctgctgacaccctgattttgcatttctagccttcaaaactggacgacaacacatttgcctgcctggtttgtggtattttgttccagcagccctaggaaatgaatacaagcctcaaatgtgttccagcgcttgctggcctctctgcttgcaagcccttccccggacaacgccctcactcccttcaggtcactgctgaaatgccacctttgcagagaggctggtcctgactgcactactgacctgggcagttgcggcctctctcccttcctccacctcctttagctttcttctggtccctagccatacctgacaatatgttgtatgtctttcatctttgttgtaaaacgattgtctgccttgccttctagaaggtacgttccgtgaaattagggactgtccggttcattgctgcacacccagtgcctgccatgtgcctgacatagactggagtctcccatacgcttgtttcataagcgaatgagctgtttgagaatgttgtttgttttccttttcactcttttatcctctacatgacctaatgttttgctcatggtagatggtcaggaaatatgggcagatggattaataaacccgtcaccaccattgggctgaaggctctgcgtggtgaagaggggcaagtcaaaacgcatggcatgttggcctggatttggtggcctctttgttgtaaaatgattctagggacaattgatcagatttctctgagtaatcattatagcttaccatttgttacatgcagccactgtttctcttgccctgaatgcctcctgattcctcccttccccagttatttttctgattaaggaatcagagttgaataatctaaatttagtttgtgtagctcagaggtgccaatcatggcaaataatgaatgaagagatttcccacccctttccctgaagcactgagctgaaaccaacaaattcattttatttaggatcacaggctgcactcagagtggtgtctgtgacaggtgagtgctttattcactaatgaactcaccaggccccagacaaaccctctccctcctggttggggtgctccttatctccgttagcccacacactgtgcctttttagccttctgtttgctaatggaattggtgtgtcattttgttaaaaatatgttaagtcagaaaaaattcatattatgtatatcatatggttccgcaaatttctttagcctttcaagggcttttctggtaagcctgtatttagagttcacaatttctggattaaggactgtgttttctaccagttttgaaaaggaccaacataaagcacattttatctgctttcactgcataagaacataaaaatttactcattggaaagctgttatattcaatgtttgtaagaaataagccatagattaggaataacaattgttatggtactctctgttggggaaaaagaatgaagttctgttttcagttataacccatgagttcttaatatgtgcaccaggaggttttatacatgaggaattttgaatgagtttttaaaagtcagtaaagcacctgtaatcccagctactcgggagactgaggcaggagaatcacttgaacccagtaggcggaggttgcagtgagctgagatcgtgccattgcactccagcctgggcaacagggtgagactccctctaaaaaaaaaaaaaacaaaaaaaattaattaattaatgaaaaaataaaaaataaaaaaagaagtcagtaaaaatgaaagtgcaagatgcgaataaaagaaatgaaatgatgctgattcattaaaatatttaataaagtatgtcttgctagttccataatcatttctggacagaaatttaacccacgccagccattgattttgtactggtgagacttggcacctttatgccttgtcactaatcatcagcgtttgcctgggagggaccagaagcycccttatctctacccagcaggagggcccagcaccctggatggaggggatgactttctccagggcctcccagaggggacaagaagagccttcatagctcagacgtctaacccccccggccattttattctctggccttgtctacatgtctgccagcacagcattgcgaggtgtgcagcctttcaatttagtttctttagaagaaatgggctcaggccgcgcatggtgactcacgcctgtaatcccagcactttgggaggccgaggtgggtggaccacttgaggtcagaagttcgagaccagtctggccaacatggcaaaactctgtatctactggaaatacaaaacaaacaaataacaacaacaacaacaaaaatgggttcagactgtaggtagagaagtatgttatccatgaagatcacctctttacagggcaacttaagaagactataatttttttatgagggtagagaatagccacacatataaggaaggtgggttgatacctggagcaggttttactgtgcttttctcaggacatccgcttggatatgaagatcatgtaggtaatatgaaaggctatccatttaatttgacattttgcattgggcttataaccatcaggaggaccaactttaataagaaataaactaattccatcagtagcacatatttaagctacagaaaactgggtttcagctgaatctagactccatcttccctgaatgttccatatggcttgccccctttgctcaaatgtgtataaggcctttgctcgaatgtgtgagactctgacccacctgcttcaaattgcattagtcccttcccccaccctaccccatctcttttaccttgcttcattcttcttttgtcctgagagggaaaaagaagaggggaggccgtggaagggctccatcattcaaagtattacatgttgtgattattttctgtgtctcccctaaccccatgtaagcccccgtctactcttttcactactgttttcccagtgcacatagtaggtgctcaatatttgttcaatgaataccgatgcctgagacctttctgtaccaagggctggtttcctactccacaatgcactgaacatatataggcagggtgggctgacggaggtgtaggaatgaaatgggcgcctgttcctcccagtgatctcagtgtgcgaccttgggggcgggacgggcggctaaactgggaaggtgcgcggatatgatacagacaaacctcatcataccgtccctccaagaaatgcacttgccaggctggccttcacttttcctaatgctcttcagtgagtttcacctgtcaaattctgctacacagagagggtgcagagaaactgaataatccctttttctattctgaaaataaagcaaaacaaaacaggatctgcacacttgtgttgtgactaggcaggcaaactggagaactgaggcaaaagcatccttatatctaaataatagtaatggaaacgtcgaaaaaagttatttgctgagtcatggctgaggatcctgacttcgctagtttggcagatgcaaacagggcacgcaactaggagtccagcaggttttgcagtgacctgcgatggtggtggggagcgggcttctagctcagcccccgggcccattttcacgcagggagcggcgcccagctggggcgggctctccgcgaggggcgtgtctctgcctggcctcgcccgccccggcccggcagcgaatgagcgggcgcgccgggagggcgcgaggtcagggggctggggacgcgcgtggggatcgctacccggctcggccactgctgggcggacacctgggcgcgccgccgcgggaggagcccggactcgggccgaggctgcccaggcaatgcgttcactcggcgcaaacatggctgcggccctgcgcgccgcgggcgtcctgctccgcgatccgcgtaagtgggtctgtcgcggcggccgccagggccaggatccctgagaaggcgtgggcagagcgggcagctggcgccygggccctcgcgcccgggggattcggggagcggccttgggggtgctgcgagcaaccgggcgaggggcgtcgcggagaagggagggctgagggcagcactcagggctcgggaggccgcggggagggcgcccggatccaggaggcgcaggttcaagtcccatcggtcggctgggtggcttggagcagtggctggaatttcccagagccttggttattgtcacctgcaataaccaggctgttgagaagattacgcgagggaaggtatgttatgggcctgccatagaggatagtaaggaaggcatcttcatcatcaccaccatggacatctgccctgcagttccctccctgctgaggaaagcccatggtccttggtccctctgtgcccacttctccttagcagcgggaccccccgtggggcagcctgggctagcgttttctagagatatctggggaacttgtaagacccaggaacagcctcccacgtttctgatgcaaaccgtgaataggttgtgaccacaggatgagctgatgggactgtggatctcacacacctggctgggacasmrtttccaactgtgacaccttgaacaaggcacctaacctcgccagagctttggtaaatgtacattgaaatcctaattttttttttaaggcttgccttgaacatgagcaccttgcctggcacacagtagtacacaggcatcctcaagatgtctagccattcatgcagaaggctgccacgaataagatgcttattcaatgcatccgaacggtgactggacacagaccggacatatttttctaagacgttcgtcagtctgacacctacttggagtggagggaatcccctctgaacctccatatctcattagacgtgcctttgttaggaaaatactaaggacccagtgtacaatgaggctagctcactaagggcgctgggggacaaagggcattgttttttaagaagaggcagcacagtgccagtcgtggggctgaaagaagtattgaactaatcttttctttcactgacctttcctgtggcaaataaagtctgacaggtcctagatttgaggtcgtggaacaatatgtgaaactttamattatttgtagtctaggttaaaagtggaaagattcagaaacgctagcagaagtagatttggagtcttatttgtgttacagactttgatttgaaggcatagttataatacttcatcattttggttgataggaaaagatcaacttctgtgtgagaaaacactgaggattatttccgaaaatgagttctgaaagtaaaagtggaaaagcaaagttttatactttatgtatttagcatattacagaattaataagaagcttccgggggtgggccatatattatctgtctgtttagctatctatatgaattattttttttcttggtgcctttttctttccaaactttaaacgttttgtttcttttgtttttttaagagatggagtgttgctctgtcgctcaggctggtgtacggtggtgccatcatagttcactgcagccttgaaatcctgggatcaagtgatcctcccgcctcagcctccctggtagctgggattacaggcatgatctagtgtgcctggcccyccaaacattttttttcactgagcatatattgtcttatgtaattagaaaaacaattctaggataataaaagagttgtagggtttacataagagacattagaacattttggctccatatcagcaactaaccaatattttgaagcacccactatgtttattaatagttataatatagaaccttatttcttttgttaattttaaaaacggtgcatattttataagtacttttgaagtaatcctcatctcctatgtgatagaaaagtgccattatagatttcaatacttgtgtatctcgccccccaccctcttctgcctcgcccacaaggatccaaaatattaatttggttttgaagaaccagttgatacttaagaacttttttttctgtttttcctttttctttatttctttttgcaacaacatgaagtcataacttaggaacttcttaagtcataggtatacttctgaatgatcacctattggatttgtccaggaattatgaagtttgttttttgagagtttttttttttttttttttgagaccgagtctcactctgttgcctaggctggtcttgaactcctgagctcaagtgagcctcctgcctcagtcttccaagtagttgggactacaggtgtccaccactgcaggagttatgaagttttgttttgttttttttttttttgagacggagccgtcttctgtcgacaggctggagtgcagtggcatgatctcggctcactgcaacctccgcctcccaggttcaagggattatcctgcctcagcctcccaagtagctgggactacaggcaggtgccaccacacccggctaatttttttgtgtttttagtagagatgggtttcactgtgttagccaggatgatctctatctcctgacctgtgatctgcccgcctcggcctcccraagtgctaggattacaggcrtgagccactgtgcccggtgaagtttcgttttcttatgtcatcttctgttttgctgcttatctgtcggtttgatcatttttattgtttgtaggccttctttttttctttttaattaaacaaaatagagatagggtctctccacatggcctaggctagtctcaaactcctgggcccaagcagttctcccgcctcggcctcccaaagtgctggaattacaggcgtgagcccccatgcccggcctgtttgtaggccttctraaggtagatcagttatccatgtaaggaggaggggcagaattacttggtcttagttcataaatgggcaagtctatactattggatattcttcacccctttgctcagccacatgcagtgtgcaaggcattgctcttggggctggacatatttttcccctcttatcttcacagcagccctgcagaagtagccttatcactattttgcagatgagaaaagtgagactygcagcatctcagtgagtggcccaggcccagccatacagcctcttggtcccgtgtgggatttctgctcagatctctctggtttccgaacacgtactctctacgccacgcaatgctgcccgtgccatcagattctcttcagctgtgagctgagtcttttccagagtctcagttggccctttgaatgtttacttwaaactccyttagcctggacgaatgctaattgtttggtaggagacgcttttcatttttctagaatcttcagatcattaggggagaggagtgttttggatgagtccttgaagggtgagtgtattaacgaacctgagtggaaagggtcccttggcagcgacatcattctcctctctgagaatcyggtgaaccatggagaaaataattttgtaagtargacatggtaatagttaagcagcttgaaaagctactagctcccaaatttattaggaaatcctcatctactagttggaaaatctagtccctccccaccgcttccttcttcttttttttttttgagatggagtctcactctgtcacccaggctggagtgcagtggtgtgatctcgtctcactgcaagctccacctcccgggttcatgtcattctcctgtctcagcctggaactacaggcacccgccaccacgcctggctaattttttttttttttttgtatttttagtagagatggggtttcaccgtgttagccaggatggtcttgatctcctgacctcgtgatccacccgcctcggcctcccaaagtgctgggattacaggcatgaaccaccgcgcccggcctttcttttttttttaactccttaaattttgtgtagaaacgagggtcttgctatgttgcccaggctgcccccaaatgtctgggctcaagcgatcctcccacctctgcctcccaaagtgctgggattacaggtgtgagccaccacacctggcactccttcctttttttaggtttgaaggaggaaatgtcattttattacaggttgagtaccccttatcctgaatgcttgggaccagaggtgttttggacagattttttttaggttttggaatatacttacttacagattgagcattccaaatctgaaaatctaaaattcaaaatgcwccaatgagcattttctttgagtgtcatgtcagtgctcaaaaagtttcaggttttggagcattttggattttggattttcacatttgggatgctaaacttgtaccagcagtcaaactgtggaatgccaaggtttcattctcatgccccatggaatccgatacaatctcactcataaggaattagggccattgcagcatgattaggaacctggttaaatcccacgatgaagttcagaattaaacttatgtaaaaaaggagatgtgagttggtttgagccttggaattgaatktttttttttttaaaacaccaactcaaaccagatggaattgaacttctttatggaatctttgcacttccactttgagttggtaaagattattcagcataagctgacatgattggctgtgctaggaatgtgtacaatctgggtggttggaaatctaatggcctggagatataattctcttatattttacagacatgctaggtgataaaatcagagcaggtatagttcccgtcctctagaaactgacaattgaaactaacaccagtactaatcacatggtggacactgcagaacgcttcactcctctgctctactcctttcaagaatccctgtagcaaggtgtcattttacaggtggggaaactcaggctcaggaagacctggccccaggtcacattgctagtaagtggcagagctgaattcagagtcagagctgcttaacccacagcctgaattcctcctcagggcacctttgcctcttaggaggaggagggcagaaggagactgatcgcaagctggtttctaaccggctggtttgagaatggggaagaggtcatkkgcatagcaccaggcaccacagtaaccaccgtctcacatggccatcttcagtacttcctatatggcttcagtttcatttcactggctgtttaaggaccagtactcttcatatgacagctgagtatggcacatgatctcctcaattcaggtgggttcttcagacccactgccacctcctgtggggcccaggacaagggtatacttgaaggcacatatatggtatgtgggatatagcaagctaacaaactgggaaatatgttctgtcctcctatgttgacaaatagaccttgwwcacaacctggaaggatgagctcttgaactctctgagttcctgcasaagtgtagaggcctttggagagttgcctctgactgacatgctttcctgcttctcttcttgccgcyggctctttctggccttgtggggagcctcacagacagcctggatggactctctggtcttcatgcccagttccactcttgcccctgcaaacagctatctatcccttggccaccattcaggtcaagacttgatccactgatggcacaacctccctcaggaggatggatctgaaaaaatgcctgcacagaccctgggagtgggtgtggagcttgggggacagggaatcctggggcgctgggagcctggtctggcacgtgggatgtggactcctggggtggcatgtctccttggtggtagagactgcataccccgtggggtggggtgcagtgggaggagggccagaacaggccctgggaagcagaggccccttgtcaaggttcaagggcagtactgggttctcagcacgagtgctttccgaagaaggcttggaggcagaaaggagaactgcagctatttggaaactggcccactcgccactcccgaaatcggcggcttttcacttttctgcagccccttctccttccacaggagcagcacgctactgtcagtcatgttggtctcgtgcaggggttcttgtgagggattgtatcaaaatctgcagccgaggtggggagaggaggtgtgtgtagtttctaaaatgcttctctgcaggctctcatcggccatcctaggggagcgatcctccaccccatccccttggagagggcttaagttcctttacctgcctgcagagaaatgctaggaaaatcatttctgccatgggatctctttaaattttaaagtcaggaattatgctctgaggacctcttcagaagaaattactttctagctagatttcatgygagcactttaattttgtcacagtggcatccagcagctggagggtctgtcagccatggaggtggaagtcaggtgcagctgcagcggccgtcaccacagaaacagcccagcatgcccagkgtgcaaaacctcaagttcaaccgcagaagaggtatgagtctaacatcaggtacaaataagaatttctctttatcgatgcagacaccaatagacacaagctgcctgggaggaaaggtgctgggaaaagccagtgtggaaggagctattttcttggcttcckttcaatagctgttaaaccatagattttacaccctccttccccactggatccttccctrcaacagggctattgttaaaagacacagagttgagtacaaacagtctgcaaattgtgttaagaatttggttctggaatatgtcacataacacaaattatatatgctggaaatgtatttacgaacctaacataattatgcctatgaaatgtatgttctgtacaggataacgaataactggtctaccaagaatttctataggaagctagagtattgtttttcatcccttaacacagtgaacgtaattataaaagaagtaacaggatttatcatctattaaagaagtgaagtacacgtttcatacctcacctcttctgttgctggtggctggcagyaggcatggcattgttgcaagggtcctctttagtaacaggagtcacaaccgctcccaagtcttcctctgtacagaggcaacagaagactctataaagggaagttatcgagatgagtacatagaaacagcaccctttaacatcaggcagagtgagagaaagtagctgggacctatttaactccatgacctttctgctagatcacacactgtttgatgaaaattatacaggtatgaatatatatacacacacacacacacacacacacacacacacacacatatatacacacacacatatatatagatatacacacatatatatatatatctttttttttttttttggagagtctcactctgtctctcaggctggagtgtggtggcacaatctcagctcactgcagcctccacctcccgggttcaagcaattctcatgtctcagcctcccgagtagctgggattacaggcacataccaccacgcctggctaatttttgtatttttagtagagacgggaattcactatgttagccaggctggtctcaaactcctgacttcaagtgatccgcccgccttggccttccaaagtgctgggattacaggcatgagcctgtaattttattttttttttgagagggagtcttgctctttcacccaggctggagtgcagtgacttgatcttggctcactgcaacctacacctcccaagttcaagccattctcctgcctcagcctcccaagtaactgggattacaggtgcatgccaccacacccagctgattttgcatttttagtagagatggggtttcaccatgttggccaggctggtctcgaactcctgacttcaagtgatccacccaccttggcctcccaaagtgctgagattacaggcgtgagccaccgtttttattttgaggagtgtagctctgtcacccaggctggagtgcggtggtgtgatcatggctyactgcatccttgaactcctgggcttaagtgatcctcctgtctcagcctcccaagtagctaggactacaggtgcacaccaccacacccagctaattaaaacaaattttttttcttgtaaagatgggggtctcattttgctgccgaggctggttttgaactcttggcttccagcagttctgccatggcttcccaaagtgctggtattacaggcatgagccatgagccacgagccacygtgcctggccagaaccaaaattttcttattgtgtgtttattgttttttgctatatgatcatgggtatgatgactgagtgctgtgtaacctgaggttagttggggatgggcattagakaccttcttcatctggcagcctgccaagcagggcccattccatttctccttgcccctcccagcccctctccccacctcagccatatgcactgagggttgggatttgatagaaactgaagaactgattcagtttggaatcctagaagaaaaattatttcatttgtgtgtttttctagcagcaactcattaatataagtaggcttaatattattaaaattaaatgaaagtctttaaattctactaagtaactttagatcatatttatataaaataaatgggatcattttagagaatacggataggcaamaaaaaaaaccttaaaacattatgaataatcttaccacccaatattttgtctctctctgtcttcttaaaaaaaaaatagagacgaggtcttactgtgttgctcaggcttgtcttgaactcttggggtcaagcagtcctcctgcctcaacctcccagagtgctgggattacaggtgtgagcgaccagccaggccaattttgtctgtatgactattaaatattcactctgtatgtatttagcaagatgtgaccgtactgtacatcatatatttataatgccctctttttatttactttatcatcawaaatacttgtctatattattttagtaactgaagagtattttattaagtcataaactaccttgaccaacattctgggacacgtaggtgatttctagttttttaatattagaaatggtgaagcagtgagtgtctttgtggattcttctgatggcagtcattatgaaggcattgtgctgcttaatgcttgggctggactagactgcaatactagagtagacactacactaggccaggggttgacattagttctgtaaagggttaggtagtaaatttttcaggctttgtaggccaaactctgtcttttgctgctattcaactcygctgttgtagtgtgagagcagccatagatattacataaacaatgaggggagctgtgttccagtaaaactttatttacaaaaacaggcagtaggggtgtatgtgtgtatacagatttagtgcatgggctatagttcaccaaattctgttctagaggcatcatagacccacaggccaatcatgtcttagaggtttaatgaagagctgggatcrtattactttttcttgaggctgaccatatagagtagaatagaattattgtttattaattgacaagcttaagtttctgttacgtacatttaatatttcacggaaaaaccttgtattttgagagtcctgggatataaaaatggcaaaatgttgaaacctttccaagtgagaagttttaaatatattttgctgtatacacttttatattcaaacaaacggaacatgaacgttcagaccttggtctcaggtgtgttctgtctggagggagaggagatggagacccttgactaaagctttcacttcacattctggaatagaggggtgtcagactggggcttactaatgcgctattcatcatgcacaacacagttttgaattaagtgcatgtgtatttaggtattttcaagtcgtgtgcatctctttcatgtgtaagatcaacatgcgtttgcaaaaccatgagcagggcagagtagcatcccctttaaagccactcttgttctgagctcaggtgttatagatgaaaaacagctctaaatcccgtttgcacactgataccgtctgtggcttaggtaagtcttttagcctgaggtttttttaaccagtaatctgttaactggcagcaatccatgggaaaatgcacttaatttattgtgagtcacagattttgaaggtgaaagacaggatcccaggagaagactagtggtctaagtagaaagattaaacgaatattagtttcacaaaataatgcatctggaattttcaaatatcaaggaaagaaaactcaacacacccgttaatgcagttgtaggactcgagcatggaagagttatataacaaccacatcttcagtgcagttgcttggttgttttagaaggggattaagccctctttctctaagacagtgattctcaatagggggaagggggcatttttgcctcctgggacaaatttggcaatggctggagacatttttggttgtcacactggggtggggtgtgtgctattattgtgtacaggtagaggccaggtatgctgccaagsctcctgcattgcacagggccgtcctctacaacaaaggactctccagccccaaacgtcagtagtgctgaggttgaaaaaccccggttgaaggcattgatgtgaaaagggaccttagttaatctttataatggggtctaaatgagaaaatccctgatctcattrtaatgccatatttctccttccccaggaattgattcgtattctgaaaaagtaggttgagaattcagatttttacctcatccacttatacaacaggtttgatcaagaaaacagtttctacctgtttacatttgacataccctgctgccttacgttattgccaaatgttgttaataattgtttaaaaattgcccattaagatgtcaccataagcctggggcaatggctcacacctgtaatctcagcactttgggagcctgagccaggagtttgagaccagtckgggccacatggcgagactctgtctatataaaaaattttaaaagtagccaggcatggaggcatgtgcctgtggtcccagctactcaggaggccgaagcgggaggatcacttgagcccgggaggtcgaggatgcagtgagctttgtttgtgcaactgcactccagcctgggtgacagagtgagaccctgtctcaaaaaaaaacaaaaacaaaaaagatgtcatcatagtatctttagttttcgagcacataaagaatgtttctctatacaggctctgtctcagcagcattggtttagtcactgcagtggtcagaggtagtctggtgtaggagattcaggaagtagacccctcagcgttcataataacggtgtttagataaacttcaggctggttatttttcagctgctttattgaaagtgaatagagggtataaccatataatgaaatattatttagcaataaagaggagtgaagtgtactgattcatgctacgacacgtagcatgaacattttatgctgagtaaaaccagacacaatcatgaacattttatgctgagtaaaaccagacacaatcatgtgattccatttctatgaagtgtcctgaataggcaaatctmtagacccagaaagtagattactggttgccaggggtgagaggggagggaacagggagtggctttaatggatacraagattctttgtggggtaaagatgtcctggagttagatagtcgtgatggtttcctgcctttccttatgtattagaaacctctgaattgttcagattatggtgaattttgtggtatgtgagttatatctcaatttttaaatatgaaaaaaagatgaatgaatgaatggaagaaatgctccttgatctttagttccccagttattgccatcccatggctacctgctcatggggacacgcaaggtcttctggtggctcctgccagcgtgccagaggcacctggtcctgctccgacttcaccttgccctctggcggggcttaggagtggggagctcctggcctggctcactttgggctgtgttgactccggagcttgatctggattttaggtttacatttttgcatagcactttgtttttttaagtttccagaagctgcttgacctaaaacttgttatggasstctgctttctttttgcttcttcctgcttattcaggggttgattctgtagcctgggactaatttgaatgttrrcaccggttcttgcaggaattatctacacagtgaatttacatgcaggatggagaggagaagtttatcataacaggagccatggatgaaggaatagagggaggtcttggagaaggaagcagaggagcaagcaataacttaagtcagtcctggtgtggtggctcacacctgtaatcccagcactttgggaggccgaggcaggctcctgacgtcaggattttgagaccagcctggccaacatggcgaaacaccatctctactaaaaatacaaaaattagcctgggtgcgtgtaatcccagctacttgggaggccgaggcaggagaattgcttaaacctggaaggcggaggttgcagcgagctgagattgcaccactgcactccagcctgggtgacagagtgagaatccatttcaaaaataaaatgtaaaaactaatttcagtcagtagtcatttaatttaataattgactaaagagacaggagcagatgcaagagtggggatgggctggtattagactgtggaggtttaaaattttgggggaaccctgctctgtgtagagtagaacttascatgtgccagcacgtgctaagtgactgaagatgttacccactgaattctcaaaacagcattttgagtaggtggtgggtgctatgttttccagatgaggaaacttgaagttgggagaggtcaggtaacctctgtattcatatggtactcacatgtacaggtgctttagctgcaggacaattttagatttctaccttgactcccagtccctaaaggttcgatctctcttcaggccgagactttaaaagggaaacatttctagcggagtgaagactgatatcatgaattaagccaaaagacaaaggtccaagtctgagctgggaccatggggaactggaggccacagatgtccccgaataggtatctgtgtgacggcagtgaaaagagccatagtatttacctttgtatggaacagattagagtttgctggctgaaccaagagtccaccctggaagaaaataagaagtgtgacaaatcaaccgttgtattttattttatataggaagccgaaaactggaatattaatgctaaacatgggaggccctgaaactcttggagatgttcacgacttccttctgagactcttcttggaccragacctcatgacacttcctattcagaagtgagatatatataaacacctcrattataaccttggcactacattgacatgtgtctctcaattctgtagtttcaaaccagtaaatagttttaatgcgtatctggtaatggttaaacagcagcattgttttctgttggatatcagaaggatatgatatcagaaaattgcagggggagagagcaaataagttagtggggattctccttgagccctttgctccccagagccctggaaattgcagttgtcttgacatagcctaggtacctttaaagatttttaaagatatatttgtacttgtcacttaacggctgattaacactcagggaagcaatgattattattcatttgtactataaatatggattgttgmtgcccttcttttcctttcatccttctttcccttcttccttctctcctttttctttcaaaatagatttctattatgaaaaattagtacatgcatgggataaaaactacaaatagtataaaagtaattacagtaaaaggcaagtgtccctttcaccttgcactcccagttatccacctggaggaaagcgctgttacatccagaaatagtccgtgcatatccaagcatacacatacatacacacacacacgcgcacatacatacatacacacatgcacaccccccccccccacttcgttacacaaatgtgaaggtacttatgtactatatttgaaactttcctttttttttttttttttttttttacatacgtatacatgtgccatgttggtgtgctgcacccattaactcgtcatttacattaggtatatctcctaatgctatccctcccctctccccccactccacgataggccctggtgtgtgatgttccccttcctgtgtccaagtgttctcattgttcaattcccacctatgagtgagaacatgcggtgtttggttttttgtccttgtgatagtttgctgagaatggtggtttccagcttcatccatgtccctacaaaggacatgaactcatccctttttatggctgcattagtattccacattttcttaatccagtctatcattgatggacatttgggttggttccaagtctttgctgttgtgaatgtgtaaacttaacactgtatcttgtttcataacgttatatcgatatataggtctggctcattttttgattactatttagaactgcatcatatggctgtaacttaatttgtttaatccatgcttcatggtggacaattagtttgtttacagtgttgcagtgaacattcttgtgcatacatstttgctcctatatgcaagtgtatctataagattaatagactttattttttaaattaagagaaatgtctacttcatttgtcttatatcctagttctcgttaggtgtgggatcaaaatgtgttacgctagtasstagcgcacatccaggkttctctgcatgggtgttgtgtgtcctgaatcttcaggtgtgctgctggaacagcttgtggagcacagctgggtattcctcagagagggtatagctttagctccttattstacaacaagagagctggctattgtcaatgacctcaagcttctgttttaaaggcttaatcttgttaggctctctaaaattttgctttttttcttttttattgagtagaaaacatttctcaggytgctaagctggaataaaatccacttacctgtatgttaaatgatttagtaagctggcaccattcatcgccaaacgccgaacccccaagattcaagagcagtaccgcaggattggaggcggatcccccatcaagatatggacttccaagcagggagagggcatggtgaagctgctggatgaattgycccccaacacaggtatggtgtttcttcattaacatgtaactagattagttctttcraagtagttatgaaattcaaaagagtagtagatgctaaatgcttcatatgtactggcaactcaatttgtggtgtttctacataatacatggtcacttaatttaggtctccaggcgttatcccttgacctttagcctttgctatgacttcttacattacaagtaaaaaaaagctaaggatttgggacatgagtttcaaaaggaagttcgagatgtttgttaaattgctagagtataaggcataarcaacataccatgaaagaaagatgcatatatcattacactggaaagaaatctttgggaaatggattgaggctgctgctattattgccttttctttctggttggatagctgattagaatatttagagcagtattagctagctatcatggaagccacaggacagtaagcaactcgcagtgatgctttcagctctcagaatatcaccattgtaaggtattgaaggtccttgttggacgtggcaccaaaaagaggattgtgcacatctgagaacctctatccagaataatagtgtgcagaatgaaccactaaatgcatggatgaagtaaaaatgctgtattaaacacatcgmmgacacaattcattgcaggacaccctgtttttgtataatactaagatacaaaagcactaccggttaattttaagacaacatctattgtagactgaactgatatgagaaatgttaaaaccaaaaaaatgtacatcttaggacacatgaattacattcattgcaaatatatcttagagctttgggatcaggataggtgtgtgacactgggaaccctcagggagaacagctccactaggcaggaccaaaaggagcatttcactcttttctgacatcactgagcaagcatccactccagctgttctcagaatccactggttcccatggcacaaagtaacaaagggccctggccccttctcagatcacctcacttcgaaaattgttcaactgtgcttctgcatattcggcttgcttcctgcttaaagctgtggctcaagggcatttcttatgcagttcctccgtgcatgccacagtgcatctttaaaatgtcagccctccattcacacctacttactagagaacaaactccagtcattaacagtttatcatgatcagaggtttcttgtgggcctggtgtggtggctcacgcctgtaatcccagcactttgggaggccaaggcaggtggatcgcttgagcccaggagtttgagaccagcctgagcaacatggtgaaaccctgtctacacacacacacacacacacacacacacacacacacacacacacacaacaacaacaacaacaacagcaacaacaactagtcagacatggtggcacacgcctgtaggcccagctatttgtgaggctgaggtggaaggatcgcttgagccagggaggttgaagctgcagtgagccatgatcatgccattgcattccagcctgggaaacaaagtgagaccctgtctcaaaaaaaaaaaaaaggttttattatgaaccagatttgcaattgctatgctgtctctcgtgggaagaggaggcagaaaggttcccatttttcctgtttttatgttactgtagtacccgtcattataaagagccctagtgagcatgggggtggggcacaccccagcagtttgggaggctgaagcagaaggattgcttgagcccaggagttaaagccctggtagagttgtcagacttgaaaaagcaatacagacaggagggcatccttcccgccacctcctgtctcyggtgaggctgctggggtacctcttcatctccttctcattcctcttcccttctgatcctttctttcctatatagttgtaaagtttacttttgaactatgtctattgatttatttctattaagaaaaattctctttaggccagaaaatgtgatgattgcaaacagataaacatgtttcatgctgtcgttttttagggaagtrgttgttgcttggtagccagtgtggacgttttgagacttgcactggtttcmtagaattgaccagttaactaagacagtgagttatatcaggaaatggtttcatgtagttacattgcattgcagaaatgtagagaatagatacagaaatagatgagaagtgtaatcatgtgatgraaagtctaaatctcaaatatgctttgcaaattatagtttaactgtttagcttgtaactgcttttagtgaagctataagtaagggmtgctcatgaaataattctgttctttcccggatgcagcgtggataggmgtatgggttcctttctctgatggtgttggcttccctgctctggttcaggcagtttacttacttaactaagcctcagctagaaaatggggatggtaacagaactcaactcttagatccttgtgaaaattaaatgvgataatcctgagaggcattaacatgacaaaagttcaatatacgtgagctttttaattcatcattggcacagggttcatgatctgatacaaagtaagcatttgctacatatttcaaacttttctttcaaaaaatcatgtacaaatcggacatttgaactattgtacatgctaaattaatgaagtttttgctgtttaaaaatctagtttctctgtcttttagtagttcttgctgaagactgttcattgaacagctgctctgagggtacgtaagctaggccagtgagtgatgtgttttgggctcactctggccagatctgcccacgagatgtggcactggttaacatcggagaggctccttcycatccctgcatccttccagggacagccagctgcattgtgaaacccaycctgatggacacgggtccttcatgaacactgtttgttggttcctcaggatatgcccagttggagagtaccttgctgctttttctccaatatgtgtttacaggttgtctttagaaagcatttagaaaacattatcagttctttccagggtattttactctgtctcactttaaaatgtggccacctgccsttgtctttatctgcaagggcagcctttctacctcttagtatgcatgatttgaggaactcccagaccctaggcatttagaccgtaaccttcagatactggacaggtgaaaagaaaatgcgagaagcyggttgacctgcagcactggggatgtcattctgatcatcgtattgtttcaaagtagaatygaaagcagtttctacttgcttgctaaacctcagctcaaatcaccaagagttgcttcaagggatttgatggtattgtaatagttggcggtttttagcacaaagcrcataatctttgaacaatcagtcatttggagtttgcttatgggatcatgtcctgtgatatgttttaactgctagtgaccattttatgcaaggcagcacgaaattggtggccggaaaatggacagagcgctaaaaatgatctagttttacttccttcttcttttttgcagtacccaaccagagaatactgagtccgaccagcctttctgtgcacacatgtgcttctctsscctaatggcattctgcttctcccttgggaatgtgttcccctggctcttagctctctgggtcaagttaggaggaatgtcgtccttgtatatatctaggtataaatgagataaactcccgtcttttccttcactttaacctaaatgtttcttgtggcaatttatgtcacattcatagttgcagcccctgctaatgctttggacagtaacattatcatggtcttattatttattacctgacactcatgtagtgattctcactatcatccctgagtgtaagttatgtgtaatcctatgaaaaggcaaggaaacaagactaagtaagtttaggaaacttgtagttttatgactttatacatgcttaaacaattatgtggtgtggatgtttttgaactacaagaaaggaagatgcgggaggataaagaagatagaagagggtattcgtgaaaggacagggaagggacagggaaagaacatgaggatatacagcaggcatgggccatttaggtaccaagaacaatggctttcaatcccatgtggcacctccaaaktaagcactgttttatatgtgtaatgaggagaatcattttaatcatttgttatcaatgaatttttttacgtatgcaagagctcttgcatttttttatataaacgaggtggcctgggggttcggggaactgggtaataggagcagggtgaggtggggrgcctgggaggagtgagaagcatgggttgggagacccaggctctaattccagctcraccacctgcaaggtatgactttgggtagttcagttaaccttcagagtctctgtttccttatctggaaaatcaggtttaaatgattaaaaaaataatgcccagtggctaccatagtatctggtatgcaagaggaagttatattttagaataagtgttgttttttcctcctttctcttgaggctctcttatgccagccaagaacagagaattaggaagagaagtttgagttttaaaaaccactgtgcagtaaaggtgtgtgggtggggtactgatcctagaaagtcatcattaaaagttcacataccagctgaagagtggataagatccaaggaatatgctaaacttgccttcaccgtcagtgccataggaaattacatgaactgttctttgttctgggcattgcattatgtttgttgactctgaggaatctatataaggattaacactttctcctttccacatgtgcttcctaatagcccctcacaaatactatattggatttcggtacgtccatcctttaacagaagaagcaattgaagagatggagagagatggcckagaaagggctaytgctttcacacagtatccacagtacagctgctccaccacaggtaagggcatctctctgacagtggaaaggtagatasggtgctggcaaaaataaccaaggagtctaagtactgaagggaaggatgaattatttgcaatttgaatggcaaattcaacctgtcttctttaaacacgagagttcaggtcagtccatttgaaatctcatggtccatctgtcccttgaattattggccacttggctggtaattacaaatggtgtgggtggtaggcagtggctgtcagtgttcagtgctttaatgccattgtgtaatggwwcagtaatgaaccttaaggctctttctrggtttgtgtgataaacctttttatggctacmcagattttcttactgatgtagcaaagattgtaactgttctcattttgaaagcaaagatgcccatacaacatgggaaatactgatattttgttgctgttgtcgttgttttgcttcagttatgagttggttgctggtaaaactaaagcccagtttggggttccctttgcagaattttctgttttcttgattttggaaaatgttactgcttgtcgttttctgtatatttaactggagctggggaataattggtgtttggcaatctctgtatcattcattgtaggcaaagctgctactgtcacccacagayacatttgtttgcattccattgcaaggattgaagtcagcacattcttagtcccaaattgcttttggatattaatgtttatcacttctataaccataaggagaatcaaaaggctattggaaaaagtcaaagcttgttatgtgccttaaatatttgttcagagaacccattaaaatgcctgagttctaagataccctcaagagtttgaattatcatttctttctttttttttttttttctgagatggtatctygctctgtcattgcaacctccatctcccgggttcaagtgattctcctgcctcagcctcctgagtagctgggattgcaggcatgtgccaccacgctcggctaatttgtgtatttttggtagagatggggtttcaccatgttggccaggctggtctcaaaatcctggccgcaaatgatccacccacctcagcctcctaaagcactgggattacaggcgtgagccaccgcactcagcctgaattattatttttcttttggaaatgcaccactacaacttcaaaatgtctggtcatatgttactggagaaggagtcagattttatgaatttttaagctctacttttgccttgttttaagaaatatacctcaatatgtaaatggctgctctcacaattagataaattaagaagattgttatttacatgacagaagattgactatggtttttatttcagggctggctctaccaagtgacagtgtatgcaraacttcactgtatkcttagtttttcttgaatgtatctcatgtaaggacaggtacatccgtctatccaagttgtggaaggctttgcgaagtacgttaattcttcgaggccactcaaatgctgtttatctgttgtatcttttagactggcactattgtggcagagccagtgtgtgtctttatcacaaacacatttctcagtcacattttctccttaatgacttctttgggttgtttgttgaatgtttccacacaacctgaaagagctaatgtagcttccagatgcccccttgcacatatgaaaatgatatccacctgtgaagtgcggtctgtaacgtgaatatggtcgtgacaactttttgatttctggagagattgtttctgaaccttgaatggagtccctttgaattcttctgattcactgtattctactcaccaaaattgaacctgtttatctttttggaagttgagtcttagtctgagagtatatgygatttaagatatgctctctcctgactamcattttcaactggaaacctaactaatagttcttatagttagagagcccagtggatcggtgatggaaagcrtggaaatgttttgggacttgccctatgttaagactgaggaagaggctgtgtgttagacttggtttcataggattcaggtgtgaccccaatgctaactcccctagacaggaaaaagttacrttgggttgacaccatctgccttcctttaggctttgagttttcatgatttccatctctctcttagaaatataagtttattagattacttataaggatttggtgtccatttagcttattctagggaatgagaactcacagaaacttcaataattttctctccttatcatgaggccattaataacaatagttatgctgggcgcggtggctcacccctgtaatcccagcactttgggaggcccaggcgggcagatcacctgaggttgggagtttgagaccagcctgaccaacatggagaaacccygtctctactaaaagtaaaaaattagccaggcgtagtggcatatacctgtaatcccagctacttgggaggctgaggcaggagaatcacttgaacccaagagttggaggttgcggtaagctgagatcgcgccactgcactccagcctgggcaacaagagcaaaactccatctcacaaacaaacaatagttacaaagcttttatcataacatssaaaatatttatttcataatattaagtaaagatgctcaaaatactcagcatgcagaattgcatatgtattaaaaattacaactttgtaaaacaaaacatctataaagaaaaaaagaaccatattagagtaaagcaatgactgtaattagcatgctgggataatggtcagtttcttttttcctttcttccccatcgcatacatttcctataatgggattgataacctttgtaactggaaaaaaaataacatactttttttttttttttttttttttgtgacggagtttcgctcttgttgcccaggctggagtgcaatggcacgatctcagctcaccataacctccacctcctgggttcaagygattctcctacctcagcctcctgagtagctgggattacaggtgcaccaccatgcctggctaattttgtattttttagtasasatagggtttctccacgttggtcaggctggtgtcaaactcccaacctcaggtgatccaccagccttggcctcccaaagtgctgggattacaggcgtgagccaccgtgcctggccgacatactttgaattgtaagacttggtccctgtaaatatgactgcttatatttcataactttacrgccatcttgtttttcactagaactgacatcaataatctttgaaagtccattgaaattgattgctttttagtgatcttcatttgcagggtagttaaatctatatgcattttagagtattgaaatgattgtaattagactgatwsagtaaagaagcagttacctgctttgaacttatatatactacctttacgagtctgttttttattttcaccataatcaaaatgcatctactaagtggtctctgtatatttcaggcagcagcttaaatgccatttacagatactataatcaagtgggacggaagcccacgatgaagtggagcactattgacaggtggcccacacatcacctcctcatccaggtaagccagtgcttgccagctgcctgtcaccccagcatctagtgtgaatcagcttctcatcccttctgggtttgtggatgtccttctgagccttactgttcccttgcttaaattgtgtgtttgggattaaataaaagtattatattcttgatttattatgaaaagagaaaatacatttaaagattaaaatgactagactcttctttcttcrgattaatgctattagtcccaaaccataacaaaacgatattttgagttttgtgtttcctatgaccagaagagcattaaagattgtgcatggtgtttcagctaacttacatttgtaggttgagtgactgaccaacgaattaaattttctactttctaaatcctttaaaatgtcaaacgattttaataatgtaaaagtaatatatctacatgttctgagacatgaaaataaattgaacatttcgattgagaaagtttcacatattaaaagaaatttcatatttcttctatgcaatttatatttataatatttttattaacagatgcttgattttaggagaataagttaaaattacagttctaaagttaatagctttgaactgatgttaccatattcttttctgcctgtcaaatatgggagggcaattggtaaaatattgccctaaattatgcaaatataattttgttctgctagtagaagtttctgcttttgagttattttaggtaggggaaatattaagtcatttagatttgatccattttatttttcactccttgaacgttttctgactcccggcaaaaaaccctactaacaacttctttagaagcctggtgtcatttaaatctgtgaccactagatggtgctagacatcattgaaatcaggccagctctccccagagcagtgttccttaggcatgtaaagggttaacacttgggttgaaatccaattttaagtaaaaactgaaaagaaggagcttacccttaggggtgggtgtagttgtggtctctgtgtgcaccattgayggctgtgttgctgggtycagccagtactgcctgaagcaccagcagcctgggttttgctttgggaggcctgcgattggaaaggaggggggtttcaggtcagcattgacatgtggtagcagggaatggagggatctgcacagcatctgcctgccctgatcaagtgagtaattagatttgcattaaaattcagccctttgaaaaggagggaagcaaaacgatggaaaggtctcttaactgaggaagtctctgttcataaaatgaaagggaattttagaggcatttatctgccctcctagatggtgtgattgaaggctctgagaggctcggtgcctctttcattctgcagagaggttgggagtagaaaataccgcagatgggttttaggtgatttaaatagcacttctccttgcccatggcgcctcagttttgaagatggcttagaggctgttgcaagccatatgatttgtgtttttacttgcagctttgcaagccgagaaaagaaaaacactaggctttggatacgatatgacatttttggaaaccagaaaacaaaaccctaaactaaaatgaaaaatatagtttaaaactacaaattctgttttgaatccacatttctgcttggcataggtagtaattgctccaaatagccattttattactgttttctctaatattggtatttatttagctgttgggttaattggagcaaatttatcttctaggctcctgtataaaccttgcagtgggcctccttatctaggctgaggtccaaaaataatcctttctgagcatctttagtttccaaacactgcaaagaccagaaaatattggtttcgtttgtatctaatcctgtcacatttgctgagaatttacattataaattctgaaaagggaacttaactttaggtaccattttatgccttaggatatttatttaccaaattttgagagttctggaaagattaataatatctcaatatttattagggaatagtttgcttatcccatagttttcactgaccactgatgtatcaaaataccaacaagtgcagatttacatgtttctgataaattgtcctttataatttttaaaaagttacaaaggaccatttagaaataattttagatatgcagaaaagttacaagattaagaatagtataaggaactctcatctactcttttacctatattactgtattattattattttgaggcagggtttcactctgttgcccaggctggagttgagtggaacgatcatagctcactgcaaccttaaccttctgggcccaggtgatcctcccgcctcagcctgctgagtagctgggaccacaggcaggtgccatcacaccctgctaatttttaaaaatgttgtggagattaggtctttccatgttgctcaggctagtcttgaacttctgggctccagcagtcrtccaaccttggcctcccaaagtgctgggattactggcgtgagccactgygtctggcctattgatgtgttattaacatgtatatcccacttgctttatcatttacacgccccgtgtgtgtgtatgtatgtgtgtgtgtctgtgtttgtataaacatgatttctttttctgacccatttgagaataagttatgcatatatcaccatcctctacacctaaacacttaagtgtgttttctaaaatcaggaatattctcttacataaccacaatacaacattcaacttcagtaaatttaacgtcaatatttaaacttttacttaatttacattcatattctgattttgtcagttgacccatttgtgtcttttgtagcatttttttataagctaaatgacagagaatgattaaagtataagacgaaagaaagccccttcagttctggtatttcagcacctatcgacgtgaatcaaagtgccggctagacgaagggagctccctggtctggtggacagagatttggagggggaggcaggaaccatgttctttcycaagttccacagatgtgactgaatgggcccctaagtttaccacatctttcccsgctctgtgaatttaatgggtgtgtatcacctgtcatctgttgttgtgaaggtttttataaaaattgacttgatggggatatgaggctcagaagaaactgttataaaaatagagcagtattttcttatttccctactattcctgactaatgtatttaatgtggtatgcctgaaagccaaactaaggaggctttagaaagaccctgtaagctgttttcctgctaacggagcaaatgagaggtcttaaaacaactccttcccatctgtgtttcctttccatctggaagtgtgccctgtccttcccgaggggaagcagatccacagcgcgcatttgcagtgagccattagcgagctttagaagtttcccagcaaattccctaggccccygaaactgttatgatccattttgatgataaaccaatgctgagaggctggactgtttgcaattttttaaaaaagagagttcggatttttgagggttgctstgagatttttggtgtaggcttcattttaaaattattttctttttccttccatttctttcttcccttcctctttatcctcctttcttgttactcactcagtgctttgcagatcatattctaaaggaactggaccattttccacttgagaagagaagcgaggtggtcattctgttttctgctcactyactgccsatrtctgtaagtaagaacattttctgggatgacctagtgatagaggattgggtgatttcattttctaaatgtgtaaaatgggtccagcttccattatgtcctaagcccagtgcaagaatgaattctcaratctcagacttggtgctaactagcctcacttcttaaaacctcgtaacaatgaattcaaattataatgttgtaaatagatcttttcctcttttctttttttttgaaacagagtcttgctgtgtcacccaggctggagtgcaatggtgcagtctcggctcactgcaacctccacctcatgggctcaagcagttctcttgcctcagcctcccaagtagctgggattacaggcacccaccaccatgcctggctaattttttgtatttttagtagagactgggtttcaccatgttggccaggctggtctcaaactcctgaccttaggtgatccacccgcccaggcctcccaaagtactgggatttcaggtgtgagccaccacacccagctcctcttttctttaaaatgataacttgwwgatatatataagactttctaataagtgggacagttaagagaaggctgcttttgcctgccctgtcrgcagagctcagcttgatgtttctgtgtgttgagtgggggggtctccattcagacaagcgctctcaatcccatgcttttgtcctcaggacttgttaggcagccattgcagtttgctaagactcaggaccacatttttgcaagtgaatatagaggatcaagttgggatctggctgttccttagttcatcatattacactaggctattcatccagatgctacaatctgtgccatagctgttgtattgttggaaacaasaatgatcaagctagtgtactgtatgatatatagaagcgcttggaataagcaaccagtttcatctgctcagaactagcattctatcctaaaaccagtgctttccaacccagagaggtggataattacatcttcacaggggtgattgaggttttaacaatgtcgggaatggagtcagcctcagtgtctgggccactcttgtaactgggccttaccgccccctggtggctactagggccaagcctctgcagattttccactcatcgtctctgctgggcctcgtgtggacggtaggaggctctgaagataaattcctctcttctggaagcctgcctattttaatgggtttgcttttccttttctggtgtcatgcaatccttttcacatgtccatcctcctgccacttcatcctatgtaaggtgagacctcgcctgagatgccagaagggaagcccttgaaccagcctggagcaaacacatttgctttgctttttttttgagacgggtcttgctctgttgcccaggctggagtgcagtgatgcgatcacagctcaccgtagcctccacctcctgggttcaagcgattctcctgccacagcctcttgagtacctgggaccacaggcacacgcaaccacgcctggctaattttttgtatttttagtagagacggggtttccccatgttgcccaggttggtctcaacctcaagtgagccactcaccttggcctcccaaagtgctgggatcacaggcatgagccaccgtgcctggctgaaacccatttttgtatgtggggattccggtgctgccttgcctcctctgaccgtggcctcacttccttattctttcacctggggacggagcacgctgcttccaggtttggctgctggagcgtccttgtgggaccgggaaatgccacagtgtcataaggataagtcaggtatggggaggacattggagagttgagaaagaacactgatctagcacactcttctcttcccctgcgttcccttctgacaactttttaaactttattttgaagaaatttttagacttacagaaaactgattaaaagagtacagagttaaaagagtacatataccctctactcagcctctcccagtgttaacatcttacacaaccactgtacagttaccaacgctgagaaaccagcgctggtacaatactattaactgcactccaggcttcatgtggatgccacttgtgtttccaaaaatgtcctttttctctcccaggacccagtccagggtcccacactgtgtgtggctgtggggtttcctcagcatcctccaatctgtgacagtcctgatacttggcttgtctttcatcagcttgactttttttttttttttttttttttgrgacagggtctcactctgtcactcaggctggtgtgctgtggtgcagtcacgactcactgcagcctcgacctaccagacttgggtgagcctctcacctcagcctcccgagtgactgggactacaggtgcacaccaccacacccagctaatatttgtattttttgaagagacagggtttcaccatgttgcccagtctggtctcgacctcctgggcccaggtgatccacccacctcagcctcccaaagcgctgagattgtaggtgtgaggcgccacrccccaccacacgttgatatttctgaggagtcatttttaggatgtcagttgttttctggtgcgtccctccatctgggttcgtctgaagttttctcatgattaggttgcggtgatgcatcattggcaagaacccacaggggtgcggggccctgctctgtgcctcacacccgggggtctgtgatgccagcgtgcttttctactggtgatgtgatccctggccacttgtttaagggtgtgtctgctgtgttgatccatcctaaaattactatttttctctttgtaattaaaaatatcttggaggagatactttaagacaatacagagattttgttatttcctagcatccatgggtagatcgtgtttgtagtaattaccacattgctgtcctaatggcaactttgtgtttccttcattccatctacatttatgcctcccatggcttttaaacagaccagtagtaataatcataaaataatttgtcagtatatatatataattttttgttttcgagatggagtcttgctctgtcacccaggctggagtgcactggtgcaatctcggctcactgcagsttccgcctcctgagttcaagtgattcttctgcctcagcctcctgagtagctggaattataggtgtgcgccaccacaccaggctcatttttgtatttttagtacagacagggtttcaccatgttggtgaggctggtctcgaactcctgacctcaggcgatcagcccacctcagcctcccaaagtgctgggattacaggcgtgagccactgcgccccatctatcagtatatttcatttcaccaatatttattgagcacctgctatattccaggcactgtttccagccatatcataggatatgggaatgaagaaaacagagaaaaatctttgtttgcagagagtagggakaaaagataataaacataatacatatgaaaatggtatggtagattagcaggcaatatatgttatagaagaaaataaagccaggtgagggctagggagtcagtacacagtaaatatttaaagcattaaaatttgcattgaaaattttcaaaggtattaacaagggatcatgtatgaaacatttgctgtgcacaaagtgtttgcctgttgtccattgttgcaggaagagtggggagagaggaagtggaaggtgcaggtcacactcttggaggtgcctgtaacctgcagtgatgtgctgctgctttcctcctctaattccaccagggtttaccataaatccagcagttctgtacattgtccatgcagcactgtttcagttcctgttgtgaaatcaactacacacatgaccaccagggtagaagttcccatcctgcccagcttttctgtgtcttcttcatctattggatgagggagagagaaccatcctctttagttagatcttgtgagtcccccatgaataacgtggaacatggaattctccaccctcttagggaccttagagatgattgactgcggtgtttttctttggctgatgaagaagtggaactaaggaagtttggtgattgaactcagaccatatcatcattggtgcaggagacagaaagggagggctttgttccagggctcacactgtgtcagcacatagtcagaggctctcggggccttcccagtgttaatggctgaacacccattgtgtctctgctgcaggtggtcaacagaggcgacccatatcctcaggaggtaagcgccaytgtccaaaaagtcawggaaaggctggagtactgcaacccctaccgactggtgtgrcaatccaaggtaagtggcttccacactggcgggcggccagctcttattggtaaaatttattttatgagttataaaatggttagatttggctcttacacatggwcaggctcttccataacctgattgctsaccatgggcagaaagaactctgcaagygagtaagatasaaggggaaatcaagtgactcgtggagctccattggtttaatattttacctttagctgcaatgacagaaactgttatttatttatattgaggcaacttctaggattcaagtttccatgtgaaaatatcaaaatccattcaagcaggtgtaaagagtggctcttgcccgcagtgggcagtgcgtgtgcccaggggggcaaacaggggtactacagaccgtcaggaggcatagtccacttacgcattcgtctatctttcgcataggttggtccdatgccctggttgggtcctcaaacagacgaatctatcaaagggctttgtgagagggggaggaagaatatcctcttggttcygatagcatttaccagtgaccatattgaaacgctgtatgagctggacatcgagtactctcaagttttagccaaggaggtaaatgcacccatctgcctttttcccatcatgacttgttttaaaaggaaattttttctgcaactaactaatgtatcattcagaaatattgtttactgtatttgtttgcatgtacggtgtcctcattctcctgaataatacttcatctgagtaataatctcaacacattgagttaattccatgcagtgggaggggaaacctgtgctttccttaaaccaggtgccccagggatcactgtggctgacatcattttgtttagtttgagttactgggctactcgaaagtaataacaactatatttctttaagaaaaaagaaatgtacttctcactaattccaaaggaaaacattttattgttttataatttcttttctttgcctaatcatgacctttactcagggctattattacatggctycttgttgagtgtcaaggcatataggagtcattgtcatttaaaagaagagcgtgaaatgaacatggaagcaatgtgtgrtgtgatttccttgacctcttttatgcactcacttaattagctgtttgctgttatgttgtgatcaatctgattattgaaataacaaataccatctttggtgtcttgtaatatgagatagatgtgaattgtcattcagggaggagaaaaactattgttcayctatgtcctggcttttgagagccagcctaaaacctattccaatatatagctttatttttatgggaagtgtggaagcgttgggacccaagaaaccctttcctccctctctgccagagtttctggccctggtcaccccaagtatgatagatggaggaccatcctgcaggagacttcaccctctctgggactgggcagcaggtgtagggcagggtagagagtgggtgggggcagaacttgagccaacacctgatccccgtggaatttgaatttccatgctggacatcaatcagacatgggtgaagttagggagcacctaagtttcttgtcagtggttctgacacaggatttgcaggcaagttgtaattggctaagaaatggttgcagcattgtctatggattttgtttaaagatgccttctgtatctcactatgagcttggctaattgtgaacttgctaaaacttcagtgaaaatatagtttataccaatatgtttggaaatsaatttttttattttaaatttattatgattttataaatttgcttagagatgaaatctggctctgtcaaccaggctggggtgcagtggcacaatcatagctccctttagcctcaaaatcccaggctcaggtgatcctctcctcagctacctgagtagctgggactacaggtgcacatggaatttcagtgttggtatatatttttctagtcagtgtatcgctgactctcccatcaacattgttggagaatgccctttaccaacgctggttattctgttgtaactgacttttatatgaagtttgagaatacagcctcttcagttgagatccatgtgtttgctgaatctcaacgtttttcccatgccagtctcctgatgttaatgctaatctaaaagatcaagtagctgaggccaggtgtggtggttcacacctgtaatctcagcactttgggaatccgaggcaggtggatcacctgaggtcaggagtttgagtccagcctggccaacatggtgaaaccccatctctactaaaatacaaaacttagctaagcgtggtggtacgtgcctgtaatcccagctacttgggagcctgasgcaggaaaatcacttgaatctgggaggtggaggttgcaatgagttgagatcgcactactgcactccagcctgggcaacagactgagactgcctctcaaaaaataaataaataaataaataaaataaaataaataaaaaataaaagatcaagtaattgaaaagctatcaaaagaaaagggaaagagaagaatcctaactacctgagtaaatcataattagaccattttcagttattaggcagtggatatttttggagccgggagcagggatggtacagaaacaatcctcccattgttttcctttagatttttctccataagaatatatttcaggccagacttggtggctcacacctgtaatcccagcactttgggaggctgaggcgggtggatcgtttgaggtcaggagttcragaccagcctggccaacatggtgaaaccttgccactaccaaaaatacaaaaattagctgggcatggtggtgcatgcctgtaatctcagctacttgagaggctgaggcaggatgatcccttgaacccgggacgcagaggttgcagtgagccgagattgcgccactgcactccagcctgggtgacagagcaagactccatctcaaaaaaaaaaaaaagaaaaaagaatatattttaaamcccaactctgaattggttccagtgtaggtccaatacatattttatagtcgataagttaatttacctcattttggcacttgggatcaaaacaagtatgaaactatatttacagtaacattctacttaggaagagtctgtaaaattatgcactagcaaaagagaataaaaaaagaatggtaaacagatttaaattgcttgagaatttcatcaagtgtaaccacaaaaaggatttgcaaacaaaccacctttagraaggtaatgggraaggggaaggacataagaattgaggaataatttatgataacagaatcaacatacagccctgccccatgagtatttttcattaatgagcagtctgcgaacagttgaagtcagactttgaattgtgtgtgtgtatctgtgtgtatttatttttttgtagcagtttctttgaaaaaaaaaggaaaataaaatatatctgtgtttttcctcccttttctcatttgattcagtgtggagktgaaaacatcagaagagctgagtctcttaatggaaatccattgttctctaaggtatctacagtgttacaatcgttttagtagaacataccagagagtaatcctctgagaaactcttgcagaatattggtttttctcacatattagaacatttggagttccaattaattacaaaaataaaatmgaattccttatctgctcagtcttttttccttcagatagccccaattttctgatttctaccyacctataactatgtctgatttaaaacctgctttccagagaaaaggcctagtgggtagggtaagaggttttcatctcctgaaatctctgttttaactttctgtaagctgaggattctcaggaaaggaagatgctgtagaatttggttcaaagggctcaccactcggatgaaaagaaaccccaagccagagcgctgacctgggcagctggaggaggggrcatggcagacgagcagaccctgtscttctcatssgtctttgcctcttgtctatcttccaggccctggccgacttggtgcmttcacacatccagtcaaacgagctgtgttccaagcagctgaccctgagctgtccgctctvtgtcaatcctgtctgcagggagactaaatcctycttcaccagccagcagctgtgacccccgccggtggaccccgtggcgttaggcaaatgcccaacctccagatacctccgatgtggagagggtgttatttagagatcaaggaaggaagtcatccttccttgatatatatayagcctttgggtacaaattgtgtggtttcttgaggattggactcttgatggatttctatttttatataactatacagtaagcatttgtattttctctctctaggtataagttactagtttggaatgtccatyaggacctttaataaatgagttaaaaatttgtcttatgagacacacctatttaagyacagattttggctttattgcccaaaaccctycygaaagggtacggagagtcccctctgtgggctggcagtgtgaatgagatctgtttagtctcgtgcatatagttgctgttttttaaawgaacacagttgagtatttgaagtgaatttgaaaaagaaatgttacttaatctttccctragcccatgggttacagaatgctagggaggcaatttggttacctgcaatggctgcttttgccagcgaggccaccattcattggtcatcttggtatttgtgtgtgaatctcactttcctcaatgtaaaaaggaatcaagtatggatttcagaggtgctcttagattccccatacacccaagggtaataaacgtgtacaagtacagtgttcatgatacgtgccttggtgggagtccgtggtgccacagggaaggggctcccactgcttctggtctccagggacagtgctgctggaaaggctagtgatgagcttcaccctggagctcctcccgggaccttgcaagcctctccatccagcatcttctctatcttagttgaatgccttctttctgaacatttgttttaagaattatyttataaagtcaacaatactttgcttgaattctttcttaatttacgattttttattataaaaawgtatagtgatacaatgggacatgtgaagaatacagaaaagtaaccactttaatgcaataactgttatcataatattgtatttcgtggtagtcctttcctgtagatatttttaatgccatttaatgccattgtcaccttggatttatgagtgaaaagtgtttctaaaaatatagaaataatgtcagatcagagtctgatcttctatgtttgtatttaaatggattaaaagatccccggtggttccatgaagaatttgtaaagatcactttctctttcctccaagccctgaaactttgttcttcaaaagagcgtttcttttttttttttttttttwaagccagtttataaagtggaagtattaggagattcataaatcttctatattgagaattggctatgttaataaatattacaacatcattaaggttttagctaagtttgattcatgctgtctgttaaatcaaaactgatctaaatcagaattattaaatgtgaggagcttttttaatacaggaaaagaaacatgtcatccacttgagttaatagttttcctacgttgatgacagccctcatgagtagcatccacatttttaaaatttcaaattggtttttctactagtagattgtgtttctagagaaagatacaaggcataggtgattgtttaggattttcctctagcctttgccattacctttttggggatgaggttcacagtagactttgagtgaccgtcccaccgtgaagtgaattctctgagctggtggtgtggtgctggaaggaaggttatttttggagccactctctccccttaaggatatttcccaagggcctgcttcaattctttgatgactttagaggtgaaaaaatatttttatggagatgatgcagaaaactccaattcaggagcccttgcgagtatatctgaagcacttatttgctaaggaaacctgaattgatagcagtactgtgctgtctggaataatgtccttgatactgagttgggaccagactggcttttatagtgacaggcaaagaggaatttattgagatcactgctcatggcatttgttgctgtaagaagtgttgcctttgattgttactaaccacggatgggtaacggtcatacattaggctagtgtttggtaggacaaaatctttttagagctttgagaattgtcatcctgttggtcaactttgaaatacaaatgtttgccctggtaattagcaatgaactgctggcagtttcttcagctgtgtatatacggatctggcttttaattgatgaatcaacttctacagaaacttttgcagggacagtgttgatgaggcagtttagcttgccagggtgatgataaagcccaggtccctgcatgtatagtgctcttctaaagaatatgcattcttgaactacttaactttttaaaaatcacaataaatttttgcactcaaaatttgcttcgtatcaggagaaatgaactcattgttttgttttgtttttttttttttttaagatggagtcttgctatgtcacccaggctggagggcagtggtgcgatctcggctcactgctacctccacctcctgggctcaagtgatcctcccacctcagcctccaagtagctgggactacaggagtgcttcaccacgctgggctacttttttatattttttgtagagatggggttttgccatgttgtccaggctggtcttgaactcctgggctcaagggattctcctgcctcagtctcccaaagtgctgggattacaaggatgagcctctgcacctggccctgaactcattattaaaagccctttaaatgtgaggctgggtgccgtgccttacatgtgtaattccaatactttggaaggccgaggttggaggattgcttgatcccaagagttcaagaccagcctgggcaacatagggagaccctgactctacaaaaaataaagtaaaaattaactgggtgtagtgtcacatgcctgtagttccagctacttaggaggctgaggtggtaggattgcttgagcccagcagtttgaggttgcagtgaggtgtgattgcaccactgcactccagcctgggtgacagaggaagaccctgtcccaaaaccaaaaaaaagaaaagaaatacagagactgggtcatttacaaaggaaagaggtttaattgactcggttcggctttctgaggaagccttaggaaattgacaatcatggcagaaggggaagcagatgtcttacatggcagtgagtgagagcaagcaaaggggaagagcccccttataaaaccatcagatctcgtgagaactggctgtcacaagaacagcatgggggaactgtctccatgttccaatctccttccaccaggtccctccctcaacacgtggggattatggggattacaatttgaaatgagatttgggtggggaacagagccaaatcatatcattccaccctggcccctcccaaatcacatgtcctttttacatttcaaaaccaatcatgccttcacaacagtcctccagagtcttaactcattccagcattaacccaaaagtccaagttcaaagtctcatccaagacaaggcaagtcccttctgcctgtgagcctgtaacattaaaagcaagttagtgacttccaagatacaatgggagtacagacattggtaaatgttcccattccaaatgggagaaattggccaaaacacaggggctacaggccccatgcaccactgcactccactgtgcaagtctgaaacccggcagggcactccttaaattttttttttttttttttgagatggagtctcgctctgttgcccaagctggagtacagtggcacgatctcggctcactgcaacctccgcctcttgggttcaaaggatcatcctgcctcagcctccggagtagctgggctactcaggcgtgtgccaccatgcccggctaatttttgtatttttagtagagatggggcctgaccatgttggtcaggctggtctctaattcctgacctcgtgatccacccgcctcagcctctgaaagtgttgggattacaggcgtgagccaccatccccggcctactcaataaatcttaaagttccggaataatctcctttgactccatgtctcacctccaggtcacgctgatgcaagaggtgggctaatctttctagtaaattccatatttaattcaagaaaccataacttaaggcatgtaaaagagatcctttgctcaatgtgatgccattgtgcttatccaaagtatattattattacccacaaagggtgagagattaggctgcagccataccccaagtggagtgagcagcaagacctgccccctgctcagagtgtagatgactgggggcacctgcattcctaggggctctgccgtatgagctcctgtcgatgcggcaaaggaccaccttgcccaacgacagcgggaaggcagaatttaaagctggcagctgtaagcgaacgtctatgtgtgcgcacgggggcacgtgaaggcacaggtgcatcagccaagaacctccaattcacctcttaaccttctcacctcacctgaaaccccttctgccagaatcctgaaggtggcccaggaacatggctcctaacgttaggtggaaatgggaaattcattgagatgtcacaagctggaataagaaaattctgagctcacccggaaactaatgccctaaattaagattattcagcttctcaatttttaatagcaaaatggagacctgagtgtggataacttttagtatctgtgggggatcctggaaccaattccctgccaatatagaaggacaactgtctacagtacttgaagtattattaactacattcgccatgctgtatgttagatccccagaacatatttatcctgcatatctaaaattttgatcattttacaaactttctattttttttgtcaattttctccagctagacacttgtgcaatacggctattatctgatctttgccttaaatgttgtgcttcttttccatatgcacgtattttgcaaaatataaagtgtgtagagctatatagcactcagccaagtggtgggtacctgcaggtgcttcagagaagtaaattgatgctgctaatatttgttgaatggcacgaatatgatgagcaatagcaggtggtgcccttcagccagaccatcgctccgtgcgtctgatgcatcttgccaaagagtagttctgggaggtggttgcctctagagaacacattcctcctattctggggtcccgtgagagaaagaaatgcttttgcttttgatgtgggactcttactaagcctttcttcagagaaaaggaagtgaaaaatgcaccccatgataatcagtttcttacaacatactgtgatagtaccggcttcgttgtttttagctggaatcattagcttccatttttagaataacagctattggctaaattaggctacagtaggccattaagatggatgttggaattaaaaacatttttggaaaaaagcctgctttgagcctttgttataagcccttgggtagagatctgggtcctgtttctgatttcttgtgagccttcactctgacagttttgtttccagaaacacactcttagcctgctcctgaaatgggaacagacaggccaacttcccctctccagtctcccctgcgggtcaaagctttactttcctgtcatgttaagaaagaatagatttaaccttgataatccatgtagtattctgtatttttaccttttccttatctgaaaaaaagtgtatatatggcatggaattgattgcacaggcacatggcatgttggcttgtgaaccaattgttaaaatttcaagttaatcattaaaataatatctttcaaattaagttatattaaaaacaaaggtaacattctaaattcattactttctaattatttcgcccttttttttgtcgttgattatttagacttaagaaagtgatgggaaaaacgttaataacacagtacataagttgtttctgtagccattacactgtgattttcacaaacacttgaacacttgaatagtcttccattatttgaaaactattattcaacttatccaagtgaagtattggcatacaaagaagttgtttcatatttgcattgctcatgaaygtaaacaaaatgtcgatatgtgtgaactatacttgttgatcaattgcaaccataggttggctgcagatgcgagagcttggtaaacatcaacaaaagcattctctgagaatgaattgactatatggaatttgtaggaaagtgtattgtgtattttattattatttgtaaattgtgtattccacatcttttagattagtaaaatttatagtaaacatactctcacacctacattatatgcatagactgtttttcagattgctggttagtcaccatttaccagcacactgctgcctaaaagggaacttttctgggatggtggaaatgatatctatggattgcatacttgtattattctccacattcacgacatagagaggcagctctctctataatcactgcctatttggagcaaaagttacccccacagtgactaggggtataagtctttttagtaagattccatttgtctccaccaaaaacccatgggcctgtagtactaacagaatccatggaaagtgattcccaatcaacagtttcagccagagggctaaaagggacaaaagctttccgatgacaaaggtctgtctgaaaagtacattttgttttacttgtcacctcatccggccctgaaaacttgtcacaggggaagaccaacgcagcagtgggtaaggacccactttaggggagcatgaattgctcattctcaagattaggcagtggggaacaaagtggtctcttcccgtctgttcctctgggagggctccacgttaaagtgtccatgactacgctggagagaatgagatggaaccctgtgtgcacagctgtagagctccagctggctcctgaaggcagccgaccttttcactaacactggtgagactctctcaccaatgtgtccccgtcatactctagagcctcgggttgcatgggtcctatttttcctgaagcaaactaatcttttcccgaagctacactctgcagacaagcagcttcttttatttgtatctttctcctgtcaattgcatgacagaaaaggaaaactgtgtcaaatagtgaattctaaccccttcctatgcctcagagctcgacagaaataaagacagctgctctgtgcagccacttcacctttttgtgtcccgcaagcctctccctgggcctcttccgaactcctggttcactctgtgtttctgcgatgctttctcctgtttccagttgcggtattaccctttgctgcaatcccttgatcctcaggagctaggaatatattcaaggttttatgcctgatcccttctgaatcccccaaaggccaagtaccgagccgagccgtggtggtatccagcagcaaaggctagcctggctttaccttcctaagagccgaatgtctctccaggagcgtgatcagacatctcattgcagctgtataacatgaggtagcattttgaggctgtgtggctgcttggttacattcccttctcaaaaaaatttaaatgggttcccctagactaaggatatgcacagccaaatgctcctgcctgcattagagccatctgggccaaattatctcctgatcatgtttcactcccagctgagtcgtcctcaagtgcagcgtagagattgttcaggaagcaccagtgaagacggcccaacgactgggaagccggaggacaggggcaaacacgttatcaaggctttcggctcagcgaagtctgacttcggggcaagactgggttgtctgacacagacgtgggcactgccgtggtgagcaggacattcttctgtccctgctcagagctgggctgtttcaaacattgtttgggtccatcaagtttataaacaaaagaactgtattaggtgggctttctttgactctgggggaaacacagcaaaaggaaacaagagacctcaaggagggatggagagtgggcaaattggcaaggtttgtaaatacataaacagttttctgaataatatgttattttaaaacaaccttcacagtctgcttagtctgtggagctgtagtcctgcttaattaaagcaggggtctggagggattaaccttcatttgaatatacgaatttttctttctgagactgcatccagtggtgtgctgataaacgtttaacaacgggctctctgggagaaaaaggaaccctgatttgtagcatttgctgattttcatggtgtaaatactaccactgctgctggctccaagctaccaacgtggcattactgatcatagagttgggaggagttgttaaagattggctttcctgagccagcatgagccagctcctgcacattgct

SEQ ID NO: 95125 - DNA, 33534 bp, Homo sapiens
  misc_feature (1)...(33534): n = A,T,C or G
tcaagtcttcctgcctttgcttcaaattgtcctgccttcccagacctaaccaatgtaattcttctactgattgatgtctcgtgtctccctaaaatgtatacaagcaagctgtgcccgactaccttgggcacatgtcgtcaggacttcctgaggcggtgtcatggatgcatcctcaatcttggcaaaataaactttctaaattaactgagacctgtctctgattttctgggttcacagaagcatgtctgattattttaaataataatctaacacaaagaacatggttagaccactgaattccataggtatgagctcactgtcacacttcctttactgaaaatgtgtcctggggtgagagatgctgaataccataaagacacatgcagcgttctgtaagtccatagatgtgggtgctgcaggcagagaaggcgcatccctgtgtggactgagtctatacctgggaggcatattactgcctcctccaggagtctgatctaatttacttgccgtcaagtggccagctggtctccctaaagaatcgtgtcctggccaggtgcggtggctcacgtctataatcccagcactttgggaggccgaggtggggggatcacaaggtcaggaattagagaccagcctggccaatatggtgaaatcctgtctctactaaaagtacaaatattagctgggtgtggtggtgggcgcctatagtcccagctactcaggaggctgaggcaggagaattgcttgaacacaggaggcagaggttgcagtgagccaagatcacgccactgcactccaccctgggcamcagagcaagactccgtctcaaaaaaaaaaaaaaaaaaagagaagaatagagaaaaaaggaaaaaaaagaatcgtgtcctgtcagtttctcaaagttggcttctgctgttggcaggttgggtacttaacagtgacagtggccagcaagatcagccaggatgaagggcagtttatgaggttgaacacatgcatagcctctatcctgttactatagccacttcacatatgggctctttgagcaagaactgagatgttttgggaggaaaagtccaacatccagagatgacagagacctcctccataccaaatgccttctgatagatgtttgcagaggacaagaagtcttcacattcagtgcccattcaaaaaggtccatccacatccccagcagacctcctgtacctaatctttaatcttgttctttcttagtccctgatcaactggccaacccgtgagccagtgtccatcagtcctttttttgtttgttttttgtttttttttttgagatggagttttgctcttgttgtgtaggccggagtgcaatggtgcaatcttggctcactgcaacctctgcctcccaggttcaagcgattcttgtgcctcagcctcctgagtagctgggattacaggtatgccccaccacacccagctaatttttgtattattagtagagacggagtttctcctcgttggtcaggctggtcttgaacttccaacctcaggtgatccacttgcctaggcctcccaaagtgctgggattacaggcgtgagccactattgccagcctggtccttcaggccatccctacttagctgagaagtggaaaaccaggcacagtgctcagagttccaccatctgagatgacttcccttcaccacttctttttttttcttttttttctttttttctttttcttttctttctttcttttttttttttgtgacggagtctccttcttgtcgcccaggctggaatgcactggcgtgatctaggctcactacaacctccgcctcccgggttcaagcgattctcctgcttcagccccctgagtagctgggattacaggcgcctgccaccatgcccagctaatttttgtacttttagtaaagatggggtttcgccatgttggccaggctggtctcaaactcctgacctcaggtgatcagcccgcctcggcctcccaaagtgctgggatcacaggtgtgagccaccttgcccaccctccccactgtctttttagggtttctcctaagtaaggctagagtagaatggctgttcatatctggcatgtgccagcatattatgcagatgtcaacactaggcccattttttccatcctgcactaacttgacatagagaaatcctatgagtctataggtgtagactgaggcgggggtaggaatttaaatgaccctcttgtacaacctgcttgcacagtcctatgtacactttttatttcacaacagaatgttgctttgtaaattcactttttttttttttttctttgagacagaatctcactctgtcaccaaggctggaatgcagtggcctgatcttggctcactggaacttccacctcccaggttcaagcaactctcctgcctcagcttcctgagtagctagattacaggagcatgccaccacacccagataatttttgtatttttaatagagacggggttttgccatgttgcctaggctggtctcgaactcctggcctcaagtgatctgcccgcctcagcctcccaaagtgctgggattacaaaggtgagccaccgtgcctggccagtaaattcagttttaacgatcagatgaaactaaattcaccaagggcagttcagatgaatctctcagtgccacctggcaggagcggtggccctcaagtgaggatgcagccagcctacaatgaggagctacgggaataaggaccccaacctcacatcccacctctgttcttccacaagtgttccccattggctgcagctgaccaggagtcagagaacgagggagcccattgatgtggttcacatgagtcagcctctggggcggagcaggatgaagtggagaaattcatctggacaggctatggtgggcagcctctaagatggtacccagtgagcaacacctcctggcattcacctccagggctggtctgtgtgaccagtagaatatggcagagacaatgacatttcacctaacaagtcaggttagaaaaggcactgcagcctcagttttggtcactgcagtggggagctttctaagatggcccatgattcccagctgctggcatccatgccagtgtgtaatacccttcctttgagtgtatgctggaccaagtgacttgatcctaattaatcgaatatggcaaaagtattgggatatatcccttgtgagattaggcaactaaaggttctaacttccatcttggttgctggctttagccaagcaagaggcccgtgtggaaagaattgagggagacctctggccaacacccacctgagtgtgtgtggaaggggatccactccaggtgagacttaagaatctcaacttaagctgactgcagcctctggaaggactcagctctgagtcctcagctaaaccgtgcccagatacctattccacagaaatgtgagataacaaatgccatttgatgttttggggtaatttattataaaataaaaggtaactaatattctctctctctgatcacttgctttaggtgaagtcagcggctgtcattagcagctctatcgggagcccacctggcaaggaaaggttttctgaccacagcttgtgagtgagcctggaggcagatccccacccacccaagccttcggatgactacagaccctgccctcagcatgattcatgagagacctgagccagaacctccagctaacccactaccttattcctgaccatcagaaactgtgcaaggtagggcctggcatggtggctcaggcctgtaatcccagcattttgggaggccgaggcaagcagatcacttgaggtcaggagttcaagaccagcctggacaacatggtgaaacctcatgtctactcaaaatacaaaaattagctgggcgtagtggcacacgtctgtaatcccagctcctcgggaggctgaggcaggagaatctcttgaatctggtaggcggaggttgcagtgagctgagatcgcgccactgcactccagcctgggcgacagaactgagactgtctcaaaagaaactgctaaggtaataaatgttcggggttttaagctgctaaggtttgggaaaatttgctttgtagcaattgatactaatccatgagccaacagaaaacattcagccaagaggaaaagggaaagttcataaaattgggtgaaatattccttaggaatagtatttggtacttttttttttttttttttttgagatggagtctcactctgttacccagactggagtgcagtggcacgatctcagctcactgcaacctccgcctcctgggttcaagtgattttcttgcctcagcctcctgagtaaccgggattactggcgcgtgccaccacgcccggctaatttttgtattttgagtagacacggggtttcaccatgttggccagactggtctccaactcctgacctcaagtgatccacccgcctcaacctcccaaggtgctgggattgataacaatcatgagccactgtgcccggacttggttcatattcttgatgggccctgaacctatatatagagttatttttttgaggacctctcataaaaaaaaaggttttcttttgcttcagggacaaactctggtattccactaaattgagaatgggctgggcgtggtagctcacgcctgtaagaccagcactttgggaggctgaggcaggaggatcacttgatcccagaagttggagaccagcctgggcgacacagggagacccctcccccatctccacaaaaataaaaataaaataagccaggcgtggtggcgtgcacctatagtcccagctacttgggaggcttaagtgggaggctcacttgagcccaggagttcgaggctgccgtgagctatgatagcaccactgcactccagcctgagcaacagagaagacccagtctccaaaaaaaaaaaaagcccaccaaaaaagtaaaaaaaagttgaaaatgatgacagaccctttattagcacctcttacatgcccgggcagtgaatttatatcatctttcacaaatagaaaaactgaagctcattcagattaggtaatttatctgaagacacagataaacccctctcagcgcctgactctcggcgcaatcgggatgtttcgcagcggggcaggggcagggcccggagccaccgccatcgcagcccggggaacaacggactcggggaagcccggcctggcccttcaagtcccgggcccagcaagggccaggaccctccctccctccctgcaatcggtcccaactcgctgaatgaagctcattcagtttaggtaatttatctgaagacacacggttagtaaaaggcagaacccaggtttgtattccgaagccctcgttctttccaccacattattatggccttcctaacggtaatccttacaattttaaatgaacatataccatagctcctctcctgaacaccgagggacgctggctcacggagtttagaaagttaacgcatctggccgggcgcgatggctcacgcctgtaatcccagcactttgggaggccgaggtgggcggatcacaaggtcaggagttcgagaccagcttgactaagatggtgaaaccccgtctttactaaaaatacaaaaattagctgggcatggtggcacaggcctgtaatcccagctactcgggaggctgaggcagaagaatcgcttgaacccgggaggtggagggtgcggtgagccgagatcgcgccactgcactccagcctgggtgacagagcgagactccgtctcaaaaaaaaaaaaaaaaaaaaggaagtttacgcaacccgctgcgtcccctccaccgccgcgcaccccgtctcgcagctggcgcggtgtttgctggtgacatgaactcaaccagcctccaccatctggggatcggggcgacatccttggtctggtttgcaagaggacccgcacgcctccagctggggcggaattggaagattcagaaaggaaagttggggaggcggggaaggaagggtgcaaaagtgacactgtgccagggtctccagggccgcggagctccgggacaggcagcgccttccgagctgcacaaacgcgtggggcggggcgtctcyggatccggaagttgcctctgccctcaccaaagatggcggccccggcgccgctygcccacctctcgtaaccaatggaaccgcggcgctcggccgattctckcagrcgccctcagatctacgctctctgatgcaacgccggaatcgcggaaaccgccggtgcacgttggagtcataagacggcgtcggtgttgcagtctgtgtccttggaggtgaccagggccactgcaggcatggtgctaggtgggtgagactcagtgtatggcgcggtgttccctgcctggggcaggaactctgytccagycgggtttcggcgctttccttagtgcctaccagagtgggcgccccgcgaatgtttggggaccgattgcagggagggagggagggagggtsctggcctttgctgggcccgggacttgaagggccaggccgggcttccccgagtccgtcgttcccccgggctgcgatggcggtggctccgggcccttcccctgscccgctgcgaaacctcccgattgcgctgagactcaggcgctgggacgggttcagacacagggtagcccctactcctgcagttcttcaaagtgatcgtcaggaaggggctttaggattctagttgtttttctcccaccctcatttttttattgaggtttccggggagaccatactgtgcagtaggaaaaaaaaaaaaaaaaagagagagacctggatggatgttaactgttcagacctactagttgtgaggccttctgaaattttctaacctcagagcttctgtttcctttaaagtccagagggagctggtgtttatttgccatctctacaaaaactggcactgggatatctgatttgtatgtgttattttatttcatcctcagcacagcctttcaagatggggattgtttttcctattttataggtaaagaaataagctcagaaaggttaagtaaattctccagagtcaccctgccttttaaggtacaaaatccaacattccagcgtatgtctgatcaacttcaaagcccatrttttatttttgggtgcccaattagatagaataaatatcacaaattaaaatgatcagagttcattttgraaacctggattattaactaatgtttttatgagatggatgttattgaaatggagtggggaaataamtaggatattaattanttatggacctcaatttttattaatcgatgcttgttctgtttacaaagataaggaatgaataaagtagtaaggtgactaatagttaatggccagaccataacttaccctcattttgtcaaacagcagagctgtacgtctctgaccgagagggaagcgatgccacgggagatggaaccaaggagaaaccatttaaaacaggtctaaaggtagagtctcttctcattaggaaaatgagactgcatttattaatgagttatgtcaattttcntgtgacttgccaagaacttaatttcaaacactaggttccaaagagaattttcagaaaagggaaagtaaggaatgcatacagatatgtgactttaagawtgttrgatgatcaaagtctaaacttactttttaacattttgaaaaaaggtctcttctttcttaccacatggcattgcttcttggaatttttctctccattgagtcagattgctrggttttcaattcttgtaaagataaaagttacctttcctcagttacagtgagctcatgaccagggggctcctgagagggcttttggtgaatttaccacaatccagagtgtgatcctgagatttgactccaagaccaccaagaatggattcatttgtcagagctgactcatgagtctggagcttcaagctagaatgccaatttattaacattctgttaatgaattaacagtgctgttatttctcaggatctagaatccttgaatgagtttagctcattctcaaaggggtttgtcaagagcttggactcaggcctggtgtggtggctcacgcctataatctcaacactttgggaggccggggcaggtggattgcttcagcgcaggagtttgagaccagcttgggcaacttggtgaaatcctggctctacaaaaaacataaaaattagcccagcatggtggtgcgtgcctgtggtcccagctactccggagactgaggtgaggatttctttagcctggaaggtggaggttgcagtgagccaccattgcgccactgcactctagcctgagaccctgtctcagaagaaaaaacaaaaaaagggcttggactcacaacatgggtgttaggtagttgattatatcagagtaaagtgtggcctaagacaaccttcttaaaatagaccatggacttagctgttgaactcatatgctagaatccattggctataactgccacataaggaagatggttaaaagttccttccttgggtctgggctttggtgcctcacgtttgtaatcccagcactttgggaggctgaggctggaggactgcttgagcccaggagtttgagaacagcctgggcaacatgataagaccctcatctctacaaaaaatttaacttcttaaaaattttttaataaatttaatttaaaaaataaatagagacaggatattaaccctcccaaagtgctgggtttataggagtgagccatcacactcagccaactaccaaaaaaaaaaaaaaaaaaaaattagccaggcatggtggtatggtatgcacctgtggccccagctactcgggagactgagatagggggattacttgagcccaggaggttgaggctgcagtgagccgtgattgcatcactgctctgcagcctggacgacaacaacaaaaaagttccttctttgaactgtattaggaaaagcagtgccttgacactcctttttctgtgcatcccctttttttgttaactgtgttacaacatttatagttactatcaagtcctaatctgggagcattctcctctcttttaggtcataccatatggttataaactttggtgtgtcatacatgggtacttgtttttaatttaacttatttatttatttttctgagacaggatcttaatttgttgcccaggctggagtgcagtagcgcattcatggctcactgcagcttcaacctcctgggcttaagggatcctcccacctcagccttccaagtagctcggaccacaggggcatgtcaccacacgcggttaatttgtttcttatttgtagatacgagatctcattatgtttcccaggctggtcttaaactcctgggcttaagcaatcctgctgccttggcctcccaaagtgctggggctacaggtgtgagccgccactcctggctgggttttactttttaaccactcttaaggggaaatctttcatttctggattatcgggtgcctcgttttgcagctcctgaaaactgacaacaccgtttagatgaacgtttgcagaatrtcactgttaacaacagaatgtcactgttaacaaaagtgtagcattctgatttgggaactgatagtttggctctttcaatttcaatgatacaaaaggagggatcagtacagattgtcgggtaataagtgaattccgaacgacctacatgtattcatgggaccttctctcttggttttgcattttcatcaatggctatcttttttttttttttttttgagacagagttttgttcttgttgcccaggctggagtgcagtggcatgatctcggctcactgcaacctctgccttctgggttcaagcaattctccctgcctcagcgtcctgagtagctgggattataggcactcgccaccatgcctggctaatttcttttttttttttttatttctagtagagatggtgtttcaccgtgttggccaggctggtctcgaactcttgagctcaggtgatccactcacctcggcctcctaaagtgctgggattacaggcgtgtgccactgcgcctggcccctacatgtattcttacaatgtctagttgttaaaaggatgaactattgaatgttttcttttttttcttttttttttttttgaaaaggagtctcacactgtcacycaggctggagtgcagtggtgcaatctcagctcactgcaacctctgcctcccggattcaagagattcttctgcctcagcctcccgagtagctgggaccacaggcgtgtgccaccacacctggccaatttttgtatttttagtagagacagggtttcatcatattggccaggctggtctcgaactcctgacctcatgatccgcccacctcggcctcccaaagtgctaggattataggcgtgagccaccacgcccagcccttgaatgttttcaaaagatccagattccttccttctctatttttttttttttttttttttgagacggagtcttgctcttgtcacccaggctggagtgcagtggtgcgatctcggctcactgcaagctccgcctcccaggttcacgccattctcctgcctcagcctcctgagtagctgggactacaggtgcccgccaccacaccyggctaattttttgtatttttagcggagacggggtttcaccatgttagccaggatggtctcgatctcctgacctcgtgatccgcccacctcggcctcacaaagtgctgggattacaggtgtgagccaccacgcccggcctcagattccctccttctctgcagcagtcgtagaactgagaaaaagtccgtttttgcaggctgcagatcttgcaacagagaataattcactgcatttcttgtttgattcaataacttggaagagattttgaaagattatttgaggctttaaaatattcatcttttatgtactttgaactattttttaaaaactacaaacaatacattttatcaaatgatatataacacagcaatgcttgatatgtcccattggggaaaagaggtattctacatgggggagtttttcagattaaatgagtttagctttttgtgctcttttttttttttttttttttttttttttgagacagagtctctctctgtcgcccaggctggagtgcagtggtgccatctcagctcactgcaagctctacaggcgcccgccaccacacccggctaattttttgtatttttagtagagacagggtttcactgtgttagccaggatggtctcgatctcctgacctggtgatcctccctcctcggccccccagaatgctgggattacaggcctgagccactgcacccggccgctttttgtgttcttaaccattgttttgttgaaagtttcaaaaatgtctgacacttctctgatttctcacagagaactaaccttttagatgtcacttgcagttgagttttgctgtcaggtgtctcttctgttgtccttgtacctgtgctggttgctacagccacttaagatctgttgcttatagtctgcttttcctggggaactgtatcgtgtatacccgaacttgctgtaattgtttgtgagaggacctcagagcttcagctttaaccagtgtgcttctttttttttttttttttctcttgagacagagtctcgctctgttgcccaggctggagtgcagtggcacgatcttggctcactgcaagctccgcctcccaggttcacgccattctcctgcctcagcctcccgagtagctgggactacaggtgcctgccaccacacctggctaatttttttgtatttttagtagagacggggtttcaccatgttagccaggatggtctcgatctcctgacctcacccacctcggccttccaaagtgctgggattacaggcgtgagccaccgcgcccagccaaccagtgtgcttcttaaatgttcaaccagtcactgtgccaatatcagcttttggctgttggggtctttaygcttagattgttccagttgccttatacttgagatgttattttgattttaagtattgtacaatgttcaagractgtcttttctctcctccctacccaaggctttgatgacagtagggaaagaaccatttcctaccatttacgtagattcacaaaaagaaaatgagaggtggaatgttatttctaaatcacagttgaagaacattaaaaagatgtggcatagggaacaaatgaagagtgaatcccgggaaaagaaagaggtgagtcctgaccttgccatcgtgaacgttgttaaagttagaactctggcaaccatgttaacaaactgcttcatcattaaaattaggcagaagatagtttacgaagagaaaagaacctggaagaagcaaagaagattaccattaaaaatgatccaagtctcccagagccaaaatgtgtaagtttgtttatcttttcaaataccgtggacttggctacatcagatcattatttctgtgtatgaggggcatgtcacatggtttgttcctttacattttgtttttactttccatttatttatttatttatttatttttgagacggagtcttgctctgtcgcccaggctggagtgcagtggttcaatctcagctcactgcaagctccgcctcccgggttcacgccattctcctgcctcagcctcccgagtagctgggactacaggcgcccgccaccacgcccggctaatgttttgtatttttggtagagacggggtttcaccgtgttagccaggatggtcttgatctcccgatctcgtgatctgcccacctcgacctcccaaagtgctgggattacaggcgtgagccactgcgccyggcctactttccttttattttttatttcttaattttaaattttaatttatttattttgagacagggtcttgctctgttgctcaggctggagtgcagtggtgcagtttctgctcactgyaacctctgcctcctgggctctaacgatcctcccaagtaggggggaccacaggcatgcaccaccacacctggctaacttttatttatttttaatttttgtagaaacagtctcccatattgcccgggctggtttcaaactcctgggctcaagggatcctcccacctcagcctcccaaagtgctgggaatacaggcgtgagccaccatgcctggcctactttcctttcagaagggacatagagaaataatgttttagagttatgaggctagttctttaggggttcattttattacacagttragtaaatgcatgttgaatgaattctgtcccaactgaatgccagcagatgggggacccaggcctggctacgcttcatgatgttggtcaagtgatttaaccctctctagtgtcagtttgcttataaaatgaagaggttgaaatctatgattttcatgttttatttaaatagagtaaaagtttgtgaattgtgaaattagattcactcttcttctgttctttctggaacccaaatagattgctggactatgaatgaaaatggtttgatttccagtagttcttattttattttattatttatttatttatgagacagagtttcactcttgtcacccaggctggagtgcagtggggagatctcagctcattgcaacctccgcctcccgggttcaagtgatcctcctgcctcagactcccaagtagctgggattacaggtgcctgccaccacgcctggctaatttttgtatttttagtagagatggggtttcaccgtgttggccagactagtctcaaactcctgacctcaggtgatctgccctccttagcctccyaaagtgctgggattacaggcttgagccaccacgcccagccagatttccagtagttcttattgctgatgaatttttgtattatttccttagtgatggagctggggttttttggccacatgcaacagccccttcctstactcatctcctctctccttcatcccccaaacaaaagctagccttttaagtaccatgttctggaaggtattgaagaactgtggggtcatggaaaaggcttcatgtggactgggattgttgctgttgtgggaagcaagtgctccacttatgacaaaggaattcatttattaattaattttatctagcaatatctgaaattcttctgggtgtttctcattatcagttttacaytaagaaagaagacttggatttttttttgttttgttttaaaccatgccaatacagtgaaatgcgtttggttctgagctgcagtagaggggctgtctccagttttgcaccatttgtgatttttaacacttactaccgtctgcctaatattagtgaaaaagttggtgtgtataaatgacattattgaacaaatgttgtttatttcaatttgacaggtgaagattggtgcgttagaaggatatagaggccaaagagtaaaggtgtttggctgggtccacaggctgcgcaggcaaggtaaatggcaaagcttttccttctttttaatgtttaaatatccctgctcttagatgaagaaaaacatacaaagatttgcaggggtttttttctctccccctttttttcttagacacagtctcactttgttgcccaggctggagtgcagtggtgctatctcggctcactgcaacctccgcctctcaggttcaagcaattctcctgcctcagcctcctgagtagctgttatcacaggtacctgccaccacacctggctgatttttgtaattttagtagagacrgtgtttcaccatgttggcccgtctgctctggaactcctggcctcaggtgatccactgtcttggcctcccaaagtgctgggattacaggtatgagccgctgcgcccggccctctttttttttttggtatgctggctagacttgaactccccccagccatcctcctgcctcagcctcctgagcagctgggattacaggcacatagcacctcacctggctttaaaggatagagtgatttatatcttaaatttgttcttgtttaaaatgactattgaaagtataaaaatttttaaatgctcttttaatggttagcaattatagtgatgaagatgcgtccagtaaatayttgtcaagttgagttttaattatttagtgaaaatcaagggatgttactataggaggttgacatctgagtctgaaacttggccatagttttgactcttataaacagtatatttgcattctcccttggttctgacattttgtttcctctttccccttttattatatattttataatatataaacatgtcacttttactatttattgtaagggattagcaaatctttcattgaaaagtgggacaggccaggtgcggtggctcacgcctataatcccagtacttcgggaggccaaggcgggtggatcgcctgaggtcaggagttcaagaccagcctggccaacatggtgaaacctcttctctaataaaaatacaaaaattagctgggtgtggttgtgagcacctgtaatcccagctactctagaggctgaggcaggagaagcacttgaacctgggaggcagaggttgcagtgagccgagatcatgccattgcactctagcctgggcgacaaaagtgaaactccatctgaaaaaaaagcgacggtggaggggacaaaaatacaaatgaaatgttttaagcggatttcagtaattggacctttaggacataaataagaaaaagtgattttgttcaagaacatttatgtatcaccgagtgcacagtactaccccaggcattgcaggggactcaagggtagataaggcataatcccttaactcatgttgccttctgtcctgctttcccctggttgtgtggatcttggggatcatgtaggatttgaaagtccaatacattgaaaataaaatattttacaaatactgagtagtggtattaccagtgggtacttcaggggcagggagccatgtgggaggtctgaacttgaatgtttaaccktggagtttcctttagataagattaagtcatggctgggtgcagtggctcacacctgtaatatcagcgctttgggaggctgaggtaggaggattgcttgagcccaggagcttgagaccagtctgggcaactcagtgagacccttgtcactacaaaataattagccaggtgtggtggcatgtgcctgtagtcccagctatctgggagggtaaggtgagaggtttgcttgagcccaggaggtagaggctgcagcgagctgtgattgtgccactgcactctagcctgggtgacgaagtgagaccctatctttaaaattatatatatatataaaatttaatgccttgagaacagtctgcctaaattattatttctcattttttaggaaagaatttaatgtttctggtgttgcgagatggtacaggttatcttcagtgtgtcttggcggatgagttggtaaatattttctcttatttatgcctgaaaattagatgttttcagtagattcctttattgttttgtatacatttatttaaaacatttattatgtcgacagtgaatgtcartgaatcaaaacatcacattgtataccataaacatgcaatttttatttgtttattataccttaataaggctagagggagaaaacttttgtggaaaatttccagcacattacaaaatagaaccatataaaaaatcatcaaatgcccatcacccagcttctgtaaccacctatatatggctaatcctggtatgatactgcccctcagacatcatatcattttatttaattacacatgcttatgcatctctaagaaaaataatgtggctgggcatggtggctcatgcctgtaatctcggcactttgggaggctgaagtgggcagactgcttgagcccaggagtttgagaccagcctggcaacatggtgaaatcctatctctacaaaaaatacaaaaactagccaggtgtggtggtgcatatctgtagtctcagctactcaggaggctgaggtgggaggatctcttgagccagggaggcagaggttgcagtgagccaagatgatgccaccaccttccagcctgggcaacagagtgaaaccttgtctcaaaaaaaaaaaaaaaaaaagataatagtcacctactattatcacaccctccaccaaattaatacaactactaaatatcatctaatatccagattcttgttatcagttcgtactgcctttttatagttgattgatttgaacgaggattctgacaagactaacatgctgcgtttagtgatatgactttgaaattttctttataactctgctgctctctttgcattctctcttcttttgcaacccgccccctctccccacccattactrtgtatttcttgggaaaaccctggtggattgtcctgtggaacttctcacattatggatttggttgtttgcatccttgtggtgtcctttagcatgttcttctagtgtctgcattttttataaattggaggttaggtctgattaggttcagttttttggcacaactacttcatgggcaaagctgtgttcttttagttgcatcacgtcaagaggcatgtaaggtgtggttgtctttttcttttttttatttgagacagagtctcgctctgtcacccatgctggagtgcagtggcgtgatctcagcttagtgcaacctctgcctcccagattcaagtgattctcttgcttcagcctcccgagtagctgggactacaggtgcatgccaccatacccagctaacttttgtatttttagtagagacaggtttttgccatgttggccaggctggtcttgaactcctgacctcaggtgatccacccgcctcggcctccgaaagtgctgggattacaggtgtgagccgccgtgcccggccagttgtcttttttatgactagtgggttcaggtgttggcagcctgacttcttccttttaaagttccccatcagttttttcctaatgactttagtaagaagtgattatagtgtagatgggctctgtatggttttgtttgtttgtttgttgttttgagacacagggtttctcagaaagagtacagtggcatcatcatagctcattgcagcctcgacttcccaggcccaagcaattctcccacctcagcctcccgagtagttaggactataggcaagaaccaccacacccagccaatttttattttatttatctctccctttgttgtccaggctggtcttgaactcctgggctccagtgagcctctcaacttagcctccttcatgggattacaggcatgaaccactgtgcctaacctgtatgttactttaatagtctagatttttaaaaataaataaataaactgtccagatatttttaagtgatgtgggtcagtgtcatttatccatgtatgtaaaatgtgtatttacatgtatatgtatatatttacatgtatatgtctatatatagataaacctctgtcttccacaaaaatatctattttaatattaagaatcagtggccatctcactctttattttactagtatttgatcagataacttgtttgtaaacaatccctttaactttctatatggtagaatttttaaatcaatgtgaataactaaatttgagctttgacctttttatagtgtcagtgctacaatggagttctcttgtccacggagagcagtgttgcagtgtatggaatgctaaatcttaccccaaagggcaagcaggtgagtggattgagtttcgcactgggtgaatgaatagtttatttattggtttgttttccagtgtctttgtttgtacatttggcatatgtattagggttcttcagagggacagaactagtaggatagatgtatatgtgaaagggagtttttaaggagaattggctcacaagatcacaagatgaagtcccacgataggccatctgcaagctgtggagcaaggaagccagtagtggctgagtccaagttcaaaagcctcaaaagtagggaagccgacagggcagccttcagtctgtggccaaaggcccaggagcccctgtcaaagaactggtgtaagtccaagagtccaaaagctgaggaacttggagtctgatgttcaatgacaggaagcatccagcaccggaggaagatgaaggctggaagacctagcaagtctgctcttccaccttcttcctcttgctttttctagccaggctggtagctgattgggtggtgcccacccacattgagggtgggtctgcctctcccagaccactgacttaaatgttaatcttctctggcaacacccagatacacccagaaaatactttgtatccttcattccaatcaggttgactcttaatattaaccatcacagcatataaatacaataaatgtgaagtacatgtcaaattcactatgccttttccagtgaaatatgtacattgtacaactcaggtgataaaaagaatacaatgatttccagccttacggaattcctgaatcatcctcatgggctataatatagccactgtgctgtagatatatgaattacttttcagccagatggaaataaaaacttaacaacccacctaaatatgttcagagaatttcttattagaatttgagcctgtttttattgttttttttttttttttttttttgagacggagtttcgctcttgttgcgcaggctggartgcagtggtgcgatctccactcaccacaacctctgcctcccaggttcaagcgattctcctgagtagctgggactataggcgtgcgccaccatgcctggctaatattttgtatttttagtagagatggggtttcaccttgttggccaggatggtcttgatttcctgacctcgttatccacccgcctcagtgagccaccgtgcccagacacaaatatcttttaaaaatggaaacgcacaggctgcgcatggtggctcatgcctgtaatcccagcactttgggaggccgaggcgggcggatcacgaggtcaggagatcgagaccagttttgccaacatggtgaaaccccgtctctactaaatatacaaaaattagccagacgtggtggtgggcgcctgtaatcccagctgctcgggaggctgaggtaggagaatcgcttgaacccaggaggcggaggttgctgtgagccaagattgcgtcactgcactccagcctgggcgacagagtgagactcygtctcaaaaaaaaaaaaaaaagatatttgtgtgtatgtgagtgtgtatttatccagaaagaacattggtaaaaatatcaatataaaactaaactaaagctgagaattaggaggttcttaaaaatctcagcttaccaaaactttgacataaattaaaatcctcaatactgttaattttttatttccttttccctctttctctggaccccacttttaaaaaatgcaggctccaggtggccatgagctgagttgtgacttctgggaactaattgggttggcccctgctggaggagctgacaacctgatcaatgaggagtctgacgttgatgtccagctcaacaacagacacatgatgatccgaggagaaaacatgtccaaaatcctaaaagcacgatccatggtcaccaggtgctttagagatcacttctttgatagggggtactatgaagtaagtatgcattcgtcagcttttgcaaagaatatgttttttgccgttttgaaacttgaatagtggtgctcacgatagcattgatttattccttctttgcatttgaacaggttactcctccaacattagtgcaaacacaagtagaaggtggtgccacactcttcaagcttgactattttggggaagaggcatttttgactcaatcctctcagttgtacttggagacctgcctcccagccctgggagatgttttttgtattgctcagtcataccgggcagagcagtccagaacacgaaggcacctggctgagtatgaagttgtctttttgttttatttctttctaggtaatatctttagagaagaaatcttagtgtaggtaaattatgtttatgttttaaaaaaaaccaactgatatattaagtggttaatggaagaacatataacaaagttttgccaccttagatcgtagctaagttctcttttttcactttgacttgatcttttatatataaaggmgcaaacaagaaattgctactcagtggagaagaggggagtccacagctaatttgcaaagttgggaattggtagcattgttggcattttatggacagcttcccaatgttaaaagccttgctggataaaaaaccagtgcaggagaaaagcagtgctgagctattgtctcgttcttcaggtacactcacgtggaagctgagtgtcctttcctgacttttgacgacctcctgaaccggttggaggacttggtttgtgatgtggtagatcgaatattgaagtcacctgcagggagcatagtgcatgagctcaacccggtaggtgcagtgtttatggaaagaaaaagtcacagtccttttttggaagacaatgaagtcttcaccctcagtttttgtagatttgatggcttggtgagctgaaataagtgactaattattttgaagactagaatttgatgttagtcactgtcaataattttataatgttttcagttatataacaggctcatgttttccattttaggaatgtctacatagttttctagtctgaagttatatatatatatatatatatatattttttttttttgagacagagtctcactctgtcgccaggctgaagtacagtggcgcgatctctgctcactgcaacctctgcctcccagcttcaagcgattctgcctcagcctcctgagtagctgggactacaggagcccaccaccacccccagctaattgttgtatttttagtagagatggggttttaccgtgttggccaggctggtcccaaactcctgacctcaagtgatctgcccacctcagcctcccaaaatgctgggattacaggcatgagccaccacacctcactgaagtaatactttataatagttttttaatggaaattttagtgttaatgtttatatttatgtatatatacacattatatttttcctttcttctgtagaactttcagccccccaaacggcctttcaaacggatgaactattcagatgctatcgtttggctaaaagaacatgatgtaaagaaagaagatggaactttctatgaatttggagaagtatgtatccctttctctcattgtttccaaggtgggattgggctccaattctcttcttctggttaatgaactagtaacatgggtggcatctgcctgtcctcaaataaatggtaacagcagracctgcttcttgggttgcctgcagattcgctgagttaacagagtcagccttaggacagtgcctgttctgtaccacccagtaagcgtaagtgagtttctttttytttcttttttttttttttttttgagacggagtctcgctctgtcgcctacggagtgcagtggcatgatctcagatctcggctcactgcaacctccgcctcctggattcaagcgattctcctgcctcagcctcccgagtagctgggactacaggcgcacaccaccatgcccagctaatttttttatttttagtagagacagggtttcaccatgttggccaggatggtctcgatctcttgacctcgtgatctgcccacctcagcctcccaaagtgctgggattataggcgtgagccaccgcttctggccaagtgtgagtttctaagctgccttcatgtctcatgcttkgcctcttccctcttccttcattgttcttccttggccacagcttataagctctctttatcattctctaggctggtaggagtgctttagaaggttgtgaagcctttgaaatcacatgcaaaatgttggtatatagatatatatatatatatwtwtwttttttttttttctggagaatgtatcttgtgcttttaaaaagaggttcatcccctcccccaaaacagtgatttaaaacttcttaatgtggaaggcgagaaagaagatagccattggttaaaaatgcaaaaccaagagagaaggtcttggagaaggtagcctagtgccccaggtaaacttagcatttcggttttgcctgagaaccactctcccagcatgcacttgggttgcaaattttctttatttgggacagcatctccatctgtcgtccaggctggaatgcattggtgcgatcatagctggctacaaccttgaactccagagttcaagtgttcctcctacatcagcctccaaaagtgctgggattacaggtgtgagccaccatgcccagctaattttttattatttgtagagatggcgtctccctatgttgcccgggctggtctcaaactccttggctcaagcagtcctcccaccccagcyttccaaagtattgggattacaggcgtgagccactgcatctggctcaagtttccaagactatgctaggccctctttcctgtgcatttaaccattacttacataatatttgcacatctaattgttttacagttgaaatgtgtgtagatgctgctaactagttttgggttttagaaggaattaataggtgaaacaatatactgggtctatgtaaagcactcttgtttctgtgaattcagtttggttttttggttttttttttttaaagagatggaggtattgctgtgttgactgggctggtctcaaactcctggcctcgagcagtcctctcacctcrgcctcccgagtgttgagattataggcatgagccacactgtgcccagcctatgaattcagtttatgatgtataatgacaaaattttgtattgagaacttgcatacttttagtgttcctaatacttagtaaaatagtgtagttgagtggaaagaacacaagctgtggagtcagaaggccccccaggtgggcttagctcccacctcttttcttttgtgctgtgtaactgaagaccagtgaccccctctcaggttccttatctctaccttggaagtaacatctgttttgcaagattgtggggactaccggagctaaatgcctaggcaggacaatggcagggggagcctgtcagcatttactatacattgctactgttccacacacatgaggacactagagtggatacatgaccctcaggctttggggggtatgaaataagacctgttttcccctaactaaatcttatgcagaaccccgctgtgtaaagcagatgcaagctgagagactagagctctcccactcatctcctgttacctctcggcgtctccgaggacgcaagggctccagagcctggagcttgaaaacaggtgtgctaggtgattgctacctccatttcmcttcttcattaaacaaatctatgagtcttctccagttctctcaatccatttttactgggacgagagttgtcagttttaacttctgtgttaactttaatttatgtgtggtatagaaggatgttttgagagagaaactgatgcgcttaagtcatcatctaacattgtttgggtaactattccaggtgtgcttacacttaccagtttgacattggttatttgtcttatgattgtgtctgtcatcgaaggcataactgattgattacaacaggaaagaagggtagataacaggagagtttaaagataagtgtcattagtaatatactctgtgtgtagatcaatgatgttctggagcattcatgattaccgtatgccttacgggactaagtggacctcatttgcttcagagctagacaaaacgggccactgagaaaaatactgagctgtgtctagtcacagcttggggctggcttttgtttttgttttttttttkattttccttcatcaaacagcatrgtgcttgagatatgctgtaaagggagacagatcttttatgcttcattaaataactgagttttaagaatatgtttatttctttttgaaagaaattattctttacacaaatgtgtatgggttaagggtaggtgtgtatcctctactctgttgaattgataggaggaaggactggtacagggtgaaggagctgcttctgtcttgttgcgatccaagttgtaaatgttaatgaagtcttgtttgacctcaggatatcccagaagctcctgagagactgatgacagacaccattaatgaaccaatyttgctgtgtcgatttcctgtggagatcaagtccttctacatgcagcgatgtcctgaggattcccgtcttactgaatctgtcagtttctgtttcaaagagtattaataattttgctttttaagggggtggggactgtcatctggaatcaggtacagctcatgccaaatatttcattctctatctagaataacaatatttaaagacgttgggttttttcaccctcccctgattgaagttgacatgctttgttaaattagagaaatgtaaacatttgaatattacatgatcatagtggctcytttagcccttggagcttaattgtarttttcatttaaactctagggnagtgctgtgtctgatcgcttgatagtaattgtgtatcttctttcacttatatttaaaggtcgaygtgttgatgcccaatgttggtgagattgtgggaggctcaatgcgtatctttgatagtgaagaaatactggcaggttataaaagggaagggattgaccccactccctattactggtatacggatcaggtaaaaccaattttttaagtactcaacatttttttccactgtaatcrttctgtatatattgaaatttttraaaggggagaattcagggtagtactttggtatttgaatgagctatattcagtttgcaggttataatgtggtgtgtgaatattgccagctttgttttggccaagttatatgttaatttcatttgaaaacctgtttaacggccggcttgttgattgcaactgagttttaaaaaattgatcctaccagtatctagtacccttcttcattttcctcttataaatagacattgacttattttaaaagtttttaaaaatctcttctttccagggtagtacttattccctggttgattttttcataccaaattatttctttatgcatggttcatgaaggcatagagattaagtgctgggattacaggcacgagccactgaatctggccatagttgaattcttaaccacagtgagctaactcctttcatggtggaaaattttaactgtcttagatgaaagttttaacttaagtatttactcctctttctttctttctttttttaaacagagaaaatacggtacatgtccccatggaggatatggcttgggcttggaacgattcttaacgtggattctgaataggtatcacatccgagacgtgtgcttataccctcgatttgtccagcgttgcacgccataaccattttctccagaagcrtggaggaaagattatgaaaggaacaggctctttaaaaaagaaaacaaaaagcyagaatcttcctttttttgtttcattggggtttctctttctgtttttctttctactaccataaaaactatctcaaatcacctgaacatcaagtgatattaaggttgtcatcttaagaaaaaatatccatttttttcttaagttcgggaaacaaagttcggggaaaatayctggcatgaaactgtagttagggatacatttcagcattttactcactttatccaagttattcattttattcaagttatatgtatgtataattcaacaattttagattatggtgtaagatactccagtaacttatctttctgtccttttaagtgtacctkgaattctttgatttattttattgcatcaatgaattaaaacaaaaatcttgggggaagaaattggcaatatcgtataaaaatctgctcatattagaacacagtataattcagcagtaaacmctagaatcaaatgaatagccttttgtatcagttattaatcttttctaactctgcttagctgctaataatcctgaggcatagaaattgaagaatttgtaaaaatagaattgccttaaaggatttgaagtaagaacataattttggggagagttttttagtgattcacagtatccctcttagcattaatttaaggtaaagaggcagattgattttccctctttcctggtaattcctaagtaattaagaataaataagttccaaaagaaattgtagctggaatcttaataacaattgtgagtggctgtttgagttgcccccmccatgtccttagatytaatctgtgctaccttattaactcacagcaggcttactgaatggcttcatttcagatttagttgatttctccmccaaatgcatgtcatgtattctcaataggctgtattcccagcagtcaataaatgaacacccgtaaaaactctttgctggcttaattttcttaaagctaaacatctctttgtcacattcgttcatgcttttgcaattattttatcttttttatgatgtatatatgtgaaattaagtactactaaatttagtagatattgctaacgttatatggtaatgagaacgaatgattttttaacgttagatatgtgggtcatggttaaatcttttttgtaatcttttttgtgttactgttggacacattagattttatcctgttttgcaattaagtgaaatgacaggtcaaaatgaggcatttaggctgggtgcagtggctcacacctgtaatccctccactttgggagaccgaggcgggcagatcatctgaagtcaggagttcaagaccagcctgagcaacatggtaaaaccccatctctacaaaaataaaaaagttagccaggcatgatggcaggtgcctgtaatcccagctacccaggaggctgaggcaagagaattgcttgaaccccggaggcagaggttgcagtgagccaagattgcaccattgcactccagcctgggctatagagcgagactgtctcaaaaaaaaaaaaaaaaacaaaggaagaaatgatgcatttataatctattcagcctgcatctttaaataaaaaatacttggaagagtgtgaatgagctgtagatgacttcaactaagcaattcattttatcagaattaaagtgaagaggttaggctcagttagccttaattttaatggtgtaaacaggtcaaagttttaaaatattaaaggagagccaggatatggataagggagttaaggtggtgacctcaggccgagagactgagcacggtgagcagcaaacctcacgcgtgtggacttcactcccttcgctgtgtagttactaccctaattcaggtgtcacagatgccatcccgcattcccatggctagctcacaaacacccctgccctctcaggacttccatcacgtgactttctcctccctgaaactctctgcttttcataccaaaaacccctccacctttggcacttgtgtgacctgctcagttttggagacaaacaggaggctaattcaattgcttaaatatcaacttgccctcttaaatgtccttcagccatttcaagcgacccagtttcccaccttgccgttcagcccctgccaccttgctgcctcgtaatggttcctaaaaatgttgtccttaatacgtagagtagttcaactctgtgaaaagcaatcttggcagcacagtgggatcatttggggaccttaaaaataatggtgtttgggccttaccccaggccagttgaatctgaatttcagaaatgggaccagggtattttttaaaagctccccaggggaggttgttgcacagtgaggttgacagtcgccaggtggcttcctcctacttctaaactcaaccttaagcctctcttattattgctgtaggttctctattgattttgtattaatctctgtagttgaaatgggaacactgagggctgagaaacttcaaagcttgaattttgaattgccatagaataagtatatttcatccagcccttctgggaaaaaagggatgtcatgatatacaaatactgcaatttctagtatttggaaattgctggttaatgactcagtttcttatgctgaaaagtttccttctgccttatggatcataaccaatgtgatgatcaggtgaagaacatctttgaagagatattgataaactttgtttgtgggacaaagactagtttctacagtcaaaatcaagtttgtattggataaaacttgtcttagtaccccaacttacagaaatgaaggtgttcaaaagttttagctttttttcagtatttacctccaaattgctaaataacatgcttatattactttattgatttttcagttttaggcgttatttattgcccttctctggcatataaggatttcatttcttccttttcctatccccaccattcgtgttcacccttctcatctccccaagtgtattaagctgttttggggttgctataaaaaaatacctgcagctgggtaatttacaaagaaaagtggtttattttggcttaccgttctgcagactgtacaggaagcatggtgttgctatctgcttctggtgaggcctcaggaaacttccaatcatgacagaaggcaaaggggaagccagcatatcccatgatgagagggagcaagagatgggggaggtgccacactcctttaagcaaccatatctgctgtgaactcagtgcaagaactcatgtatcacttcatgaagagcaccaagccattcctccccatgaccaccacctcccaccaggcacccccttcaacactggagattgcatttcaacatgagatctggaggggacaaacgttcaaaccatgtcgccatatttccaacttagttcaattataattttggttggctgcatagttcacaatagttgttttctctttctgcccaactttttattttccctatactaaatttgtcttattttttctttaataattcaatcacaaaagatgtttggatatattgggttgtctatcagttacttcttcccatcttctggagcctttgcctgctttaatctgaacgagttgccctcgaggaacatagttgtcatcttgggatctttcattaccatcctgtgtgttccctttaccttttttttttgtactggacatcctgtttcctgttttccatgtttcctgattttttcagtttacatcctcattttggttgagcacatcctccagcagtttttttttttttttttttgagttgaggcctcactctgttgcccaggctggagtgcagtggcatgattttggctcactgcagcctccaccaactgggttcaaacgattcttctgcctcaccctcccaagcagctgggattacaggcgtctgccaccacgcccagattatttgtgtttttagtggagacggggcttcaccatgttgcccaggctggtctcaaactcctgacctcagatgatccgcctgcctcggcctcccaaagtgctggggttataggcctgagccactgcacctggctgtccagtagttttttgagaaagggttcatggaaggtaaattcattgagaccttgcttgtctaaaaatgttttaaatctatcttcacatactctccataaagaattgtgggttagaaagcattttccagctgggtgcgatgactcatgcccataatcccagcactttgggaggctaaggtgggaggattgcttgaggccaggtgtttgagaccgccttttttttttttttttgagatggagtttcactctgtcacccgggctggagtgcagtggcgccatcttggctcactgcaacctgtgcctcccaggttcaagtgattctcatgtctcagcctcccaagtagctggaactacagccaggagccaccacgcctggctaattttttgtatttttagtagagacggggttttgcaatgttggcaaggctggtgcgagacccagtcgctacaaaaaaattaaaatattagttgggtgtgatggtgcacacacctgtaatcctagctacttgggaggctgaggcaggaggatcttttgccctgaggagtttgaggctgtagggagccatgattgtgtcactgcactccagcctgggtgacagtgtgagaccctgtctctaaaaataataataaaaagaaagcattttccttcagaattttgaagtttggttttctggtgttgttattgagaattcctaagcattctgatatatggtcctttacatatgacctgtctattctggaagcttagttcaatgtctgatatttcatgatgatatttattgagagtatccattctaattggccctttcaatacagaaagtcatgcccttcagttgtgaaaaaatttcttaaattgtttcattgaaggtctcccctctgtttttttgttctttctacaactgctatttagatactagaaatcctcttttcaattttcttgtctttttttttttttttttttttttttgagacaagttatcactctgtcactgaagctggagtgtagtggcatgatcatagctcactgcagcctcgacctcccaggctcaagtgatcctgcctcagcctcctgggtagctgggactataggtgcatgccagctcactcagctaatttttaaaattatctgtagagatggggtctccctatgttgtccaggcaggtcttgaattccaggcttgaagcaatcctctcagcttggcctcccaaagtgctgggattatagtggagccaccacacctggcccttatctttttattttattttattttactttattttatttttacacagagttttgctgttgttgcccaggctggagtgcagtgcaatggcgtgatctcagctcactgcaacctctgcctccgggttcaagcaattctcctgcctcagcctcccaagtagctgggattacaggcatatggcaccatgcccagctaattttcataattttttagtagagatggggtttcaccgtgtccgtcaggctggtcttgaactcctgacctcaagtgatccacctgcctcagcctcccaaagtgctgggaatacaggcatgagccaccgcgcctggccatcttttttattaagctgctaatttggggcgttttcctcaactcttccccagtcctttgagtattttatttctgttaaccatagtaaaaatatattttaaaaaattcttattccggtttcagaaagttctgtctttagttttttatctaagttttctagttttcttcctgtatcattccagtttcctccacgttgggttgcttttttttttttttttttttttttttttttcctgctttgtttggtctctggctttcctgttacaggctttcttgagatggcaggtgctgcttggttatctgctgaaaattcagagataattcaggataggagattaaaatgtccattggatgctccaagcatgtgaatagatgtgagccttactgtaggctatctgccctaggtggattagcaggggaggcccatgccattgtctgttaggtctttcttcttaggctagttgggtttcctgtggagggaaaaagaagagggctgggtctctgcaccttcagttagtacagttcactaagctgttttctgtggtggccctgctctcagctgtgcttgggatctgcagtccatagccctctgttacctctccaggaaccaaacatctagttagctttagggktttggggggagcagtcactccactgcagggtgggaatctaggcaatctgctgctttaacagactctttttttaattttattttattgattttatttatttatttattttttgagacagggtctccctgtgtttcccaggctggtctcaaactcctgggctcaagggatcctcctgtctcagcctcccaaagtgctaggattataggcgtgagccatcgtgcccagcctgctttaacagactttccgtccatctcattctagcatctcctttcatccctacttccagtggtacctgcgactgccagtcctgagccccctagtgtaatctggatggtttttgtttaatacggatggccagcttaggattcagttttctcaggtctgctaaaacattaagtatttattcatctgctgccactttaaaaattccatggtggttccctttttcttttttcccattcttttaggtttgtgcttaaaaacaaaaaataccaccgtcatgaacaaaacctctaccatcatttcagtgtggtttttgggagagagtgaaactataccctagtgttcaagccccatctttacccagaggtcattactctgtatttgaagaccaatcaaaagggagtgggcataaacaaaagggaagaaatgatccgttattagctattaggaaggaaaaaatagcaaggagaatgatgaattctctgtaaatgggaaaaaagcagtatgtaactctgaaaggttataagtgaaatttaactgggttatgggaatgggtagatacctattattctctggctatgtctgttaaaaaagaatttccttcgtgcattcaggttcacgca

SEQ ID NO: 95126 - DNA, 106274 bp, Homo sapiens
cagaaaggtataatacaagggacaaaatgtggcaagtttcaactcttctgccttgacatgcaaaccatcccttctgagctcacttccatgcaccatgcacagtggattccatgaacccacttccatgctaccatttttgtttttgtaatcatttgcaaagagacagaatgatattaagaaagtatcagtggctgggcacagtggtggctcacacctacaatcctagcactttgggaggtcaaggcaggtgcaacacttgaggtcaggagtttgagaccaggctggccaatatggtaaaaccctgtctctactaaaaatacaaaaattagctgggcttggtgacatagacctgtaattccagctactcaggaggctgaggcaggagagaattgcctgaaccagggaggcggaggttgtagtgagcagagatcacaccactgcactccagcctgggagacagagtgagactctgtctcaaaaaaaaaaaaaaaaaaaaaaaagtaagcatcagtgggcataatcctaatggcctgatccaacttttctccccctttgaacagcaccaggacaaatcgtaagagatttggggacaaacagacctggttgaaacctcaatatgtgaccctggagaagtatgccacctaacctcttcaagcccacaaaatgaggataagcccttccttttgtgtgtgctgtaaaaattgcatgaaatgtacccagtatatgagcaattgctcagcagtgtttggatatagggagtggatagctattattaattgcagattattttggaaggaaaaacacacagagaattatgtatctttcagtgcaaatgttagttctaaaaacaatcatattatttacaaagctgcagttatagaacacaattctgatttctgcctcacccccacggttaatactgtaaaacatttcctacgtttcatctgatagtgttattaaaaatagctgttatttttaatagctatactaaaacataaaaatgtttaggtcaggcgtggtggctcatgcatatcatcccaacaccttgggaggttgaggtgggaggattgcttgaggccaggagtttgggatcagcctgggcaatgtagtgaaacctcgtctttacaaaaattttctcaaaatattagccagttgtggtgtcatttgcctgtggtcccagctacttgggaggctgaggtgggaggatcactgaagcccaggaggttgaggctgcagtgagtcatgatcatgccacttaactccagcctggatgacagtgcaaggccctgcgtcagaaaaaaaaaaaaaaaattgtaaaaccatgagatcttgttggacactcatgtggtttccattcctgctttttataactaatgacgccaatcaaaaattttgtggccaggtgcagtggctcactcttgtaatcccagcactttgggaggctgaggcaggcagatcgcctgaggtcaggagttcaagaccagccttgccaacatggtgaaaccctgtctttactataaatacaaaaattactcgagcatggtggtgcatgcctataatcccagctacttgggaagctgaggcaggagaattgcttgagcccgggaggcggaggttgcagtgagccgagatctccccactgcactacagcctgggtgacagagcaagacactgtctcaaaaaaaaaaaaatttgtttcagtaagagtcctttcattgaagtattcctgttggaaaaggctctgtaaatgaggtgattgcttcaaatatatctttagtgttttgggtacataaagcgtggccatcagtaatacatatactaatttcaaggccagcagcaaggtgggtgaggattcattcatctccactgctgacattgaaaacattgaatagtgtcaactgaataggcataaaatggtgtctatgttttcatcaacttgtcattctttgattgctagtaagagtaatcttttattgtatcattttatgtgtttattatttctatttacttatctgcctcttctactgccttttcattcaaataagccattcctagtgagtctggatggggaatataagttgtctctctgtagatcaaaagtttcaaagtttatattttgttccagaaagctatgatgttttgtatgtctttcgggagtgcagtctttgtattaatagcttggtgactcttctaacattaaaattaattcagcttgacagacttattttaccctgaagggtttgcttccaggtagctgtcaattataaagctcctatgactttgtattatttaaacatgaatataactttaaagcctaattatagagtcaatagtaatggggtaaaaatgaggccattgtccctaacaactaaggatgacgcttgaacgtaaaaataaccagggttttctcctggtaactttcattatttactataaaagtacattgtggattgaggccgagtctccaaaataaacatctggggaaatgacagcattcttatcctatgggaaccagccccagtcttttatttactttttttttccttcattttctagacaaaagaatggcagccccaccctgccttcattttaagcacatttttctggctgccaccaccctagttcaggcctgtatttctttcttttttttttttttttttgagacagtctcactctgtcacccaggctggagtggtgccatcttggctcactgcaacctctacctcccgggttcaagcgattctcctgcctcagcctcccaagtagctgggactacaggcacacaccaccatgcctggctaatttttgtatttttagtagagatggggtttcactgtcttggccaggctggtctcaaactccggacctcaggcagtcagcccaccttggcctctcaaaatgttaggattacaggtgtgagccaccgcgttcggcccaggcctgtatttcttcttgctgtggctagattcatgcactgagtgttgttgctgagtgtgatggtggaggtaataaggtagaaccacttggtgttccaggtgaagaaactgtgacaaggagatgctgtttccagggtgacttttgaacagtctccctcccaggctctcaccttcccagtcacccttccccctgtcagatgagtgctgtgcagatcagatttctttcctttgcagacaccttccatgggccctctaactccctggaataaagccttctcaaggctgcatgagctgccttacttttggaggtgactccaaaactacctttccccagctctgctctttcccccagatctcccacctgcgccggtgctgggcctttccattgcattttcctgcctctgaggtttttttagttccttaatatctctctcccacccaccccaagttcttgctcacctctgtgactcccaggttgcccagctcaaaaaccgtctaggaaataatgattgctctcacttcactcttcagcggcatacattgggaagcattttacattttagaattcactggtgtaggatagatctgcctgtagacctcaaagtttgatattttttgcttgtcaaattcttcctttgcttagggttttcttgtgactaatgatgttgttagtaggtgtggggaagggagggaagtaggtgatgttgggagtggagagcaggctctgatgcttcctgggcagagcttgaattccaatctgaatctacgatgcgttcactgtaccacagagagcacagagctgggatatgtgtggaaagggcctgaatagctaggagctaaatcaccctgggcaagctttgaaaccacctcagttttttcattagtaagaaggtaatgacattgcctggcgacatgcctcagcataattccatgacaattgcatgagacaatctgtatgaaaaatcctttgtcctggaaggggctgccttttatggataagaagaaatataatattactaggaaatgctgtgagcccatggcaatgctggactaagaaatcctttgaaccttagccaggggaatgaaaaagctgctcatctctgaaatgtcaaggttttgagatttcccctgtaccttttctaatgaccgcattgaagttgtacagaatgaaacaagaaccagtctgttttgtttttttttttttatagagatggggtcttgctctgtcacctagcctgaagttaagtggcaagatcctaactcactgcagccttgagctcctgggctcaagcgatccttctgcctcagcctcccaagtagctgggactacaggtgcccagctaattctttaaattattatttgtagagatggggtcttgccatattgcccagactcgtcttgaactcctggcctcaaatgatcctcctgcctcagcttcccaaagtgctgggattacaggtgtgagccaccacacccaggcagccaatcttcctttgtgagaaagggctctggggcggattttctgaggaatagggggtgaagctgtggactcagagaagccttttctatcatatgtaaagatcctggctgaattgtccccaccacagtgatactgttgataccttagttttatgttatttatcccaggcttctagattttttaggtcctgccttgggaggaaataaaaaatgtaatcctgttcctgctgggaactgtaattacgctgtttctataacagtataaagtttaaatttaatgcagatcttagatacattttattactattgcttcatgagattctttatctaattacaactgtcatcaagtttgtcattttactttcaagaatactgagcattggccaggcgtggtggctcatgcctataatcccagcactttgggaggccgaggtgggtggatcacttgaggttaggagttcaagaccagcctggccaacaaggtaaaaccctgtctctactaaaaatacaaaaattagccaggtgtggtggcatgcacttgtagtcccagctactggaaaggctgaggcaggagaatcatttgaacctgggaggcagaggttgcagtgagctgagatcacaccactagactccagcctgggtgacagagtgagactctgtctcaaataagtaaataaaagaatactgggcagactccaaacagggtgtggcatgtgtctggactaactaggaaaatagagaagatttctgctaccttttagatgggggctctttggaataacttggaaataatagtggctacattgagtgcctgaccctagaattactgcttgtgactaatggtatgtgtattggttgtcgattgctgtgtaacaagctactccaaaacttaacagcttaaaccaacacgcatttattatctcacagtttccatgaatcaagtgtctgagcacagcttaactgggttctccgtattaggatttctcacaaggctacaattaaggtgccagcccagctgatgtctcatctgaaggcaggactgaggaaggatctgctttcaagttcatgtagtgattgcaaaattcactgcattccttaagggctattggactgagggctccagtccctgctggctgttggtcaatgctaacttcacatcttgccatgtgagcctctccatagggcagctgcttcaccaaagcaaggaaggggaaagagttggctggcaacaagaagtcatggttttttataacctaatcatggaagtgacatcccattacctgcgccatattctattggttagaagcaaggttcaagctgggcacagtggctcatgcctgtaatcccagcacttggggaggccaaggtgggtggatcccaagatcagaagttcaagaccagcctggccagcatggtgaaaccctgtctctactaaaaatacaaaaaattagcctggcatggtggtgcatgcctgtaatccccgtgacttgggaggctgaggcaggagaattgcttgaaccagggaagtggaggttgcagtgagccaagatcgcgccactgtactccagcctgggcaacagagcaagactccatctcaaaaaataaagcagcaaggttcaggaactcaggcttattttaaaaaaaagaaaatgaagaagaagaaagaaggaaaaggggctggatayggtagctcatgcctgtaatcccagtattttgtgaggccaaggagggaggattgcttgacctcaggagttcaagagcatcctgagcaaactagcaagacctcatctctactaaaaaccaaaaaaattagctgggtgtgatggtgcacacctttagtctcagctacttaggaggctgaggcaggaggatcacttgagcctgggagattgaggctgcagtgagcttgatcaccccagtgtactccagcctaggtgacagagcaagaacttgaatcaacaaccaaaaaaaaaaaaaaaaaggaagaaaaaagaagcaaaccacctcatgtgtatgccacactcacaggaaattaaagatgtgaacaccaaaaggtgggatcactgggggccatcttagagtagtaatttatatttagtatggaacatataataagaaacacgtatagcatagaacatatagaaatataattcatacttattatatattacgatatgttaaatattttacagcattgtctttaataataataataaacaaaatgaggaaaaacagatttcggaaatagtctttcttcttgtgaactttaaaagccattaaaaaaaaatgatgaaggaccaggcgtggtggcttacacctgtaatctcagcatcttaggaggctgagacaggataattgctttaacccaggagacgaaggttgcagtgagctgagatcgcgccattgaactccagtctgggcaacaagagcaaaactccatctcaaaacaaacaaacaaacaaaacaaaaaacaaaactaccatagccggtatgtcagtaatgagtaagggtgcattctaataaaactttatctaaaaaaataggtagtgggccgaatttggcccatgggctgcaatttgccaattcttgtctagactataagcctcctaagtacagaaacaaacgagcctcctatatgccagactctggtaggtgctagtgatggacaagaaagattggtcctcacctttgatatcttcagtaccctactagagggctggtttggttttgcgtacatggtaaaatcttggacaatggtttttggatggcctcaaatgactcagactcctaaaaagtttcatcttgtatgacttctgaccttaactgttgctgttttctcccatcattgccctcaatctttcatccctagtccaatgactttgtgaatctgttaccatgtggtaggtgtgacctgtgtaaaggtggtaaagaactttggtgtaagacaactctctgagcccttgaagactttattgaaagttgatttgctctttccccagatctttcagtgtcaactgtgtagtaggcactgagtattcacagaccaatctgttcttgtagagtttatggtctggtgggaaaggcagataaatgaaagcaaatgcatgtttacaaatcatgataagtgttaggaaggaaacagaaatgtaggtgctcaagggggccagtggtagcaggaagaggagggcagaatcctgctcaataccatgagtggaagaggacactgaagttgagacctaacgaataagaaattggccaggcatggtggctcatgcctgtaatcctagcactttgggaggccaaggtgagcggatcacctgaggtcagaagttcgagaccagcctgaccaacaaggagaaaccctgtctctactgaaaatacaaaaaaattagctgagtgtcatggcgggcacctgtaatcccagctacttgagaggctgaggcaggagaatcgcttgaaccagggaggtggaggttgcagtgagctgagatcatgccactgcactctagcctgggcaacagagcgaaactgagtctaaaaaataataaaaataaaatacacaagtcctattggattagggccccatctgatgaccttatttaaccttaactacctccttaaaggacctctctccatgtagtcacattgaggggtgttatggcttcaacatatgacttcgggggccataattcaatccataacacccaggaagggtgtaagcaggagaatggcatgcctttggtggtcatgtggaagttaattgtggaaagtctagttagagggatctcgcagcatttccagggagagatgatggtggccatggagatagagaggaggtgatgaattggaggagtatttgaggcaaaaacgactggctttactgttttatggctttattttattttattttatttatttatttattggaggcagagtttcgctcttgttgcccaggctggagtgcaatggcgcgatctcagctcactgcagcctcctgggttcaagcaattctcctgcctcagcctcccgaatagctgggattacaggcatgtgccaccatgcccagctaatttttttgtattattaatagggacggagtttcaccatgttggcaggctggtcttgaactcttgacctcagttgatccacccgcctcggtcttccaaagtgctgggattacaggcgtgagccaccgcatccggtctgtttcctagctttaatagttgacttatctgtattcttcgaaactctggcagtcagtcagtagctctgttccctgtgcctagtgtagtactctgcaccttgcaggtgtttactggatgctgagtaaatgcacacctgtctgcagtgtcctggagtggtggtcagagacattatgaagtttccaaatccataccatacacagcacctgaccttagggatcattatttagatctgggaaaatcttccttatgtcatttagggcttcaaacaagtgatttctccctgtttttttttctttggtacactaaaatgacagagccaaattcctcccgtgtgtgtctgygtttcacacacatgcacactgcagagaagtygagttgaggacatttcttcactctcagcggagagctccctgctcctgstttctcactgagactgtgcagattgtgtgggtggcgagttggttgtgcaaggccttgcttgctttgagtcacggacatgtgggttgtcaaatccattcctccgtgcttgcttcctctctcaacctcaaagggctggagacagtcttaatatccagatgcctggcagtttggaagcaatgatgaaaaggataacttacaaaatgtttgtataaatgcacttaatgccacagaaccctacacttgaaaagggctaaaaggaagctgaggtgggaggattgcttggggcccggagtttgagaccagcctgaggaacatagggagagcctatctcttttaaaaaaaaaagaaagaaaagaaagaaaaaaaaagccaggcatggtggctyrtgcttctagtcctagttactagggaggctggggagcagggtaggaggattgctggagccctcagatttgagagtgtagtgagctaggatcatgccactgcactgcagcctcggtggcagagtgaaaccatgtctcaggaaacaaacartggtttgtgtcatctgagatgcaaaaaaawaataacaataataagagaaagaaaaccaaccaacaaacaaaaagttaaaattctccaatggtacagctttaagaaattaaaaaaaaataaaagtagggagaaacaaagcctggcgtggtggctcatgcttgtaatcccagcactttgggaggctgaggcaggtagattacttgagcccagaagtttgagaccagcctaggcaatatggcaaaaccctgtctcttctaaaaacacaaaaattagtcggatgtagtggcttatacctatagtctcaactactcaggaggctgaggtgggagaattgcttgagcccaggaggctgcaatgagaaaaacaaaacaaaatggctaaaatggtaaattttatgtacatatattttacaacaataaaaaatgtttccatatagtaccttcacagtcaccttgatacatatatatataacaaggctgtagtaaccaaaacataatatggrctaaaaacagacacataaaccaatggaacagaatagggaacccagaaataaatccccacatgctaaagaatgaaactgggcccctgtctctcaccatacacaaaagtcaactcaagatggattaaagacttaaatgggaccacacctataatcctagcactttgggagcccaagcctggaggatcacttgacccaggaattcaagaccagtctggacaatgcagtgagatcccatygctacaaaaaaaaaaaaaaaataggcatggtggcatgcactggtagtcccagttacttgggatgctgaggtaggaagattccttgagcccaagagttcaatgctgcaatgagctatgatygtcctactacaccctagcctgagtgacagagtgaaaccctyctctcaaaaaaaaaaaaaaaaaaaaaactartaaaactttatactagaagaaaacatagggaaaatgttttaggacattggtctaggcaaagattttatggctaagacctcaaaagcacaggcaacaacaacaacaaaaatagacaaataggactatattaaactaaaaagcttctactcagcaagggaagcaatcaacagtgtttcctgctgaataggagaaaatatttgcaaaccattcatctaactaaggactagtatccagaaatatacaaggaactcaaacaactcaaaaacaaataatccctgcagccataaaaaagaatgagatcgtggtctttccatggacatggatgaagctggaagccatctttctcagcaaactaacacaggaacagaaaactaaacaccacatgttctcactcataaacaggagctgaacaatgagaacacatgaacacagggaggggaacatcacacactggggcctgttgggggtgggggtggggggggcaaggaatgggagagtattaggacaaatacctaatgcatgcagggcttaaaacctagatgacgggttgatgggtgcagcaaaccaccatggcacatgtatacctatgtaacaaacctgcatgttctgcacatgtatcctagaacttaaagtaaaataaaataaagacttagtagggaaatttagatttaacatggtgatgycaatttagtggaaaagatgacttttaaaaaatttggctccatttaataaaaaataattttaaaatagtataaaccatgaaagtatacgtactgccaggaaagtataaatataaccrgggaaktataagtataaccaatgaaagtataagtactgccagtgttaccaggggtccttgctccgagagctcccaagatggtggtgggccacttccaaaatggcggcaggccacttccaagatggtggcaagcctcgtgttctctgacctggggttcttggcctcacggattcgaaggaatggaatcttgggccgtgcggtgagtgttatagctctattagaagtcgtgggtcacggaagagaaccgtggaacccagtgactagtgttcagcttgattaggacgaaaccaggcacttagccatgcaggaacaatggcaagcctttagcgcgatcaggagtggcaacgggtgcttccctggatcaggagcacagcgggcgccctgctggattggagggatggaagtcagcggcgggtctgcgacggcagcaaaacagcagtggtggacggcgagcgaaagctcagttctagcggtaaccagaagggtgcagctgcaagatttaatagagtgaaatagagtgaaaacagagctcccatacaaggaggggacccaaagggggttgcccttgctggctccaatgcctgggtttatatcccgatccttgtccctcatcaggcaatagatgagttcatcaggcaatagatgattggctatttctttacctcctgtttttgcctaattagcatttagtgagctctctgattggtcaggtgtgagctcagttgcaagcctcctgtttaaaggtggatgcagtcaccttcccagctagacttagggattcatagtcggcctaggaaatccagctagccctgtctctcaccaggaatgcttgtgcttgctactgaaaagctaaggccagaggtaaagactatggatttggggaatgaatattctgtgaagccataagataatggcctgaggtgctgaggaccagtagtgctaggaactttgcatccatgactatagggctctttagaactgtgccacagtacagcatcatgcagtagaatctaagttgttctttgtaataatgaatgccagcaatattttaaaataataataataccattaaaaagtgggcaaaggacatgaatagacatttttcaaaaggaaacatacaaatcgccaagaagtatatgaaaaattaacagttaatgttcattgaatacttattgcaggctaggtactgagttgagcattttgcatgcatcatctcacttaaaataatgtatgtcccagcctggccaacatggtgaaaccccatctctactaaaaatacaaaaattagccagacatggtggtacatgcctgtaatcccagctactcaggaggctgaggcaggagaattgcttgaacctgggaggcagaggttgcagtgagccgagattgcaccactgcactctagcctgggtgacagagcgatactctgtctcaaaagataataataataaaataatgtatgtcaattgttgaaattttggaaaatgaacaagtgtgtgtgtgaataactgggtgtattctatacatatggctttataacttacctattaacttaaggtcattaatgcaatgtcatcaaatactcttcggatcayctagattgttgcacattatcctataatatgagatgccacaatttatttacacagtcgacaattgtaacccagcttgcttttggcttttactgttttacataatacttggtaaaaatcctcatataaatatttgaaaatttctccatttgtgaatgtaaaaattattttagagatctaagatttggtgcaaaacttgcaatcagctacatagttctacttgaggcaattttcactcaaaatatatcataaaccatagtacaaaaatagagcatagacctctccttgtgaagcagttgtttttgccttacatttttttttttttttttttgagatggagtctcgctctgtcgcccrggctggagtgcagtggcgcaatctcggctcactgcaagctccgcctcctgggttcacgccattctcctgcctcagcctcccgagcagctgggactacaggtgcccgctaccacgtctggctaattttttatatttttagtagaaacggggtttcactgtgttagccaggatggtctcgatctcctgacctcgtgatccgcccacctcggcctcccaaagtgctgggattacaggtgtgarccaccgtgcgtggctgccttaaatttttaataatcattgtgcaaattatttagcactccagtgttttgatttttctcctctgctgggtaggaataacaataatactgttattcaccatggtggtgtgggaagtttcaaagagcacatgtctataaagtgcttagtgcaaggcttggcatgcagttaacacaaaataaatgcgagctgctgtcattaacaatactgactacacggcactgtgatgcttatgtaaatgccaggctgtgtgtctgtaacctgaggtatttgtgtaaatattttcctaaaataaatctaactaaggttgttcttctcacttgtatggggtcatcttatgcggtagatgctcaaacacaaattccagatacagagtgggcagtggtagttaggaagatagaaaggctagggagtgttcctgggaagtcagtaaacttggaagatctaaggttatattaaaaatgttgtatcagaacaaaggctcaggacgttagtgttagcagaaaccagatatcttagagcagtggtttgtcaactttgccagcaatccacagtaagaaattcaactccggccgggcgcggtggctcacgcctgtaatcccagcactttgggaagccgaggcgggtggatgacttgaggtcaggagttcgagaccatcctggctaacacagtgaaaccccgtctctactaaaaatacaaaaattagccgggcgtggtggtgtgtgcctgtaatcccagctacttgggaggttgaggcaggagaatcacttgaacacaggaggcggaggtgacagtgagccgagatcatgccattgcactccagcctgggtgacagagggagactctatctcaaaaaaagaaaaaaaagaaattcaactccactaacacccacaatgcaaataaaygtgtgaatgtrtacaactattttatcaagcagtacttattatatgtgctgtaatctgatattttatagcctgtttcattttattttaatgttgattgttacccactaaatttatttcattgagaccccctaatttgaaatattgccttgaatatatatatacatatatatacacatatatatacatatatacacatatatacacatatatacatatatacacatatatacatatatacacatatatatacatatatacacatatatacatatatacacatatatacatatatacacatatatacatatatacatatatatacatatatacacatatatacacatatatacatatatatacacatatatatacatatatacatatatatacacacatacatatatatatatacccttgtttaaaaataaaaggtttgcagctccatattttttaaaaaaatcttacccaagcatttaatcagtactgaatggttttgttcttgtyttcatgtcaagttgaatttgggggtactattccagaatatttacatgttagacaatgttctgtaaaaggggcattgtagcagcatgcaggcagtattcaaccaaaaactgggcaagagtcataattcactctggtttctctttccttttaagcaggtagttccaatttgccagcagaatgagtacagaaagagactcagaaacgacatttgacgaggattctcagcctaatgacgaagtggttccctacagtgatgatgaaacagaagatgaacttgatgaccaggggtctgctgttgaaccagaacaaaaccgagtcaacagggaagcagaggagaaccgggagccattcagaaaaggtaaccacatgaagtcccggtgactaggtcgcttataaatcctcatgtgggtcatggccacacgtgccaaagatgatcggtctattttgcgtggtctaggagrgaatcttctctgatctcttcttaggatgcgactgacagaatggtggatgggcttggacaagtacccattgtccttagtaagaagggctgggagagcatatctgacaagttctgcagagaaaatacattaaggtctttgttagtgtgtgtgtgtatatatatatatatatatatatattttgaggcagggtctcactgtgtctccccagctggagtccagtggtgtgaactcggctcactgcagccttgacctcctggactcaagtgatcctcctacctcagcctcctgagtagctggactacaggcatgcaccagtatgtccaactaatttttgtatttgtgtgtgtgtttgtgtgtgtagatggtatttcactatgttgcccaggctggtctcaaactcctgagctcaagggatctgcccacctcaacctctcaaactcctggaattacaggcatgagctacgatgcgtagccagtgtatatattcttaaaatggagttatgcgggcaagaatctgcatgttactgcacccagaaatttttaaaggatacatatcaatcagtcttagatgttaactattagtattgttaaattggcggtatgagttatataaataaccatccttgtgtatgtgtgtgtgtgtgtatatatatatatrtatatggtctgcccagggtcaggccagcatcagaggcagggtctagaccaaggccagcaaactttttctgtaaagggccagcaagtaaacattttaggctttgtggaccacgtggtctctgccaatgttgagtgtaagtgaccgcagacagtacatcactgarggcagtagaacatggcttgcttttaccatgatgccttttcttttgtggcttttctatttcatctcctgctggttctcccaccctggcaaacagatgtgggcttctcttgtagctcttctccatgagcaagctgagacttttctctctggaccccagatttgatatcaggctgaaaatatttcctccatggtgttccstaaaattctagccgaacaaccttagcatcacattcacagaaatcatcatagtgttctggtttcagcgctccagacacgcctccctgcagccttagtcagagaagcctcggattttagctggttttcccgaggtctctgttactgccattctgcccttgmaggctttctagaagcctctttttcccccatgccaaaccccccctctagtttctctttcttgggttctgctatctggatgagctatttttttctaataattttaacctgtagaagatgtgatatgcatgaaatcccrtttctgcaatgattcttcctgttctggtcacagaatctgcctgtggggagattctcagtgtggggagtgcatgcaccccgsgagccccatctcacccaaatgtggggaggccattgactcctgtatgttgtgtgtccgctacctttccatagcaaacatttagatggattacctcttagagtgggtttctggttttgatttcaagctgttgaggattgagcttaagtgccttctgccttgaatcagaaggtactaaactcatgatacttgaccaaaattaaagtgaaattcctgccgggcacagtggctcaygcctgcaatcccagcactttgggagactgaggtgrgtggatcacctgaggtcaggagttcragaccagccagaccaacatggtgaaaccccctctctactaaaaatacaaaaattagccaggcgtggtggcaagtgcctgtagtcccagctayttgggaggctgaggcaggagaatcactagaacccggcaggcagaggtggcagtgagctgagatggtgccattgcactccagcctgggcaacaagagtgaaactccaactcaaaaaaaaaaaaaaaaaagaaagaaagaaaatggaattcccaccaatctgaacaggaaggtggcctctgtcataacaggtccagactggatattggtgaactagctaaagctgaagcagccagacaagttacaaggaagttctagttgattgcccaaacagtgaataaaacatgcttcttcctcattcctttccccgctaattgcactgcttagtctcctatcacaattttggaatctctaccaaatgtagatatctgatggggtggcaggagaattggctccatggggtccagggtcaactttgctcttggtgcttggtggcacgccatcagaygtgtagtccgagacacagcaaagggaccgggattgggtgcctgcagaaatgtcagagacgcatgtagtgggtggaaactctcatcccctgtttttttacaactctgcctgcccattctggtggttaggatcctttcctgatcattcagtttgcaggtcataygttttgtagatttctaccctcggtatatgggcattaaaagagctcagtcttggccgggtgcggtgactcatgcctgtaatcccagcactttgggaggccaaggaagttgaatcrcctgaggtcaggagttcgagaccagcctggccaacatagtgaaaccccatctctattaaaaatacaaaaattagcccggcatggtggtgcacacctataatcccagctactcgggaggctgaggcaggagaatcgcttgaacctgggaaatggaggttgcagtgaaccaagatcccaccactacacgccatcctgggtgacaaagtgagactccatctcaaaaaaaaaaaaaaaatgctcagtcttgaatcttagtcatgttttccaagggtgatttatattcctaggggatttgggtggttctcgcttctcaaaacccatatcaaatgactttgcctgtgactttttacaaaaattcttattctaatacctctctgcgcccttcccaagcacacagatgatgttcagtaaatgccagacctctttcctcccatttcccatgtgccctgcctccctcacagccagtctgctctccttctttcctcccttcctctctttgccctcttcatccctctttcctttcccactatattctcatttgtgcaatttcccagttaaggtcagtgtcaccctgacttctctttctttttttaatcatcatctgtctttcttgacatttcacatcctgaataatttccttcagagaatcagttctttaagacatcagaacatgagtcaccctgcgaggtaccaccagactaacaccagggaccagcacccattctagcaaaacactgcctaagcagcctgaactgcgctagtttctttaatgagggttgtagcacagaaagttgctttcttttttttttaaagaaaggaaatcctctagcccaactaagctttcctgttaaacaagtgctttgagagacccattcagagtacttttcactagaaggacctttattgtgttttgtgagaaggaaggacaggcacaaacatgctgttagaatgtgccatggagaaagataagcccacaggttcgagtggagtaactttaccctttgtgtaaagattcagcaaagattctcagaaatgagcgggaatgttttcagtgctatgggatgagctctgtcgtttcctgatgaacacacttctcagcatgtgttctgggaaacactagtttttgtatttttggagttttcttgttgtttgtttgtttgtttttgttttgagatggagtctctctctgtcgcccagactggagagcagaggcgcgatatcggctcactgcaaccccgctcctgggttcaagcgattctcctgcctcagcctcccaagtagctgggattacaggcgtatgctaccacgcctggctaatttttgtatttttagtagagacagagtttcaccatgttggccaggatggtctcgatctcctgaacttgtgatccaccagcctcagcctcccaaagtgctgggattataggcgtgagctaccacacccggccttaaagtgatatcttcataaaataatctggaattaagaatgtggggtctttagcgcatctatgaattaatatttagttggaaccaaaacacagataaagatggctcattgaaacgtatcaatcgtaggatatcctagggaatctgtgaaaagtgctgagggagctgttccacttaataagatgaattttccattttcggcacataccacatatgggagtctactctggctacttattttctttctttctctgatcggttgtaaattaccatccacctccacagcctaaaaacaccagagtaattgatgcttgtaaagccgcagggtgaggggtattcctgcactgagtgattactgatggggaagggtggtgatactgtgccatctcattttattttattctttttatttatttgtttatttatttatttgacagaatctcgctcttgttgcccaggctggagtgaagtggcgtgatctcagctcactgcaacctccgcctcccgggttcaagtgattctcctgcctcagcctcccgagtagctgggattaccggcgcccgccatcacgcccagctaatttttgtatttttagtaaggacggaattttgccatgttggccaggcttgtcttgaactcctgacctaaggtgattcgcccaccctggcctcccaaagtgctgggattacaggcatgaaccactgtgcccggcctattctatttatttttaagatcttgggcaacatgctcattttagagaatttgctttcaagtcatgtaatttatgattgaaccttgggtaagaatctcttgctcatggaaacctaactcagctggkggttttcttcctgctactttgcagcccaagttcagaagtagatttttaatgatagaagtcaccataggaagacactctcctttgcactaactgggggttctcagtcctgcctgtacatcagaacctcttgtggaatttttacaaactctctaggtgcctggacccagcccctgaagatacagagtggttctgggatgaggcaaggggaagaatctatcatttaaaatgaattcagtggcctgaatattttctcccattctgttgtctctttactttgttgattgtttcctttgctttacagaagctttttaacttgtgatctcatttgtccgtttttgctttggttgcctgtgcttgtgaagtattactcaagaaatctttgcccagtttagtgtcctggagagtttcccaagtggtttttttgttgttgttgtttgtttttgtttgaggcagagtcttgctctgtcaccaggctgaagtgcagtggcacratcttggctcactgcaacctcaacttcttgagttcaagcaattcccttgcctcagcctcccgagtagctgggactacaggtatgtaccaccatgctcggctaactttttgtattttagtagagacagggtttcaccatgttggccaggatggtctccatctcttgaccttgtgatccacccaccttggcttcccaaagtgctggaattacaggcgtgagccaccatgctcagacttccccagggttttcttggagtagtttcatagtttgaggtcttagatttaagtctgtaatccattttgattcaatttttgcatatgacaagagatggggtctactttcattcatctacatataaatatgcagtttttccttgcatcatttattgaagagactgcctttccccaatgtatgttcttggcacctttgttgaaaacaagtttactaaggatgtatgaatttatctctgagttctcttttctgttccattgatctgtgtgtctgtttttatgccaataccacgttgttttggttattatagctctgtcatataatttgaagtcaggtagtgtgattcctacagttctgttcttttggcttagattagctgtggcttttctgggtcttctgtggttcccatacaaattttaggattttttttctatttctgtgaagacagtcattggtattttcatagagattgcattgaatctgtagattgctttgggcagtgtggacattttaacaatattccaatccatgagcatggaatatcattccatttttctggtgtcctctttagtttcttgcatcattgcaatcaatttatagttttgattgcagagatcttttacttctttggtaaacttaattcttagctattttattcatagctattataaatgggattattttttttcttttttttttattatactttaagttttagggtacatgtgcacattgtgcaggttagttacatatgtatacatgtgccatgctggtgcgctgcacccactaactcatcatctagcattaggtatatctcccaatgctatccctcccccctccccccaccccaccacagtccccagagtgtgatattccccttcctgtgtccatgtgatctcrttgttcaattcccacctatgagtgagaatatgcggtgtttggttttttgttcttgcgatagtttactgagaatgatgatttccaatttcatccatgtccctacaaaggacatgaactcatccttttttatggctgcatagtattccatggtgtatatgtgccacattttcttaatccagtctatcattgttggacatttgggttggttccaagtctttgctattgtgaataatgccgcaataaacatacgtgtgcatgtgtctttatagcagcatgatttatagtcatttgggtgtatacccagtaatgggatggctgggtcaaatggtatttctagttctagatccctgaggaatcgccacactgacttccacaatggttgaactagtttacagtcccaccaacagtgtaaaagtgttcctatttctccacatcctctccagcacctgttgtttcctggctttttaatgattgccattctaactggtgtgagatggtatctcacagtggttttgatttgcatttctctgatggccagtgatgatgagcattttttcatgtgttttttggctgcataaatgtcttcttttgattagtgtctgttcatgtscttcgcccactttttgatggggttgtttgtttttttcttgtaaatttgtttgagttcattgtagattctggatattagccctttgtcagatgagtaggttgcgaaaattttctcccattttgtaggttgcctgttcactctgatggtagtttcttttgctgtgcagaagctctttagtttaattagatcccatttgtcaattttgtcttttgttgccattgcttttggtgttttggacatgaagtccttgcccatgcctatgtcctgaatggtaatgcctaggttttcttctagggtttttatggttttaggtctaacgtttaaatctttaatccatcttgaattgatttttgtataaggtgtagggaagggatccagtttcagtttcctacatatggctagccagttttcccagcaccatttattaaatagggaatcctttccccattgcttgtttttctcaggtttgtcaaagrtcagatagttctaggtatgcggcattatttctgagggctctgttctgttccattgatctatatttctgttttggtaccagtaccatgctgttttggttactgtagccttgtagtatagtttgaagtcaggtagtgtgatgcctccagctttgttcttttggcttaggattgacttggcaatccgggctcttttttggttccatatgaactttaaagtagttttttccaattctgtgaagaaagtcattggtagcttgatggggatggcattgaatctgtaaattaccttgggcagtatggccattttcacgatattgattcttcctacccatgagcatggaatgttcttccatttgtttgtatcctcttttatttccttgagcagtggtttgtagttctccttgaagaggtccttcacatcccttgtaagttggattcctaggtattttattctctttgaagcaattgtgaatgggagttcactcatgatttggctctctgtttgtctgttgttggtgtataagaatgcttgtgatttttgtacattgattttgtatcctgagactttgctgaagttgcttatcagcttaaggagattttgggctgagacaatggggttttctagatatacaatcatgtcatctgcaaacagagacaatttgacttcctcttttcctaactgaataccctttatttccttctcctgcctaattgccckggccagaacttccaacactatgttgaataggagtggtgagagagggcatccctgacttgtgccagttttcaaagggaatgcttccagtttttccccattcagtatgatattggctgtgggtttgtcatagatagctcttattattttgaaatacgtcccatcaatacctaatttactgagagtttttagcatgaagggttgttgaattttgtcaaaggctttttctgcatctattgagataatcatgtggtttttgtctttggctctgtttatatgctggattacatttatcgatttgcgtatattgaaccagccttgcatcccagggatgaagcccacttgatcatggtggataagctttttgatgtgttgctggattcggtttgccagtattttattgaggatttttgcattcaatgttcatcaaggatattggtctaaaattctcttttttggttgtgtctctgcccggctttggtatcagaatgatgctggcctcataaaatgagttagggaggattccctctttttctattgattggaatagtttcagaaggaatggtaccagttcctccttgtacctctggtagaattcggctgtgaatccatctggtcctggactctttttggttggtaaactattgattattgccacaatttcagmtcctgttattggtctattcagagattcaacttcttcctggtttagtcttgggagagtgtatgtgtccaggaatttatccatttcttctagattttctagtttatttgcgtagaggtgtttgtagtattctctgatggtagtttgtatttctgtgggatcggtggtgatatcccctttatcattttttattgtgtctatttgattcttctctctttttttctttattaatcttgctagcggtctatcaattttgttgatcctttcaaaaaaccagctcctggattcactgattttttgaagggttttttgtgtctctatttccttcagttctgctctgattttagttatttcttgccttctgctaacttttgaatgtgtttgctcttgcttttctacttcttttaattgtgatgttagggtgtcaattttggatctttcctgctttctcttgtgggcatttagtgctataaatttccctctacacactgctttgaatgcgtcccagagattctggtatgttgtgtctttgctctcgttggtttcaaagaacatctttatttctgccttcatttcgttatgtacccagtagtcattcaggagcaggttgttcagtttccacgtagttgagcggctttgagtgagattcttaatcctgagttctagtttgattgcactgtggtctgagagatagtttgttataatttctgttcttttacatttgctgaggagagctttacttccaactatgtggtcaattttggaataggtgtggtgtggtgctgaaaaaaatgtatattctgttgatttggggtggagagttctgtagatgtctattaggtccgcttggtgcagagctgagttcaattcctgggtatccttgttgactttctgtctcgttgatctgtctaatgttgacagtggggtgttaaagtctcccattattaatgtgtgggagtctaagtctctttgtaggtcactcaggatttgctttatgaatctgggtgctcctgtattgggtgcatatatatttaggagagttagctcttcttgtcgaattgatccctttaccattatgtaatggccttctttgtctcttttgatctttgttggtttaaagtctgttttatcagagactaggattgcaacccctgcctttttttgttttccatttgcttggtagatcttcctccatccttttattttgagcctgtgtgtgtctctgcacgtgagatgggtttcctgaatacagcacactgatgggtcttgactctttatccaatttgccagtctgtgtcttttaattggagaatttagtccatttacatttaaagtgaatattgttatgtgtgaatttgatcctgtcattatgatgttagctggtgattttgctcgttagttgatgcagtttcttcctagtctcaatggtctttacattttggcatgattttgcagcggctggtaccggttgttcctttccatgtttagtgcttccttcaggagctcttttagggcaggcctggtggtgacaaaatctctcagcatttgcttgtctgtaaagtatttgatttctccttcacttatgaagcttagtttggctggatatgaaattctgggttgaaaattcttttctttaagaatgttgaatactggcccccactctcttctggcttgtagggtttctgccgagagatccgctgttagtctgatgggcttccctttgagggtaacccaacctttctctctgggtgcccttaacattttttctttcatttcaactttggtgaatctgacaattatgtgtcttggagttgctcttctcgaggagtatctttgtggcgttctctgtatttcctgaatctgaacgttggcctgccttgctagattggggaagttctcctggataatatcctgcagagtgttttccaacttggttccattctccccatcactttcaggtacaccaatcagacgtagatttggtcttttcacatagtcccatatttcttggaggctttgctcatttctttttattcttttttctctaaagttcccttctcgcttcatttcattcatttcatcttccattgctgataccctttcttccagttgatcgcatcggctcctgaggcttctgcattcttcacgtagttctcgagccttggttttcagctccatcagctcctttaagcacttctctgtattggttattctagttatacattcttctaaatttttttcaaagttttcaacttctttgcctttggtttgaatgtcctcccgtagctcagagtaatttgatcgtctgaagccttcttctctcagctcgtcaaagtcattctccatccagctttgttctgttgctggtgaggaactgcgttcctttggaggaggagagacgctctgcgttttagagtttccagtttttctgttctgttttttccccatctttgtggttttatctacttttggtctttgatgatggtgatgtacagatgggttttctgtgtggatgtcctttctgtttgttagttttccttctaacagacaggaccctcagctgcaggtctgttggaataccctgccgtgtgaggtgtcagtgtgcccctgctggggggtgcctcccagttaggctgctcgggggtcaggggtcagggacccacttgaagaggcagtctgttggttctcagatctccagctgcgtgctgggagaaccactgctctcttcaaagctgtcagacagggacatttaagtctgcagaggttactgctgtctgtaccctgcccccagaggtggagcctacagtggcaggcaggcctctgagctgtggtgggctccacccagttcgagcttcccggctgctttgtttacctaagcaagcctgggcaatggcgggcacctctcccccagcctcgctgccgccttgcagtttgatctcagactgctgtgctagcaatcagtgagattccgtgggcgtaggaccctccgagccaggtgtgggatatagtctctaggtgcgccgtttttcaagccggtctgaaaagcgcaatattcgggtgggagtgacccgattttccaggtgcgtccgtcacccctttctttgactcggaaagggaactccctgaccccttgcgcttcccaggtgaggcaatgcctcgccttgcttcggctcgcgcacagtgcgcgcacccactggcctgcgcccactgtctggcactccctagtgagatgaacccggtacctcagatggaaatggagaaatcaccggtcttctgtgtctctcacgctgggagctgtagaccggagctgttcctattcggccatcttggctcctcccaatgggattattttcttgatttctttttcagattgtttgctgttggcatacagaaaggctactgatttctgtatgttgattttgtatcttgcaaccttacagaatttgtttaccagttctgatagttttttggtggagtctttaggtttttccaaatatgagatcatatcatccgcaaacaaggataatttgacttattcctttccaatttggaygccgtttatttctttctcttgtccgattgctctagctaggacttctggtgaaagtaggcatccttgacatgttccagatctaagaggaaaggcttttagtttttccccattcagtttgatactagctatgggtctgtcatatatggcttttattatactgaggtatgttgttctgtacccagttttttgaggattttttttatcatgaagtgatgttgaattgtatcaaattctttttcagcatcaattgaaatgatcatatggtttttgcccttcattctgttgacatgacatatcacattaattgatttgtgtatgttgaacaatctttgcatttctgggataaatcccacttgatcatgatgaatgatctttttaatgtgttgttgaattcaattttctagtattttgttgaggatttttgcatcaacattcatcaatgatattggcctataggtctttttgtttttgtttttgttttttgatgtgtctttgtctggttttggcatcagggtaatactggccttgtagaatgagtttggaagtatttcctcctgtttattttagaatagattgagtaggattggtattagttcttctttaaatgcttggtagtattcagtagtgaagccattgggtcctgggattttctttgctgagagactttttattatggctttgatctcattacttgttattcatctgtttgggttttggatttctttatgattcaatcttggtaggttttatgtatctaggaatttatccatttttttctacattttccaatttattggcaaatagttgctcatagtagccactaatgatctttgaatttctgtggtaacagttgtaatgtcttctttttcagctctgattttatttatttgggtctctctttttttgctttttttttttttttttttttttagttagtccagctaaaggtttgtcaattttgtttatcttttcaagaaactaacttcttggccaggcacagtggctcacacctgtaatcccagcactttgggaggctgaggtaggtggatcacttgagggcaggagtttgagaccagcctggccaacacagtggaaccctgtctctactaaaactacaaaaattagccaggtgtggtggcacatgcctatagtcctggctactcctagctactcaggagactgaggcacaagaattgcttgaacctgggaggcggaggttgcagtgagccaagatcgcaccactgcactccagcctgggcaacagagtgagactctgtctccaaaaaaaaaccaaaccaaaccaaaccaaaacaaaaaaccgtttttgtttcattgatcttttgtattgttttctttgtttcaagtcattaatatctgccttgatctttattatttattttctcccaagaactttgggtttggtttgctcttgcctttctagttcgtttttttgtctggtgacagctgaaacctttttttttttttgagacagagtcttgctctgttacccaggttggagtgcagtggtgtgatctcggcttactgcaagctccgcctcccgggttcatgccattctcctgcctcagcctccccagcagctgggactacaggtgcccgccactgtgcccacctaagttttttgtatttttttagtagcaatggggtttcagtgtgttagccaggatggtctcgatctcctgacctcatgatctgcccacctcggcctcccaaagtgttgggattacaggcgtgagccactgcacctggctctagttcttttagatgcatcatcaggttgtttgaagtttttcttattttttgatgtaggcacgtatagctataaacttccctcctagtactgctttcactgtgtcccacaggttttggtttatcatgtttccattatcatttgtttgaagaaatttttcagtttcctgtttaatttcttcattgacccactggtcatttaggaacatattgtttaatttccatgtttttgtatagtttccaaaattcctcttattattgatttctagttttactcattgtggtcagtcagagatgtttgatattatttcaatttatttgaatgttttaagactcattctgtgacttaatatacgttctgtctttgagaatgatccacgtgctgaggaaaagaatgtgtattctacagctgttgtatgaaatattttataaatatctatttggtctatagtgcagattaagtcccatgtttctttgttgattttctgtctggaagatctgtccagtgctgaaagtgtagtgttgatgtctccagctattattttactggggtctatcactctctttagctctagtaatatttgctttatatatctgggtgctccagtgtaaggtggataaatatttaaaactattatatcctcttgctgaactgacctctttatcattatatagtgactttgtctcttcttatagttttgtcttgaaatctattttgtctgatataaatataggtatcctgttcttttttgctttccattggcatggaatatcttcttcaatcccttcattttcagtccaggtggagtgtctgttgtaggcaacagatcactgggtyttttttttttttaaatctattcagccactctatatcttttgattgacagtttagcccatttacattcgatgttatattgataagtaaggacttactcttgccattttgttatgttttccggtggctttgtggtcttctcttccttctttcctcccttcccttctgccttttagtgaaggtggttttctcttgtggtgtgctttaatttcctgctttttattttgtatatatccattgtatgttttttgatttgaggttaccatgaggcttgtaagtactgtctaataactcattattttaagctaaaagaaaactaataaactctacactttaacttcctccctctgctttttaactttttattgtttctatttatatcttattgtactatgtcttgaaaagttgttctagtcactattttttatcagttaatcttttagtcattttactgaagagtagtttacatgtcacagtcacagtgttatactattctgggtttttctgtatacttaactgttaccagtgagttttgtgccttcaggtgatttcttattgctcactaacatcgtttactttctgattaatgtactctgtttagcatttcctgtaggacaggtctagtgttgatgaaatccctcagcttttgtttgtctgggaaggtcttcatttctcctttatgcttgaatatattttccttcagcactttaaatatgtcatgccactctctcctggcctataaggtttccactgaaaagtctgctgccagacgtattggagtgccattgtattttatttgtttcttttcttttgctgcttttaggatccttccttttatccttgacttttaggaatttgattactaaatgcctgaggtagtcttctttgggttaatctgcttggtgttctacaaccttcttgttcttggatattgatatcttcctctaggtttgggaagttctctgttattatcctttgaataaactttctacccctgtctctttctctacctccactttaatgccaataactcttagatttgcttttttaagtctattttctagatcttgtaggtgtacttctttcttttttattcttttttcttctgtctcctctgaccatattttccaatagcttaccttccagctcactaattctttgttccacttattcaatcctggtattaaaagtctctgatgcattcttcagtatgtcggttgcatttttcaactccggaatttcagcttgactctttttaattatttcaatctctgttacatttatctgatagaattctaaactttttctgtgttgtcttgaatttctttgagtttcctctttgttaagtttatctgatagagttctgaatgtcttctctgtgctatcttgaatttctttgagtttcctcaaaatggcaattttgaattttctgtctgaaaggtcatatagttttgtttctgcaggtttggcccctggtgtcttatttagtttgtttggtgaagtcatgttttcctggatgttcttgatgcttgtggatgttcatcaatgtctgggcattgaagagttagatatttattgtagctctcacagtctgggcttgtttatacccatccttcttgggaaggatttccaggtattcaaaagaacttggatattatgattgaacccatatctgcattagggggcatcccaagctcaataacgctgcatttcttgcagactatctggaagaattatctggattatcaagcccacactcttgttcttgttgcttactttctcccaaacagaatcaatctctctctctctctttttttgctctttctctctcccccttccccccctccctcctctccctttctccttctctctctccctctgttctgggccacccagagctaggggggtggagatacaagcaccaatatggccatcaccactgagaatgtactgggtcagacatgaagctggcaccacactgggtctcgccatggcccactgtaaccatgatctggctgcctatgttccctcaatgccctgttgtgaagccagccaggctagcttcaagccagtgagttcccccaggctgcagccagatccagagatgccatctgggagccatggactggagtccaaaaccttagaaatctgcttggtgtcctatctattctactgtggctgagctggcactcaaaccattagccagtcctttccactattctgccctttccacaggctcaggggcctctccccatgtccaccaccaccacaggcctatgaggagtgctgccaggttactgctgatgttyggtaaaggcctatggcctcttcagtcagcttgtggtaaatcctttcagtcacccttcagggcagtgagctcccctctggcaaaaagcaagtccagagatgtcatccaagaacctaaggcctagactcagggaccccaagaggggtctctatttgttgctttaccccactgtggccaaggtggtagcaagtgcaaggcaggctgggcgcagtgtctcatgcctgtaatcccagcactttgggaggctgaggcgggcagatcacttgaggccaggagttagagaccagcctggccaacatggcgaaaccctgtctctactaaaaataaaaaaaattaggccgggagcggtggctcactcctgtaatcccaacactttgggaggccaaagtgggtggaacacttgaggtcaggagtttgagatcagcctgaccaatatcgtgaaaccctgtctgtacaaaaaatacaaaaattagcctggcacagctgggtacggtggctcacacctataatcccagcatgttgggaggtcaaggtgggtggaacacttgaggtcaggagttcaagactggcctgaccaacatggtgcaaccccatctctactaaaaatacaaaattagccaagcatggtggcacacacctctaatcccagctactcgggaggctgaggcaggagaattgcttgaacccagtaggtggaggttgcagtgagctgagatcgcaccactgcactccatcctgggtgacagagtgagaaaccatctcaaataaaataaaataaaataaaataaaataaaaaatttttaaaaattagctgggcatggtggtacatgcctgtaatcccagctactcaggaggctgaggcatgagaattgcttgaacccaggaggcacaggttgcagtgagctgagatgacaccattgcactccagcctgggcaaaatagcaagactctatctctgaaaagaaagaaagagagagagagaaagaaaaaagaaagaaagaaagagaaagaaagaaagaaagaaagaaagaaagaargaargaaggaaggaaggaaggaaggaaggaaggaaggaaggaargaaggaaggaaggaaggaaggaaggaaagaaagaaagaaagaaagagaaagatcaagagcaagacaaagcaccctttaattttccttctgcttttctcaagcggaaggaatctctcaccatggccaccacagctgggaatgtgctgggtcacaactaaagccagaatatcttagcctcaattaaggcccacagccttggatattaactgggtatcactactgtttattcagggctcaagggctctttcatcagcaggtgatggatcctgccagagctgggtccttgccctgcaaggcagcaggctcccttctgatccaggattgtctagaaatgttgtctgggaactagggcctgaaacagcctcatgaccctgcctggtgccctatcctactgtggctgagctggtatccaagatgcaagacaaagttctctttactcctccctctcatctcctcaagcagaaggaagaggtctcttttggagcagtgaggttggcggggaggggccgagcaagcattccactagctgctctggctggtgtctcagtaggtcatgtgcctgctaagtcaactggctccaagtccagctcagcactaggacttgcctaagagttgtagttcatggggcctacactgcctttcaattttatttagagccccagggcactttggccctcggtgacgaggtttgccagaattcaagttctgaccaaggtacaggagattcccctctggctagggctggtctaaatgctccctctatggtctggcatcagctgagttcagcctgcttttgctttctactgtctgtaacagggcagcactgagttcagtgcaaagcctcacaatcgctgcactgtccctctcccaagcgtacagattttctctccatgccacacatctggtgctggggctgggggaggggtggcattggcaattcaagactatttttcctaccctcttcagtcctttttcagcaatataaagttaaaaccaggtactgtgagtgcctgattttttggtttttataaaggtgcttttttgtttgtagatagttgttaaatttgatgttcctatgggaattacaattcgtgcgagcttctatttggccaccttgctcctctccatattcgccatatatatatatatatatatgccaatagagggaaggagaggaatcacaaacattgctttaaaacagtaatacatgtaaatgatccaattagaaaagggtccagaatgaaaatgaagttttccttcctgcctctcctgtccctcagtcatgcagtttcctttccaaaaaaaatactgctggtctgggcacggtggctcacacctgtaatcccggcactctgggaggccaaggcaggaggatagcttgtgggcagcagttcaagaccagcctggtctgcaaagcaagacctcatctttacaaaaaaatttaaaaattaggtacgatggcgtgcactttagtctcagctactccagaagttgaggtgggaggatcacttgagcccaggagttcagaggctgcagtgagctatgagcatgccactgcactccagcccaggtgccacagtgagactttgtcttttaaaaaaatgacaaaaagaaattacggttaccagtttctcaaaatatgtccttccagagagatacacgtttgtatgcgcaaagaatgcttgcaaacttgcttcctcatatacccatacacatatgcagaaacagatgtgcacgtgtgtgtacatatatgcattcatattgtgtatgaattctatgcatcacacagctgaaagcacaagatggtagatacccttctgcttttgtctcttaacagtgtaatttggaggtmattcctaccatatttatggggtcacctcattctttttttgctgactgcataggctatcattgtaatcgtgtttaactggctgttcccagtaggcatttgggttgtttctagtcgttctgataaatagggctgcattgaaaatccctgcagtaggtacatgggggatatttcctagaagtgtgattatttggtcagtgcatgtgtgtgttaaattttgagatctggccaaattactctccataaaggctacctcagagtgtctgtttctctgctctcttttgaacctagaatgtcatcccaagcattaccatgtgccaatrttttgctattataggataaaaactactatctcagtgaagaattgcatttctcttttaggaacccaaatatcttctcacaggtttaagagccatttgaggccaggtacagtggctcatgcccattatcccggcactttgggaggccgaggtgggcagatcacctgaggtcaggagttcaagaccagtctggccaacatgatgaaacccggtctctactaaaaatacaaaaattagccgggcatgatggtgggcgcctgtaaccccagctactcaggagagtgaggcaggagaatctcttgaacccaggagacggaagttgcagtgagctgagatcgcatcaytggactccagcctcagcgagaacagcattgaatttccctttgtatgaactgtcttttcatgtcctttagccattctctcttcaattgtttctatggtttttttttctttttgatgttggactttttatctacttgttttccttgtttgctgcagtgtgtaccaaccagtgcagcttcttggttgttggtgggtctgtaagcaagcgttcggagccagcacagagaggatgagaggagggctgcactcatctgctcttccagatggcactgatcaaaggacgtggtgatcatgggaacactctggagagcacgtagccatatttagatatattgacaacacaaccatttagtagactcagggtgactttaagccacatgtcacatggcagctgttaaaatcatctctgtacatgtacatggatagttctgatggcacacccttgttagctttgtagcttttagctaaagggccatatggtgaaggtgcattttttgcatttcttatttcttctcttttctttgtcaatatatccattctagaaaatgagatgagccaggcacagtgtggtgcatgcctgtaatcccagctactctgaaggctgaggcaggaggatcacttgagcccaggaatttgaggccagcctaggcactgggcaacatagtgagactccgtctcttaaaaaaaaaaaaaaagaaaagaaaagaaaaagtggccaggcatggtgactcaagcctgtaatcccagcactttgggaggtcgaggcaggtggaccacctgaggttaggagtttgagaacagcctgatcaatatggtgaaaccctgtctctactaaaaatacaaaaattagccgggcgtggtggtgtgcacctgtagtcccagctactcgggaggctgagataggagaactgcttgaacctgggaggcagaggctgcagtgagctgagatcgcaccactgcactccaccctggatgacagaacaagactgtctcaaacaaaaaaaaaaatgaaaaaagaaagaaaaaaggacaaaaaaagaaaatggggcaagatgcttactctttctgtaaattatctttgtagttcaagtgtccagtaaagttctctgttccaagcagacacttaaaataaatatttgctcaaaaaggtcaattcctccacgtgctgttttgctgcccttcctaaaggcatgtgtatcagtgcagcacttcttaactgatgttaataagtgttctgtgattttttaaaaagtgcctatgattatattaattttggaaaagctattttaaatattaaagcattttaaacatttaacttataaaataaaatcagtttatttactacaggacttctcacagcctttaatgtacmagcaaatccaccgaacttccaagagagggttgcaaggtgctgtcttctgcaagtgtgtctgtccatggagctctgttttcatattttcatggtatctcattgaaatacagctcaagcaattagcctaaactcatagatgaataaagagtagacatcaatttgtttgtcccctgatttgtctgaattaggccaaacaaggatctttaactggaaatagggttattgattacttgactgcagtcagatttctaaaattgagtaaaaacgtgtttgcggttcaattgcagacaaagacatactggttactttctccaggctccccacagtattggcagaagtgtraaattaagagatcaaggtcatttctggtaacccctcactgcacctactcgaggtctgatgccaccctctctgtctgaatcatccaaatcaaaattggccagggatgagggtatagtgctgggaccagacagagccaccaccagctggtggcttaattatgaagcaaatttatagagccacaagggggatggaccagaagtggactgggaaagatcattatgtccagctccttaacagggcagtttcttctttccacttgagttatttctaaaattgactttttaaaaatcccttattggccttttctgtcttcttgagaaatcttgtctgtttttcttctcagccttcctgaaatgcgtaacagtggttctgaacagtgttctagaaccctggtggyggggatgtgtcacaagtcatctgtgtgctaaagtaaaccattaaaagcacatgcatttgcaaattaccaccaaatagaatggattcaagagtaccttatgtaaggtcttatctacctactttgagaacgcctttttgagtggaatgagctgttctgattgcmtatgtgattacagtgcttatgagtggctttatatttccatttttattttcccttttgataagattgcacttgagctacaaagataccaggaacattttcatttgtaataacacaactgttatgattacccgatgaaaggcagccaaaatgatgcgagaaaaatgttcaatagtgatattgtggctttaaaaaagcaatcaggttaattatttgcattcctcaatagtctacacttgttactttttttttttttttttttttttgagacagagtttccgtctgtcgcccaggctggagtgcagtggcactatctcggctcactgcaacctctgcctcccaggttcaagagattctcctgcctcagcctcctgagtagctgggattacaggcatgcaccaccatgccccattacttttttgtgtttttagtagagacggggtttcaccatgttggccaggctggttttgaactcctgacctcaagtgatccatccacctcggcctcccaaagtgctaggattacaggcatgagccaccatgctcggcctacacttgttactcttgccatattgtctatatttcctttggagtaggagtctagaaaatacatcattttgccaggcacagtggctcacgcctgtaatcccaggactttgggaggccaaggctggtggatcaccaggtcagaagttcaagaccagactggccaatatggtgaaaccccgtctctactaaaaatacaaaaattagccgggtgtggtggcaggcacctgtaatcccagctactcaggaggctgaggcagaagaatcacttgaacccgggaggcagaggttgcagtgagccgaagatcacacaatctttattattatagttgttaagactgatatttttgtaattttttactttcaagtgtcttttaatatattcccatctccaaaaatagttgtgccacactcattgttaatttctcttctctgccaatttggtggggattcatcaacacctagttctctccattatgtgcgtcactcaagggagcttcatccagcatgcatgttcatggagaacttggtgccaaagaggtgcttcctcattctcttttcttttcttttctgtttgtttttttgagatggagtcttgctctgtcgcccaggctagagtgcagtggcgcaatctcagctcactgcaacctccacctcccgggttcaaacaattttcctgcctcagcctcctgagaagctgggattacaggtgcccgccactgcacctggctatttttagtagagacggggtttcaccaccttggccaggctggtcttgaactcctgacctcgtgattcacccgccttggcctcccaaagtgctgggattacaggcgtgagccaccgcgcccggcctgcttcctcattttcttcctgatttatagcatgcttgcctccagctttcatagcagcagcatgcttatgccttcctcgaggcatcaagatgtcagcaggatcgattccttctgagagctacaagggagagatctgttctaggcttctctccttggcttgcagatggccattttctccctgtgacttcgcatcgtcttccatctatctctgtgtccaaatttccctttttgtaaaggtatcagtcatgttgaattagggtcctctctaatgacttcactttaatttgattacatctgcaatgagcagtttccaaataaggtcacattctgagggatggaggtttaggacttcaacatttgaatctggggaagacacaattcaactcataacaacatgttaatttgctacttacgaacttttctcccttttttttaaagaatgtacatggcaagtcaaagcaaacgatcgcaagtaccacgaacaacctcastttatgaacacaaaattcttgtgtattaaggagagtaaatatgcggtgagttgttaactttctgaattgttttcattaaaatgcagttttttccagtagctggcatgcttactaccttcatgctacacctgccttccacgtaaccacctgcctggggctactgataatcatcattgtttctatagaatgtcatttttattgatgtttacctttggggtgggtagcgggtgacttgaaacaaaacagaattatgtagattgaaattttctctctcttttttaaattttaagctctcttagaaatgttttatgaaagaatatacaatgatggcacagaagcctcctgtttgaaagtaatgagtttgaaaggaatctcttaagaacttatcttccccttctctgcctggaatggatttagagattttaaacatatttttgactcaaaaatgcttattacctttggaatgtgataaagaatgcttaaagattaaatgcgaaatacaaaaattagcctggagtggtggcaygtgcccacagtctcagctacttgggaggctgagccaagagaatcgcttgagcccaggaggcagaggtttcagtgagctgaaattgtgccattgcactccagcttgggtgacaggagtgagactctgtctcaataataataataataataaatattaagtgtgggcttaaatgttgtaagatgtgtgttttaatgccaagggcttccatagcagagtaccacaactggatggcttaaaacaacagaagtttactctctcctgatgcagggatcagaagtctgaaatcttggtgttggcagggttggctccttctggagcctctgcaggagaatctgttccctgcctctcccctggcttctggtggccactggcaatccttggagttccttggcttacagatgaagtcaccccaatctctgcttccatcttcaaggggcactcttcctgtgtgtgtctgtgtgcaactttcctcttatagggaccccagtccgaataagcacctcattaaattagagcctgtcctaatcacgtatgacttcatcttgattatctctgcgaagatcctatttccaaataagatcccattcatagatattagtgttaagacctgaacatatcttttgcaggacacaatgcaacccactacagtaccttttgctctttcttacatagtaggctctgtctcctcacttaaataaaagcctcacttttcctggctttggccatgttgttgtctacctttaccctgttttctaacagtctctaatgggtcaaggaatctgacagcaggatttatttggtcacagtctgatgtctgtttcttgttactgcctctgtcataagactccaagtagtcattttgaggcttggctgcttggctagaattaaaagcttaaaagaaatatcagtatctttctttcttcttttcttttttaaggcagagtctcactctgtcactcaggctggagtgcagtggggcgatctgcaacttctgcctccctggttcaagcgattctcctgcctcagcctcccaagtatctgggattacaggtgcaggccaccacgcctggctaatttttgtatttttagtagaggtggggtttcaccatgttggccaggctggtctcaaactcctaggctcaggtgatccacccacctcggtctcccaaagcgctgggattgcaggcataagccaccgcacccagacaaaatcctcaatatctttctgacagatgatgttcctttgtcactgtaagctgtgggacttgtgacttttgcagatgtgtatacattgtgataaatacagcatcatttagaatgactcttattttttccaacagaataatgcaattaaaacatacaagtacaacgcatttacctttataccaatgaatctgtttgagcagtttaagagagcagccaatttatatttcctggctcttcttatcttacaggtaatgccctttgctatcttaaatctgtttgaattatagtgactcgataacatttaagctgtagacacatataatgtgaataatcttgaaagtgttttatattagcatcagggttctgtacataaaggaacagtgcctcatacacagaaccagctcaatcagtgttatatgaacagggaaagggagcaaatggaaatattattctaattctgtattttaaaaaatttcatgttatactgatatgggtgttaaaattggtatccctgaagtgaataaaactaaaatccagccaggctcagtggcccacgcctataatcccagcactttgggaggccgaggcgggcggatcacctcgggtgaggagttccagaccaccctggctaacatggttaaaccccgtttctactaaaaatacaaaaaattagccaggcgtgatggtgcatgcctataatcccagctactcgggagactgaggcaagagaatcgcttgaacccaggaggcggaggttgcagtgagccgagatcacaccattgcactccagcttggacaacaagagctaaactccatcttaaaaaaaaataaaataaaatccttactttgtaaaattatttgcaccttaaaattaaagctattttgtgcttgtcttttatcattgtagttagatgctgaatttcccccccaaaaagatcattgattttttattaaaattttggtcataaatttcagtaagttatttttgtgaactgtttttacattttaaaaggcctacttaaaaattttttttcctaattgtggcaaagcatccagttatccagagagcatgagtttwgctgtgcaagaactgttgctgtaaccgagggaactctacacacactagttagcgccagaatcaacctttagtgtctgccgtgcggattacatagcttaagctcagaatatccacctggttttttcagattcttttttttttttttttttgagaccgtgtttcgctcttgtcgtccaggctggagtgcagtggcaccatcttggctcactgcaacctcctcctccttctcttgggttcaagcgattctcctgcctcagccccctgagtagctgggatcacagttrccagccaccacgcccagctaatttttgtatttttagtagagacagggtttcaccatgttgaccaggctggtctcaaactcctgaattcaggtgatccacccgcctcagcctccccaagtgctgggattacaagcatgagccactgcgcccggcactttatcagattctttacggcaagcattggatttggaaaagttatacctgctgggattgaccctttaaggttttatgaaaatggggtagaatgtgtgtctaggtggggatggaggatgcgtggagaggagagaaaaagaagagacgatggtaaggagaaatggataggcaatgatttaggaaactgtaagaccttcaagtcagatagtaaaggatggccctgttatcaaaggagatgcttagaaaggtgtgtgtagaggttagcactgcaaactccaaggtgctgctctgtaggaagtagaccattttcccttacttccttctagcagggaagaggagtttcacatattcactgtgatgtgggaagaaggatctttttgtcttctaactgcaccccagttatcttctctctctcttttttttttttttttgagatggagtttcgctcctgttatcaaggctggagtgcaatggcgtgatctcagctcaccaaaacctctgcctcccaggttcaagctattctcctgcctcagcctcctgagtagctgggattacaggcatgcgccaccacacctggctaattttgtatttttagtagagayggcrtttctctatgttggtcaggctggtctcgaacttccaacctcaggtgatccrcccacctcggcctcccaaagtgttgggattacaagcatgagctaccgtgcctggcgcagttatcttctcttaaggtcagcaatccaaattagggtaacagtaatagccgtaggcagcttcttaacttgtgttgtcactacacttaattcttctagtctagaaggtcaggcctggcatgacctccattttgcagagaaaagctgaggcctagtaagctaaagtaacttgctcaaagtcccataagccataaatgatagagctgaccaagacttggatctaggagttgactccaaagcctgtcattttaaccactacattatacagcccagtgatcaggaggatggttatgaaataactttattaaacttgcatcccaatctttgttcaaacttagaggctgtcttgatggaggaaggccagctcactttcttggataggccaatagtgatgatcatgaaggaagcactttcttctaatgccctcagagatgctctccctaatccctcactttcagaggcagctagtacctcttgccatcattgccttcagcatgggatcctcagaaaccactgactgagaaacctgcagtatagaacctactatgcatgcattccttaaaagttaagatgactttggccaggcacagtggctcacgcctataatcccagtactttgggaggccaaggcaggaggatcacctgaggtcaggagtttgagaccagcctggccaacatggtgaaaccctgtctctactaaaagtacaaaaattagccgggcatggtggcacacacctgtaattccagctactcagaggctgaggcaggagaattgcttgaatctgggaggcggaggttgcagtgagccgagattgggccattgcactccagcctgggcgacaagaacaaaactcyatctcaaaaaaaaaaaaagaaaaaaaaagttaagacgagacttctcccttgccactcctaccccctcacccccagttaaatatgaytttcacaaaagatttagagcaactcttttttaggtatcataatacaaaacttccttggtgtccagttaagtttgcaatgagataatttcaggagccactgccctctaggctctgttccaggtatccagaagctagagagaaccactagaaggaggttgtccaaatgcttgaagagcctttcctatatactctgcaggatgtagacttatgtgatgacggtgatgagacttggaattagcaagcttagaattagcaataagttacctgtaagcttgataygccttcatggacacacacataagcccttttattcttttaggcagttcctcaaatctctaccctggcttggtacaccacactagtgcccctgcttgtggtgctgggcgtcactgcaatcaaagacctggtggacgatgtggtgaggatttctcatacaacgttctactcattgctttgagttgactttaagttctcgtgccttccttctctattgagatgtttaaaacagcatttccccatcttccttctcaaggctcgccataaaatggataaggaaatcaacaataggacgtgtgaagtcattaaggatggcaggtactgtgtctaattagtaactgagtttcaaggatgtaatgcataactctgcctagaaacacattcagagataattattacaatgtagaaggctattagtacattaactgtttatttttttcgagatagagtctcgctctgtcgcccaggctggagtgcagtagcgttatctcggctcactgcaacttccacctcccaggttcaagcaattttcctgcctcagcctccgagtagatgggattacaggcgtgcaccaccatgctcagctaattttgtacttttagtagagatggggtttcaccatgttggccaggctggtctcaaactcctgacctcaagttatcctccttgatctcccaaagtgttgggattacaggtgtaagccaccatgcctggccttaaattatctttttaatgagtatgtacccctgttgtaataaatctaataaggatagtgataaaaatagataaaaagatgactattttgagtactaaattccataggaaatattcattaaaatttttaacatatcaacacttttaaaagttttaaactataatattgttttaaagattttcacatatacaaatgatatacccagtggacgtaatgaacctgctataaataataaacttaatttcactggaggcagtcgtctaatcactatgtgtttatctgccattcatttatggccaaaaatgacttggagatttaaaatactttttaaatatatgtttatgccccagttcccctaatgaatttagtatacaattcttaactccagcattaaaaaaaaaatttggcttatctttcaattracgaaattgtagatgttttacatttcagtatttctgaaattttaaaatagaaatttgcatgtaagtccgaaatgacaaatggataggccagcaccttcttagcagggctactggaaggcaattctgaatactgaaatattggaggcaattctgttagattcttctatccgatgttccagtttcctctgaggaggccccctgtgctctaccctgctaatgctcaagttcctataggtgtgaccccactgcaggggctgctcaggccatggccctgccagacatgcaccctagacttccaaattcaaggcaacccagagctcctctttaccagtgtaggtaggtatggtacaggctaaacatatgggttggccaggcacggtggctcacgcctgtaatctcagcactttgggaggccgaggcaggaggatcacttgaggccaggagttcgaggccagcctggaaaacttagtgagactcctgtcttttttttttatttttttgagacggagtctcgctctgtcgcccaggctggagtgcagtggcgcgatctccgctcactgcaagctccgcctcccgggttcacagcatcctgcctcagcttcccgagtagctgggactacaggcgcccgccactgcacctggctaattttttgtatttttagtagagatggggtttcaccgtggtcttaatctcctgacctcatgatccactcacctcggcctcccaaagtgctgggattacaggcgtgagccaccgggcccggccgagactcctgtcttaacaacaacaacctcctctgctaggctcattgggacacttattctattttactgaatgaagtgtttcctaatcctagaattgtaaataaagccaattaagatctttaaattgttgtgattttgtcttttgacacttgaaaggtaactttggaacataattttcttatttgcaaaggaaaaaaagccatctaaacatatttatagcttggtatagtctatatttgcattagagtggaagtacggctgtaagtcaggttactttcctcagtgttgacacataaaaagtcttggaatgaggccttagttactatttttagcacttgaatttgcagttctgcctgaagcctcctgctcaaaaaacaactcattactgatccctgagttggtgctttcgtcacagttgactacgttaatttaacaaacacttatggagtactttctgcatgttggaggcaggacagtatccttgagaaatttatagttcaagacagaagatgagacacctacacacatcattctaataaaatccatatcagaataaaaaagataaaaacaaaatgctctgacagtacagggaagggaaaattcactttagcgagggaatgtggggaaagatgtcaagacgtgagcaaagccctgaaaatgatgccctagggaggctgaaggggctgtgtaaacacaagttgtggtgacaacacaaagctccatcagacaactgaccataatccaatttgagtgtagcctcagggccttaaagggaatacagtgtctttgtcagttaagcctttacaattaagaagttaaccggccaggtgaggtggctcatgcctataatcccagcactttgggaggccgaggtgggtggatcacctgaggtcaggagttcgagaccagcctggccaatatggtaaaaactcatctctaaaaaattagtcaggcgtgaaggcacgtgcctgtagtcccagctactcgggaggctgaggcaggaggatctcttgaaccccaggaggcagaagttgcagtgagctgagatcgtgccactgcactccagcctgggcaacagagcaagactctgtctcaatgaaaaaaaaaattaataaataaataataaagataatttaaacagcagagagtaggcaagctctgaagccccacgaagactctgggaggcccaggtgggtgccataatgtaggtgcttctgtcctgggaccagcatggagcaagtgatgggtcactgagaaggaacacagcagggaggcaagttggacataagcaaaaacaaaagggggtggcaagtatttccctgccaygcacataagtggcccccataaactcttccttacatgacctagatgaaaagaatgtatcaaagtcattcatcattgcttccttcagaggtcaatacrattttcatgcccccctttaatatgtttacatccattaaagagcaaaattttagcattttctctgtgacttgcatattttccagaatctataacatccagaaagaatagtaattcccttgcctgtaacttaaaatgtcaataaatcctcattatttttaatccttaggttcaaagttgctaagtggaaagaaattcaagttggagacgtcattcgtctgaaaaaaaatgattttgttccagtaagtgaacaaattctgcttctcttgttccttgttctcccccagcccctgtgctcggcttttccctcagggtctcggtgttatttgtgtgttttgttttggacaggctgacattctcctgctgtctagctctgagcctaacagcctctgctatgtggaaacagcagaactggaygggtaagtgtgtctcgatgggyctgatttaaagctggcctttgaaggcacattcattccactgaaatcggggcattgtggaccagacggcttgatatctggccttgcctctgccacctgctgctgtccctactgatctcacctttgcgcctctgtgaagtggagctcttactacctgcgtttctccacctctcagggaaggtaaaaggatcagacaggagcatatgtgtctgagccctttatcaactgctgagcagcgtccagacagatatgaataatatcgaggttattatctgtgtcagagaaaggaacagatttttaargtctttaccaataggcaatttatttatttatttttgagacagagtctcactctgtcgcccaggctggagtgtagtggtgctatctcagctcactgcaacctccacaccccctgggttcaaacaattctcctgcctcagcctcttgagtaactgagattacaggctccagcccccacacccagctaatttttgcatttttagtagagatggggtttcaccatgttagccaggctggtctcgaactcctgatctcaagtgatctgcccaccttggcctgccaaattgctgggattacaggggtgagccacagcagctggccccaggaggcaattttgaattctccttgtgttggttttggttactatgctatcatttaaaagagaatgaagttctgtttttgaccagttttctgaccagttttcaaggcatttattgagtgctcacgaggttgccggcactttacatattagctcatttaatcctctaaacgaccatgtgagacgaatattattcgtctgtattacccatgaggaatcggaggcccagggaggtgcagcagcccgcccaaggtcacacagtaagtggtagagtcgggacattgctccctctgctcctcgcgcctcacgctccagatgtgcatacactgctttacagagagcggaaatcatgagactgaaaactagggctgtcwttgcttcatagatcaggcaattgactgttggaaatctatcacacttttttttttttttttggcggaaaaaaatacttaaagccaattaaccacttcttaattgtacaggctaattggttaaaaaccaattaaccacttcttaattgtaaaggcttaactgacaaagacactgcattctctttaaggccccgaggctatacccaaattggattatgggcagttgcctgatagagctttctgttgtcaggttggtctcaaactcctgacctcaagtgatctgcctgcctctgcctcccaaagtgctgccattacatgcgtgagccgcggcgcccgactgtttattctcaactataaaactgctattatttccatgagagattctaaagctttacaaagacataagatcctaacatgccctgccagaacagaatggtgaggttgagaatgaacttccctagggaaaattcctgagtattcgtgaatcctatataaagccktcagtcgtgagacggcagcctcacccttgagagcacctgccccggcctgcccttgtgcccacccacgaccttaccttgcactatggtggggcagttgggagtaaagctaagacttccttttccaaataaaattgtctttcaaaaacatgtgatccagttattcactctggaaaagaatttgacagaggcgaaacagaatttctgtaacaaatatgtgttatagaatcattttaatgtgattaaatattagacactacattttcaaacagcactttggtagtcctagctgatggtaaagttaaagttaatgagaaggatgtttgtgggtacctctgtcctaaccttcacaacaacaaacagtgaagggaaccaacatttcccaaggtcagaaattttctcgacttcaggggataaccttttccaaacctgaagttccaaggtgaacagagtttgaaaatagaaacagctaattatttaggcttcatgtccaggtatggctaatgtaactttggatgattaacttccaytttgaactcaaaaatttgttcatttaattcattttttccccattcctttagagaaaccaatttaaaatttaagatgtcacttgaaatcacagaccagtacctccaaagagaagatacattggctacatttgatggtttgtaccaaacatgtcttactttgctttaaattttagttgcttggttcaattcctattgattaaaaccagaaagacttttgtatgtgattaattatgtgaatcttatatttttaaaaggttttattgaatgtgaagaacccaataacmgactagataagtttacaggaacactattttggagaaacacaagttttccttyggatgctgataaaattttgttacgtggctgtgtaattaggaacaccgatttctgccacgkcttagtcatttttgcaggtacgttcagagtttcttgggaaattaatcagctatgatctttaaagacttagaggggattgcttttctgtcctttgtccatcaaaaccaaaagaagagtaatagcatcatgagcttttttttttttttttttttttttttgagacagagtctcactctgtagcccaggctggagtgcagtggcataatctcagctcactgcaacctctgtctcctgggttcaagtgattctcctgtctcaggctccagagtagttgggattataggcatgtgccaccatgcccagataatttttgtatttttagtagagacagggttttgccatgttggccaggctggcctcgaacccctgacctcaggtgatccgcccaactcagcctccaaaactgctgggattacaggcgtaagccaccatgcctggccaagaagagtaattttattggtgagctagtgaattgatttttcccaactgatgactacattgaattttccattttcaggtgctgacactaaaataatgaagaatagtgggaaaaccagatttaaaagaactaaaattgattacttgatgaactacatggtttacacggtatttatttttcatctcagtagatctctcatctarattgctgtcttttgcactaatattatcgtatgtttttctaatacaaaatcttacctctttaggtggaatagaaaaattattgggcactccaagcttcaaatgcaggaagaagggatttttttttccagaaatgccttactttttctcagaaatgccacacttttaacaggagaattcccttgggaagggaaatttcggttgtagggtgccctgagtgctttgatgacgggaactggaaaaccaggaagccctagataaattagtgaagctggactcctgaagtcaatgtagggttgatttcattgctgttactttcccatagaggcagttctcttagaagcaagcctcccccagcacccccaacatatactgtatagctccaaatacaaggcaaggctaaaaataaagtatgtcgaggacactcaagaccactcccaggtttgatgattcactggaaggactcataggcctcagcacatagtcgtattcacagctgtgagtcattacaacaaaaggacacagagcaagatcaccaaagactcatggagcaaagtgcaaaggaaaccaggcacaagcttccaaaagtcggccgtcctgcccccactccccaccaaaccacacacacaataggcacttaattctcccagcagcaattaatgacaccacatgtgaaatgttgtctataccagggaagctcatgagagactcagtgtcaaaggtttttaacaaaaaaactctagactccccaaaagaatgcagatggtcagcataaaccatgctgtttgcacagttaggcatcatgagtttttttattattattattatttgtttttttttgagattgagtttcactcttgttgcccaggctggagtacaatggcatgatcttggctcactgcaatctccgtctcccaggttcaagtgattctcctgcctcagcctcccaagtagctgggattacaggcacctgccaccacacctggctaatttttgtatttttagtagagacggggtttcaccatgttggccaggctggtctcgaacccctgacctcaagtgatctgcctgcctcggcctcccaaagtgcttggattacaagcatgagccactgcacccggcccatgagctattcttatcagagaataaaaaataactgggaaatcctccaaacatctaagttaccagataccagcccagggcgaaccttgcaagccggccttcggaggaagcagtctcagacctgctatgtttgcycttttctgcccacgtggtgaccccaaatattaagcactccttctatttcccaatgaaaaattttttcaagtatttarttcaatttgaatgcatacttctaawacttattctttgattgcatatacatgtttaaaatcacataaaaataataatttaagaaacattttcccctgctttctcatttcatgaaaattgtatttgaacttttcacattcatctttggtgtcatggttgtggttatccactctcaaagagcctgtttggcactctgctctttccacgacaaagttgtgagatatagcacttttggactccatgtccagaaatttaaatttgtctctggaaattttattcccacttgcgaatctccaagtaycactaggatggttgactttttattccttccataaatatatgctcataacttctacracataatacttatcatattgcttcttaagtgatcttattttacaatgtcatgcaatacttatgacattacaccttaaggaataatcgcccaaatataggtgaaattttcttgccctgaaaaaawaattctggctgggygagggccacctgtaatcccagcagtttgggagactgaggcatgcagatcacttgaggacaagagttcgagaccagcctggccaacatggtgaaactcgtctctactaaaaagacaaaaattagccggccttggtggcgcgtgcctgtaatcccagctactcaggaggctgaagcataagaattgtttgaaccagggaggtggaggttgtagtgagccacaatggcaccactgcactcyagcctgggtgatacagtgagacgctgtctaaaaaaaaaaaaaaaaaaaaaaaaaaaatctgttgaatatcttctataagcattccagttttccagttcagccttgttggaagttgtttcatgctaagtaagatatcttccccaaacagtatgttattgttcaaagtaaacgtaattgagagaatgccctgtaatataagattcttcaaggatttgaatataagacaccaccttctctttggagagataattttgggaacaaaaccttaccttctatgggagatgtaggatacatcagtcaatygcagcaatcaaatagactttcaaagcgttatgatagtrctgtttttatttgacatatattatttttcagactactaaattctcaatcatatgaagtaytgagtaaggttaattagcatctaggaaatgcaagaggttggaaatccatcttcagaatgcatttaaatgttttctgtcttctagatctttgttgttcttattctgctttctgctggtcttgccatcggccatgcttattgggaagcacaggtgggcaattcctcttggtacctctatgatggagaagacgatacaccctcctaccrtggattcctcattttctggggctatatcattgttctcaacaccatggtacccatctctctctatgtcaggtaaggctgtcctctctggcattttgctttaatggaagaatgttgtaccttctcccaacatagtgccttcatttctagtgatcactgtttcaaaggtcacaaagaacaggtaagaaaatcaygttcatttcagaattgagggtaagagaggaaaaggaaattaacatttgagtatccactctgtgccaggcaccttttatctcatcctgtttgcagataagggtagggaatttcaaagatcgattgctactcctgtagtcattgtcttattagtaaggttcccttctcaccgggttccaaagcccagacttcagaaagggactgggaggaggggaagatttagcaggtgatggaaaaacttagttttcccttttggaagtggtcctcacctcttatctgagcctttattatcatctgccacacccaaggtggagaacttgtgctttccggccactacctcctagtaggaaagaaactccctgtccttcatcaacctctcaaaatgttctctttttcatctcaaatctcaaccacaacaacaaagtcaggggcatatctccgataagtggtaagcagctgatttggtgatacttcttcattttttacttttactttttttttttttttttttgagatggagtttcactcttgttgcccaggcaggaatgcaatggcatgatctaggctcactgcaacctctgcctcctggatccaagcagttctcctgcctcagcctcctgagtagctgggatcacgggtgcccatcaccatgtctggctacttttttgtatttttagtagagacaggtttcaccaagttggccaggctggtcttcaactcctgacctcaggtgatctgcccacctcacctcccaaagtgctgggattacaggcatgagccaccacacccggcctttttctctttttaatatgaaagttcactgcccttggccaaactgactttgagacctttttgggagggatagtgctttggaataaacccagcagccagagttcattcttagttctgataaagaatagcccagagacataggaatcacatacacacctataattagaggcatttattttattttagtgtcattatatgtgcatttgctttatttttaatttgattacatgtagttactgttgttcttttaacatgaaggaaagccctggggcagccatctgttccacagctactttgagaaaaaccgagttgagtgttacctttgtcaagggaactattacatagataattttgcctaaaaccatcaatgtgtattataaaagaaactgtatacataattttatataaaggtatgtcatgtgacaaatacgatttcttttttcttggagataaaggtcctttgaaaacatgctggagcaagttcttccagatagtatctctgctttgacttcaaacctcattcagaataaacccaaccccagggccccaagtgtgatctggtgctcagccttccactccgcccgtaccttctgcacctcagcccacctccctgggcttctgccactctggccccttgatattcttcctgcacagggcctttgtccctgctcytttctctgccaggggcattccttacrtaggtatctatctgctcccctttcactacaaaggcctytactcagacaacaccttattaccctgacctttcctgactcattctgtttctgaccacttctccttcctggagatcttcatatctccttaccttgctttgctttgatttttgtttgtttgtttgttgtttgtttgttttgttttgagacagagtcttgctctgtttcccaggctggagtgcagtmgcgcgatctcagctcactgcaacctccacctgctgggttcaagtgagtcccctgcctcagcctccttagtggctggaattacaagtacatgccactatgcctggctaatttttgtatttttagtagagacggggtttcaccatgttggtcaggctggtcttgaactcctgacctcatgatccgcccacctcggcctcccaaagtgttggaattacaggcgtgagccaccacacctggccccctgctttgattttctgcagagaactttcacctctgatagagcctctctttattaatttatttgtctgtctctactagaaagtaacctccttaagagaaaggactttgttttgtttacagacatgtcccctgcacctagaatggtatctggtacatagtaggcacttaggaaatacttacggaagggagagaagtggggagagcatcatttttccatctgtttaacttgttaaggacttccttggcccacctaacaattgctggctatgtaaacagcttccttataactgagataggtaatgtcccttatagttttaaaattcagatgatccttttataatatcttattttggatattctataaccttatcataatttagggatcatgatttggggtatttgccaaaagccttttgccctgtttgagagcacagtggagtctgtaccctagggtactctcactccctctgccctaccacttagggcaaaggtgaacatggccattccagtgcccctgggtgctatggggaatgggggaagagtcaagcttgctgtgtccactgctctgtctgcagtgttgctgtgtcttccattctgctgggctgtgtattctgaacatgggtgccttggctaaatgtgcccaggagtgagtgggaaatctcactgagcaattttgagtggaaattacttgtctaaaatcagcttgaccctgaagcctgagaatgatgcatgtggttaggagaaaccagaggctgagtgcatgggcttgtctccttgtagagggcttagtttgggctgatataacaaaagaccttcgaaatttattgctcagagttctggaggctgggaagtctcaaatcaaagcatcggcagattcagggtctggcaaaggctcactttctgctttataggcacagccggtgccttctagctatgtcctcgcatggcagaaggggcaagcaagctcctttgagccactttaataagggcactaatcccattcataagggtggagccctcatgacctaatgaccttctaaaggccccacctcaatactgttgaattggggattgggtttcaacatatgaatttggagggggattctaacattcagaccatagcagtaaataagcagcttgctctygtctgtacaatgagaataaaatctctactacttgccactcgtatccgagctctctacggaaaataatcttctgtcttcctagcgtggaagtgattcgtcttggacagagtcacttcatcaactgggacctgcaaatgtactatgctgmgaaggacacacccgcaaaagctagaaccaccacactcaatgaacagctcgggcagatccattatatcttctctgataagacggggacactcacacaaaatatcatgacctttaaaaagtgctgtatcaacgggcagatatatggtaagtggaagccgtcactcattttctgggtgagtggggctgcctgccgtgtgcaggtcattacttggactatagcctgtctcctggcattgctggtgccctctcgatgcagagtcctgctgctagggccattctccagctaagcaccagaggagcaccatggacagcactggggacacatgcgtgggagaggacagtggccagaagtgggctcacagccaggcgtggtggctcaggcctgtaatcccagcactttgggagggtgaagtgggcagatcccaagaggtcagggatttgagaccagccttgccaacatggcaaaaccccgtctctactaataatacaaaaattaaccaggtgtggtggtggcgcacagctataatcccagctactcgggagactgaggcaggagaattgcttgaacccgggaggcagaggttgcagtgagctgagatcacaccactgcactccagcctggtgagagagcaagactctgtctaaaaaaaaaaaaaaaaaaaaaaaaaattagaagtctcattactatatgatctagcaattccacttcaggttatatactcaaaagaactgaaacaggggctcaaagagatatttgtacacctatgttcatagcagcattattcacaatagccaaaagatagaagcaacccaagcgttcatcaatggatgaatggataaataaaatgtggatacgcacaatgaaatattattcagtctaagaaaggaaggaaaatttgacacatgctacaacacagatgaacctgaactcgtttatgccagaggttgcaattttttgaatttttgcaatcagaacttggtgatgaccttgagcagtaggatataaataactcccacatgcttagcgttccaataatggaacactaggcataaatgggttaaggacattatgctaagtgaagtaagccagtcacaaaaggacaaatgttgtataattctacttatatgaagtacttagaataatcagatttatagagacaaagcagaatgatggttaccaggggctggagtcaggggaattgggagttactgtttaatgggtacagagtttcaattttgcaagatgaaacagctgcacaacagtgtgaatatacttgatgccactgaactgtatgcttaaaagtggttaaaatgggctgggtgcagtgtctcatgcctataataacaacactttgggaggtcaaggtgggaggattgcttgaggcccagaattctagaccagcttgggtaacaaagcaaaaatttttaaaaattagcagagtatggtgctgcatgcctatagttccagctacttgggagactgaggcaggaagatcccttaagcctgggagttgaaggctacagtgagccaagatcacaccacagcactccagcatggctaacagagcaagaccctgtctcaaaatagcaacaacaaaaattggttgactggtgtgcagtggctcacgcctgcaatcccagcaccttgggaggctgagtcaggcacatcccttgagcccaggactttgagaccagcctgggcaacatgacaaaaccccatctctggccgggcacagtggctcatgcctgtaatcccagcactctgggaggcctacgtgggtggatcacaagctcaggagttcgagaccagcctggccaatatgatgaaaccccatctctactaaaagtacaaaaattacctgggcgtggtggtggatgcctctagtcccagctattcaggaggctgaggcaggagaatcgcttgaacccgggaggtggaggttgcagtgagcaaaattgygtgtgcctgtagttccagttacttgagaggctgaggtaggatcacctgagcctgggtacgtcgaggctgttgtgggctgggtttgcaccactgcactccagcctgggtgacagagtgaaaccctgactcaaaaaaatcaaacaaaaaatcggttaatatggtaaattttattatgtgtatttcactacaattgtttgttttctttgttgtttttgtttttgagacagtgtctcactctgtcaccaggctggagtgcagtggtgcgatctcagctcactgcaacccctccgcctcccaggttcacatgattctcctccctcagcttcctgggtagctgggattacaggcacacaccaccatgcctggctaattkttgttgttgttgttgttgcttttttgtagagatggggtttcaccatgttgaccagactggtatcgaacccctgacctcaagtgatccatctgcctcagcctcccaaagtgctggggttacaggcgtgagccaccacacccggcctacaattgtgtttttggttttgtttttgtttttttgagacagagtctcactctgtcgcccaggctggagtgcagtggcacgatcttggctcactgaaacctccaccttccgggttcaagtgattcttctgcctcagcctcccgagtagctgggactacaggtatgaaccaccattcccagctaattttgtatttttaatagagatggagtttcaccatgctagccaagctggtcttgaactcctgacctcaggtgatcagcccatctcagcctcccaaagtgctgggattacaggtgtgagccaccacacccagccaattgttttaaaagttgatttcagttctaattttctgaaacatttagaaatttaattttatgtaaatttagagataatattaaggctaatactagattcaaatagagtgctattttaaatatacttaatagcacaattgtttaaaatgatatagggacatgcatatatacttcctacttgtaggcaccgtgagtgccttttctcataagaagtatcagtgaagatggtagggcactgaggggctgaggacgtggctcacatatgtgagtccttctgacttgggagaggtaaagcatttcaaaggatatgattcaggcccctaggagaaggtagtggagagggacagccactggtatttgaatatctagaccaggggtcatctaacgttttctgtaaagtgccagataaatattttagcctgtccaggccgtatatggtcttaycaccatcactatataagcaaagccaggtaaggaggggcctctggacrtaggtgtagaatcaatttgttttgtcctgtttgtttctcaggggaccatcgggatgcctctcaacacaaccacaacaaaatagaggtaagacctttaagccgaagaatcgtttgggatgctggggatgtcagggtcccagcagggccatgcttcctttgaaggtctagggaagactctttcgttgcctcttccctgctcctggtggttgcccacagtccttggtgttccttggcttggagacttggaaacacaactctgtgtctctgcctttgttgtcacgtggtgtcccccgtgtgtctgtgtgtctctgtccacatttccccttctaataaggataccaatcattggattaggacctaccctaattgagtatgacctcattttatcttgattacatctgtaaagaccctgtttctaaataaggtcacattcataggtaccagaggttagaatttcaacatatcttttgggggaacatagtttagtccaccacaaagtaccttttgactaggcatggtggctcatgcctgtaatcccagcactttgggaggctaagtttggcagatcaattgagtcaaggagtttgagaccagagaaaccccatctctacaaaaaaatacaaaaattagccaggtatggtggtgcatgcccgtaggcccatctactcagaaggattgcttgagcccaggaggtggaggttgcagagaactgagatcaagccactgcactccagcccgggtgacagagtgagacccatatatggtcatatatgtttccaaaaaaaaaargggggggagctttttatttaagacagttgtgagcctcttgacatttaagaatgtgctaaaatcctaaggtggtttttgcataattgaaaccttgcctttgaagaaaagttcatgtcatttgttaagtcaaaaatattttataaaatcatattttgtttttctccatttctttcagcaagttgattttagctggaatacatatgctgatgggaagcttgcattttatgaccactatcttattgagcaaatccagtcagggaaagagccagaagtacgacagttcttcttcttgctcgcagtttgccacacagtcatggtggataggactgatggtgagtgtttctctggcatctcaggcattagagaccaggttttttgtttccaggtaactcctgcttatggctcaaatgcatgtcaagtagtacacaaatctgtctcatattagaatgcagtgaatatttctcagcacttaccactagatggtttatggaagagcaaagtaggaaacaagcttcttgtccctgaaaatttacacttattcatagctatagctccaggtgtatttttttcactttgcaaatgaaatcttgttgaaagaaatgattggtacttgaactatgatagaagaaactaacttttcttagcacatttattactgagcattgactgagagtgaaaagtcaagctttatctgtatcagaaatggactttgaacttgactaatcttttctaccaaataatttcagatatatgctcttatttactagattctgttatagtttgggtttgaaataatatgagcctcagcctggatctctttaaggtgcctttttccatttaaaggagcataattaatgtgaatttcatgggaacaagccagaatggcttgtaggttcctttgcagaatccttygatgcagtttgtgccagctttgtcacagcaagtttgtcctgtatcaaggaaagctagtcattttatcacaaatggwcataatgataaattatatagacacacatgcactttatagaaagagcaaaaggagttcttttggtgtttctgtaataaagcgtagtctgccttcacttcattccctcacttcatccacttcactacatcttccactttttacttcagtcagtgmggcatacataagtccctctcttttctcaaccttaatgtttcatatgtagcaggtatgaaatttccagagaaggaatatgcataaaaactaaatgtgtaggccaacgcttggtggctcacacctgtaatcccagcatttggaaggtcgaggtgaatggattgcttgagctcaagagttcaagaccagcctgagcaacatggcaaaactccatctcaccaaaaaatacaaaaaattagccaggtgtgatgggacatgcctgtagtcccagctactcaggtggggatcgcttgagcccaggaggtcaaggctgcagtgagccatagtctcaccattaccctccagcttcggtgatggagtgagaccctatctcaaaaaaaaacaaaaaacacctaaatgtatagaagctgtacatgatacctttcagcaagtttcaaagaaacccattttccaaggatgaatctaatattgcaatgaagcaaggtaacagagttcagattagggtggatacatggaagggtttatcagcagatgatgtggggaaggayagaaaggggcgataccaggtcctgaatcatggaagcagaggtctaagtctatttgactcaccaagccaattttacccaggcaataagcataaagtatgatattacaaagtcacctggttctctttggttttgactcataagcacaattattgtactcttctctgggtacgtgataggattttaagggctaactggccaacttaggcaaatgtaaattcatcctgtggtccctattctatctttccccagtgggatattatgggaagagccctggactacatgctagagatgagtcagcccagtctgggtccctctctgagaaccaccttcctcggtgttgtagtaagaaggttggatgtacaaagttccttccagcagggctgggcgcggtggcttayacctgtaatcccagcactttgggaggccgaggcgggcagatcatgaggtcaggagttcaaaaccagcctggccaacatggtgaaaccccatctctactaaaaatacaaaacattagccaagcatggtggcatgtgcctataatcccagctacttgggaggctgagacaggagaatcgcttgaacctggcaggcagaggttgcagtgagccaagatcacgccactgcactacagcctgggcaacagtgcaagactccatctcaaaaaaaaaaaaataacacaaagtccctccagcctgacataccgcagctctttgtccactgtcagctgaggtcaagggttgtacgaatagagacatgttggcttctagtgcaggagcttagagaagaaattgctttcggcttttaaccataaagtaccaggaaaggatcccttgaaagggaccttggggactacaccttcaagttttgttttktgtttttgagacagtcttgctcttgtcacccaggctggagtgcaatggcatgatctcggctcactgcaacctccacctcccaggttcaagcaattctcgtgcctcagcctcctgagtagctgggactacaggggcccaccaccacgcccagctaatttttgtatttttagtagagatggggcttcaccatgttggccaggctggtctccaactcctgatttcaggtgatctgcccacctcaacctcccaaagtgctgggattacacgcgtgagccaccacaccctgccacatgcatttgttttctgctactctgtagtgaattagtgtaactcagctactgaaaacacctgttcattagcttacggttctgtagggcagaattctgagcatggcatgactgggttcaccgctcagcatctgactaaaatcaagtttgggccatgttctcatctggagctcagtgtctttttccacgttcacgtgtggttgcagcaggattcagttctctgtggttgtagaactgaagtccccatttctttattctttatcaactgggttgycctccactcctagagactgtcctcattccctgccagctggtccacttcaccttcaaagccagcggtggagaatctcccttaaattgaacctttttcatgctgctccaagtctctccccaagaagagttctgtcctaagctcatctaattcagtcaggaacacctggataatctattttaaggtcagctgattaggatcgcacatctgcaaattcccttcacagcagtacctagattagtgcttgattgagtaaatgggagaaagtgaatgtacagcactgggatgggaaccttgaggccattgcagactccygcctgcacagaggtcatgtgagagcagaatgtggaaggcttggaagccttcacttcacctggaggttctgagttaatgatcagagagcttgtttcaggagttttgcgcatcacgggtgtgagagtctggagcaggtaggcactggagattggcacagaggctgaaggtttgcattagtatggggtctttgggaaggataacaaagccatggatgtgggagacacttggaggattgaggagaaaaagacatctgagagctagggcttgtttttgtgagcgtgtgtggttttttttttgttttgttttgttttgttttgttttgtttttgagaccaagtttcactcttattgcccaggctggagtgcaatggcatgatctcggctcactgcaacctccgtctcccgggtttaatcaattctcctgcctcagcctccgagtagctgggattacaggcatgccccaccacacccagctaattttgcatttttaatagagatggcgtttctccatgttggtcaggctggtcttaaactcccgacctcaagtaatcctccagccttgacctcccaaaggtgctgggattacaggtgtgagccaccacacccagtctttttttttttttttttttttttttttttttttttttttttttttttttgagactgagtctcgctcctgttgcccaggttggagtacagtgccgcaatcttggctcactgcaacctctgcctcccaggttcaggtgattctcctgcctcagcctcccgagtagctgggattacaggcgcccacaccaaaccctggctaactttttgtatttttagtagagatggagttttgccatgttggccaggcttgtcttgaactcctaacctcaggtgatccacccgcctcagcctcccaaagcactgggattacaggtgtgagccaccatgcctggccaggtagtttattgtcacttaattagagtgagccgggtgcagtgattcacgcctgtaatcccagcactttgggagtctgaggtaggcggatcacctgaggtcaggagttcaagaccagcctgaccaatattgtgaaaccccacctctactaaacatacaaaaattagctgggcgtggtggcgggcacctgtagtcccagctacttgggaggctgagacaggagaattgcttgaacccgcgaggcggaggttgctgtgagccgagattttgccactgcgctccagcctgggcgacaaagtgagactccatctcaaaaagaaattagagtgaatcagctgaggcagttgtgaaggagagaagaaaggtgcatttagctttctctgccaccattaccctgaagctagggaatcaggttgatgagaactgagaggtgggatttgtggtttgagcatctttctttgattacatcaatttcatgagccacaaattagtgtgtgaaagaaaaagaaggwctttctggttgcctctaaatgtgccataaataaagagttttcttaggaaggttgctttgtttttgtttgtttttttagtttgtttttacaccttcaatttttattttaggttcaggggatacatgtgcatgtttgttacatgggtatattgcatgatcctgaagtttggggtacaattgatcccatcatccaggtagtgaacacagaacttaatagttagtttttcttttcttttttattcttttttttttttgagacagagtcttgctctgttgcccaggctggagagcagtggcgcgatctcggctcactgcaagctctgcctcccgggttcatgcattctcctgcctcagcctcccaagtagctgggactacaggcacccgccaccatgcctggctaattttttttgtatttttagtagagacggggtttcaccatgttagccaggacgaaaggtcagcctgctgcgttggctgggaatygaagtcgggtcaattgcttggaaggcagctatgctcaccactataccatcaacaccacactcttttcttttctcttctttttttttttttgagatagaatctcgaactatcgcctgggctggagtgcaatggtgtgatctcggttcactgcaacctctgcctcccgggtttatgcgattctcctgcctcagcctcccaagtagctgggattacaggtgcataccaccacacgtggctaattttttayatttttagtagagacggggtttcactatgttggccaggccggtctcaaactcctgaccttgtgatccacccgcctcagcctcccaaagtgctgggattacaggtgtgagccaccgtgccctgccctaatagtaagtttttcaacacttgttgccctccctccctcctttctcttgaagtccccactatctatttttgcagtctttatgtccatgagtacccaatgttaagtgagaacatgtggtaggtatgtggtcttctgttcctgagttaatttgcttaggataatggcctaatctctattgtgacaaaggacatgattttgttcctttttatggctgcatagttttttagtccaagtgtcttccagcagtcataaggttggaatttggaccaagtcactgacgttcttcccatctctgttagtctgcaattctgtgattccattatcagaaggtaatggaaaacatttttttttctttaatgataaaaatatcaaggtgtttgctctagatatgagtgtcttacttgtgggaactttaccactttttattattttgttccttttctctgctggaaaygcgtttgctgtcaatattatgccatatatcgctgtgccaacttaagttgccgaagggaaaggctttgttctcaccgctgctsatttgtctctggttaaatagtttgccctctagcatttgtatatgattgctagatggccggatttaggaagtgcgtttatagcttctagtgaatgactttctgagtgaacaaatacagagagaccctaagtgtcatctttaattattaattaggaagtgattaatattgacttaaaaagtgaatcctctgagccaattgtgaaggaaggaaggtgtgtttagctctctctgccaccgttaccccagagcaccaaccattccaagtgaggctggcggataaacagctgctcatgcatctgtggccttcatcctggtcaaagtattttggaaaactaaatgytctttctgtccaaagtcatctggccacggaaatgcttttccttctattttgagacaaaataactagagtagaaaaatagaagatcttgggtaggsagagtattttttaaactttttattgaagtacaacatgtgtatacagagatatgtacgtatcataagtatataactcaatgaattttcacaaaccaatactcttgtaatgagcacccagatttttaaaaaagaacattatcaatccccctagaattccctttacattcctttccagtgattacaagaaaagtactttcctgactacgaataacacaggttagctctgtcagttttttggcttatttcagtggaatcatgtagcatatgtactcttttgtgtrtctggctgtgagatttattcctcttcttattggttttttcttttttcctaaaagagactgcatcttgctctgtcagccaggctggagtgcagtggaatatcaaagctcactgtaacctcacactcctgggctcaagtgatcctcctgcctcagcctcctgaatagttgcaattataggcacgtgccactgaacctagcttattcttattgttgaaatgtagttgtgaatagaagacaattttccattatttaacttttaaacattaagatatcggatagtgatcaaactaaggttggttggtttgtttcaacttttctttctttctttttttttttttttttttttgaaatggagtctcggtctgtcaccagggtggagtgcagtggcgagatctcggctcactgcaacctccaccttctgggttcaagtgattctcctgcctcagcctcccgagtagctggaactataggcacgtgccaccatgcctggctaattttctgtgtttttagtagagacagagtttcactgtgttagccaggatggtctccatctcctgacctcatgatctacctgcctcagcctcccaaattgctgggattacaggcgkragccactgcacccagcctgtgtggtttttttttctttttttttttaataaggagaatatagctatggtaaagaaaaaatagcctgggcaacatggtgagatcctgtctctacaaaaaatacaaacattagctgggcgtggtgatgtgcgcctatagtcccagctactcaggaagctgaggtgggaggatcacttgcgcctgaagcgatcaaggctgcagtgagctgagatggtgccactgcactccagccttggtgccagagtaagactgtctcaaaaaaacaaaaaagaaagaaagaaagaaaacatacttttttagagggaagataaactggtacaaccttcttggaaaacaaattagtattgtataccaatgagttttaaaattatcagtgttctctggctcagtattttcctaataggaatctgctcttagaaaataagccaggggcccaggggcagtggctcatgcctgtaatccgaacactttagggactgaggcaggcgaatcacttgagtccaggagtttgagaccagcctgagcaacatggtgaaaccccgtctctacaaaaaatacaaaaaattagccaggtgtggtggygtgtaccagtaatcccagctacatgggaagatgaggtaggaggatcactgagcctggggagattgaggcttcagtgagccatgatcgtgccactgcactgcaacctgggcaacacggtgagaccctgtttcagaaaaacaagaaagaaagagaataagccaggtgaggtgacatgagcctgtagccctagcgactcattaggctgaggcagaaggatcacttgggccccggagatcaagagcagcctggacaacatagggagacctctgtctctaaaaagaaaaaagaaacagaaaaatctttacacacatacaaaagggttattaaagtgtgactttttgagagtaaaaaaatttggaaattaagtgtctgtaatgggaaaatgataacatatttacatttgttcaaatgtttataaagaatttaaaaagggatggcaatatgctcagatacagcattaaaataatcaggatgtaaatgtatattcagcttgatagaaacaatttcagatacagacattttaaaaggcactggagggaatgataaaatgtcaacacctgttgtttctcctgtggatrgtgggattatgggaattttccctcattctccaccaatgtttcttttttagtttatattactgtttataagtcaagataaaacaaagaagttttaatcttggcataacccttccaagtcaatgactcgttttcctggggatgttttgggctttgcagcccatctgacccccacaggagcctcagcagaggcctcaacaatgagctctgcatttgtttttacagcttttctgggatttctctcgcttccttgttaggtcagctcaactaccaggcagcctctcccgatgaaggtgccctggtaaacgctgccaggaactttggctttgccttcctcgccaggacccagaacaccrtcaccatcartgaactgggcactgaaaggacttacaatgttcttgccattttggacttcaacagtgaccggaagcgaatgtctatcattggtaagtccccctcagagtctgtctatgaatcgctcatttagatgttgcttgtgcccattgtattgagtggcatcaggataaagcagccagtgaaagagctacttggctcctgggagatttctgcagctttactgaaactggtattgttggctgggcgtggtggctcacgcctgtaatcccagcactttgggaggccgaggcgggtggatcacgaggtcaggagatcgagaccatcctggctaacacggtgaaaccccgtctctactaaaaatacaaaaaaaattagccgggcgtggtggctggcacctgtagtcccagccactcgggaggctgagacaggagaatggcgtgaacccgggaggcagagcttgcagtgagccgacatcgcgccactgcattccagcctgggcgatagagcaagactccgtctcaaaaaaaaaaaaaaaaaaagaaactggtattgttttcttcattcttcactgtgttccctactcaaaggggtagccacagtatctctgaatcttgcaaatgctgctgacgttcttttttaatccctctcttttttttcttttcttttcttttttttttttttttttttgagatggagtcttgctccgtcacccaggagtgcagtggtgcgatctcaggtcactgcaacctccgcctcccaggttcaagcgagtctcctgcctcagcctcctgagtagctgggattacagctgctgacattctttaaccacgtgggctgccagatgctgaatctggggcagcaggtggaacatttctgaagcagcaggtagacatttgtagcagtcttttattttaaacaacacatgctcttttattttttgagcacctctgagtgctctcttctgtacttgatggcagggaagggaggactcascaggaaaagatttctgagaaaagcaaagctatgcttatgaatcaaaatcatatctgcaatgcaggcacataacagaccaccaagtgaagatgaaaatcacttcctaccactgaactgctttaaattcgtaatttgaaataatctcaaacttatagaaaagttacaagaatggtttaaagagccctcatactcttccatatccaccaattgttaacataatgaaatttcatttacatatctctatatatagatctaatatatatctaattatatatatgtaattycattatatatacctatatatatacacacatatatatgtacacacacatacatacaggttattgttttctgaaccatttgagagtaaattgcrttagaaggagcaagattacatgataaaaaaagaaaataaaaatataaaaaagagaataaattgcaggcctaatgtccctttcccctaaatactgtactatataccatagtaggtatttcctaagaacagaarcactcacttatatatacagtgcaatgttcagaaccagaaaatttaacacagtacaatattatctaatcaatagactttatcagattttaccagggaggttcattctttgtttttctggtccaggatccaatctaagatcacaggttatattaggtgatcatgactctgagtcaaggacggttcaatctctttttgatctttcatccattgatatttttaaaaagcacaggctggttattttataggctatccctccatttgcgtttgtctgatgttccctcatgattagagctaggttacacattgttggcaggaagagtccgtaagtgatgctgtgcttttctttaagtatcacatcagaaggtgtatacacacacacacatttatatttatatatatatacatatatttatatatttatatttatatatatacatatatttatatatttatatttatatatatacatatatttatatatgtgtgtatatatgtagatacatgtatatatgtgtatatacatgttttatatatatatatatatatatatatatatatatatatatatatctttttttttttttttttgagacagagtttcactcttgctgcccaggctgaagtgcaatggtgctatctcggctcactgcaacctctacctccctggttcaagtgattctcctgcctcagccttctgagtagctgggattacaggcatgtgccaccatgcctggttaattttgtatttttagtagaaacaaggtttctccatgttggtcaggctggtctccaactgccgacctcaggtgactggcccgccttggcctcccagagtgctgggattacaggcgtgagccaccctgcctagccagaagktatatattattggtttgtctcattaatggggatgttaactttgatcacttggttaaggtggtatctacaagccttctccactatgattgaatttttaaccaataaaaatatacaggtttaactattacaccctccttaggcacacttactgaacgctttctstgtcccttacacagatctagactgattatcatgcttgccatctaccttgatttaaaatctggttaacagtgagggatgtattacaattattgcattaatcaaaaaacccaaaaaaaatggtcattaggagtggtgttgtggtcgaagtattaaaagcagtaagtgttgtgagttcataggtgagaaactacctgttggttggatggagaaaaagtctacaaaagaaagtaactagaacatggcatagcacatggtagggagtcagtaaatatttgttggaagaataactgaggttataaaaaacagagctgactgtgaaggaatctttttatatttatttcactattacattcaatgtagataatgacttaccagttttgttgaaggcaacacttttctagaggaactgatggttttaagctaayagtgaattatgagatagtaacatttcaaattaactttataaatgtagttttctattaaaaaatcaaacttagctgggtgtggtaactcacatctgtaatcccagcattttgggaggctgaggcaggaggattgcttgagcccaggagttcaagaccagcctgggtaacatagtgagacctccaatgtctataaaaataaaaattagccaggcatggtggcatgcacctgtagtcccagctactcgggaggctgagatgggaggattgcttgagcctggggggtcgaggctacagtgagccgatactgaactgctgcactccagcctggacaacagagcaagaccctgtctcaaaaaatatatatataaaaaatcaaactttgttgtgtttatttccttcttttactaccagtaagaaccccagaaggcaatatcaagctttactgtaaaggtgctgacactgttatttatgaacggttacatcgaatgaatcctactaagcaagaaacacaggatgccctggatgtaagtttcacttttattctttctgcaagggattctgaacttaytctctgatgctgtctgttaagtttgcatgaaagctgtatgttaactgctgaccctccctttgctttgcaatagttggggtggaaagagcagtaaagtaggaatacagccacctgggtcccagttctgcccctgccactgacttcctgggatatcaccatggtgccctctcccagcatgtgggtcttcaaggtctataggactgaggcaggggaatggcttagctctcttccartggccttgagcaagctacataaccatactaggttgtagtcttactatgtgtgtggtccccaagacctccactaacttcaagttgtagtgcaaaggaaggaaagcattcatatgtgacaggatgacagagctgactataggtcacatcttgtctagccaagatggcagaagcggttcaactgattgagtatttggtgtctcatgcctgtartcccagcactttgggaggccmaggcgggtgtatcacctgaggtcaggagttcaagaccagcctggccaacgtggtgaaaccccgtctccactaaaaatacaaaaaaattaactgggtgtggtggtgggcacctgtaatcccagctacttgggaagctgaggcaggagaatcgcttgaaccccagagggagggggtagagtgagccgagatcgtaccattgcactccagcctgggcgacaagagcaaaacttggtcaaaataaaaaagatgtgactataaagtaatgagatgtttactggttcatgttgaaactgtttaaaatgtttaaatcaggctgggtgcagtagctcacgcctgtaatcccagtactttgggagggtgaggtggcagatcacgaggttaacagatcgagaccatcctggccaacatggtgaaaccccgtctctaccaaaaatacaaagattagccagrtgcagtggcacccgcctgtaatcccagctactcaggaggctgaggcaggagaatggcgtgaaccagggaggcagaggttgcagtgaaccgagatcgcaccactgcactcaagcctgggcgatagagtgagacttcatctcaaaaaaaaaaaaaagaaaaagaaaaagaaaaaaaaagaaaatgtttgaatcgttcatcatgggaaaattgccagatactctttyccattaaaagctttgacctcagctttaacaatggcttgtgtattttagaattggtttgagggaataatgctyagtggagagtycataggtgattggacttgtatcacagtttgttggaacaagttataaagttgtcaggttcgtgcttatgtcattacaccccaaggcagctcccttggtctgatattttcctagtcatgaagagaaaaagagaaaatgagaaaatgagaaaggtaatagaagatttagaagaaaggtaagcttttccctttggaaactggaagtgcagtcctggaccctatagaagtttagaaaagcaaagtctattataaagtgatgtttaggctgggtgcagtggctcatgcctgtaatcccagcacgctgggaggctgagttgggcagatcacatgagctcgtgagttcaagaccagcatgatgaaaccccatctctacaaaaaaaagtacaaaaattaccaggcgtggtggtgcacacctgtagtcccagctacttgggaggctgaggtgagaggatggcttcagcctggaaggcagaggttgcagtgagccgggattgcatcactgcatcccagcctggatgataaagccagaccttgtctcaaaaaaaaaaaagtgacatttaatcccctctctaaagtgtatttgtacagaatctgtcatgtttaatgatctctttttaaattctgttagtatattacttcaaagtaaaatttcagacttgatcctgaattacataaattaactattctttgcattggtggatttatttttttaaataaaacagatctttgcaaatgaaactcttagaaccctatgcctttgctacaaggaaaytgaagaaaaagaatttacagaatggaataaaaagtttatggctgccagtgtggcctccaccaaccgggacgaagctctggataaagtatatgaggagattgaaaaagacttaattgtgagttttagccttaataactttttctttgatattctaagcagaattgaaatttttattaagttttattgaatatttgatctcatgcytaagagataattgtaacttcagcatttgacactggcacaatggaagaaggttatttcttttattcaccaaaataggagcagaacagaagttgccattatgagaaaccaaaagacaaaatacattaggagaagttctaatttaattccataatttgtatatcacttattaaaatttattataatttttaaacaataacaaacctgcatctaatacttattacattgggggaattaccgaaacaattcatattctgcaaaatcttgaaataagaaaaatatattgtttctaaaagttttccaaatttaatacatagtttttgtagggtttagataagtggaaaatattcaacaaatagctagtattgcaactggtttacggtttatgtcagtataaagccacaaatacacaagaaaagtgtatttttaacatccttgattttgtacttgcatttttgtcttggtaaattaaatagttcatcctttagggaaaaagtttttagstgtgttggtttgcagtaattgtgaaacatggcagccttccctgttaacactggccattggccccaggagagcagcaaccaggatgtataattagcccttctttttacaggttggcaacctgtaattacagaaaacttttggtttgtttgctaattcctttttttttttttttttttttaatatacattctagctcctgggagctacagctattgaagacaagctacaggatggagttccagaaaccatttcaaaacttgcaaaagctgacattaagatctgggtgcttactggagacaaaaagggtaattcattgtgcagggaagcatatctgttaattcacaaatatttatagctgccgtttcctttgcccaagatgacctcctcagacttttcatcctgtacaaacactgtttctttggacggaagatgctttttctgagaaaccctcctctgtttttccagcacatycttctgcatcctttcctgatccccctcagtagcagtttcttccttataatttagctcctggccatgtcttgctgattataatyggtcttatctctccagccagacgtgggttcccgtcctgaaagggccatccctcttgtccctctgtccttccagtgctttgacatttggtgggcacagagtagaacaatacaaagtactgaacaataactttggttttcttgccaattttattgcttggcaataaaattgtayacctaaggaaagaacgattttaattttttaactttagaactcaacaagcacttgtttggtattgatactttactttgtaagccttccacaagaaatcaaataatgtctcttgcgctgaaatcgtcaacgggttacacactctgcaaagttatgggaagcacagccctgaccttaaataaatgccaaattgggtggtaatttaaaaggaaaaaaaatcttcacgtaagggttggtggaaattattatgcttccctctgcccccgccccccgccaataacagagtaattgaaccaggaactgagagtgtttagtaatttaatgaacattggtttactaaataaccagtttatatgtttgataatatagcacattttattattgaaaacatttcaaattagactttgactttcacttgttttattatggagaaaaggatttttcttctgcatgtgattcctacagattgctatagaaaaatagtgtgtttgtgtgaatctggttatgttcatgaactaaaaaatatcattactaggtaaaatcaattattcagttcaacagtaagaatgagcctggcaaacatgacaaaaccccatctctagaaaaaacacaaattgtttggtggcttggcagcgagttgcgtagtcccagctacttgggggctgygggtggtgctgagatgggcagatcacttgaatcctggaggttgaggctgyagtgagcagagatygtgccactgcactccagcctaggcagtgggagtgagatgctgtctcaaaaaacaaaataaaataaaataaaaacagcaggaatgacatttgacttaattttattctattgtagaaactgctgaaaatataggatttgcttgtgaacttctgactgaagacaccaccatctgctatggggaggatattaagtgagtaaaagcctgcagtatgaaattaygtaatagctcatctttgcaaatgcaagactgtctgtagaagatagcagatatgaagaaataggggttacgatgtgtcacttggggcagtttcctcatgtttaaatgaggcaagacaacaacaggcagttccaagtaatcaaggtgcagcctaaatttgagcagattttacttttakggaaacttggggmccttcagaggccatttttctccattccttctcagctcaggccaggcgcagtggctcatgcctgtaatcccagccctttgggaggccgaggcgggtggatcacctgaagtcaggagttctagagcagcctggccaacatggtgaaaccccgtctctactaaaactacaaaaattagctgggtgtggtgcccggtgcctgttatctcagctactcgggaggctgaggcaggagaatcacttgaacccaggaggcagaggttgcagtgagccaagatcacgccactgtactccagcctaggtgacaagagtgaaactctgtctcattaaaaaaaaaaaaaaactcggttcacctactaaaaawtccgtaaaaagcctgtaatatcgctagcaaattaatatgaattatagtcctattttgctttttctaggaacttttacttttgaaagggaaatagaagaaaggaaaaaaaaaacccaaaacttttgcgggaaggaaatgtgtgggtgggttacatcatgtaggtcccctgtaatctagtctaggtggggcaggcctgataattcaaatgttagcatatgctgaaacgtttgttagctttgaatcagagtcgcagcagacctggaaatgtatgatgaaaaagccctgtcttgttctgaagctataaatatgctgcacacagttactgtgatgtgtttactgatggcctgacagttcctcaagatttttccctacagagcttctctcaggccagcatgaggtcagattaaactgttaacatacacatttgccaggtgtgataaagtgaygagggaattgatggtcaatattagtcttatttctaatgatggtgataaagcattttctagttgttctagtatattaggtattccgtcaaattagacaaaatcagtagccttatgatctaaatcagttccatttagaactgatttagtttatgtgcccaaatagaggtacataagccatgcccctttgtgcttttaggttttaaaaaagtagcaacaggctgggcacggtggctcatgcttgtaataccagcacattgggaggccgaggcgggtggatcacgaggtcaggattttgagaacagcctgactgatatgatgaaaccccgtctctactaaaaatacaaaaattagccaggcatggtggcatgtgcctggaatcccagctactcgggagactgaggcaggagaattgcttgaacctgggaggcagaggttgcagtgagccaagatagtgcyactacactcctgcctgggtgacagagcaagactccrtctcaaaaaaaaaaagtagcaacagacaaataaatgcttaatgcttaatgagtttactttagtagttttgggcttcaagtaatctgattaattactatatggctttgtttattttttgtagatggggctgtaaaaaaatttctggtctctcttttgaaagtcttaaaaattggtcccgaagctaaagtaaaagataaaatgtatgcaagtagcaaatgttgtgaccatgcccttagctgagtttacctttatagagagaggaatcatcttcccaggtggctcttaaattgatgattcctataaaatgatttgaatagaaggtatcttcattttttttctcttaayggcctttcaatgatttgtcttagtcactcacttttaacttgaaaatgagaattaaattgatgtggaaaagggatactagatacttaatcctctagtgcagtgattctccgtggggagtgagtttgccttccagggaccctttggcactgtccagagacacttgcttgtttcagctgcagagaagtgctcctggcttctagtgggtagaggccagggatgttgctaaacatcctccagtgcaagggatggccacacaaaataaaggattattaggcccaagacatcaagagtgcaaaggctgagaagccttctttggaaggagaagaacaatggctttttgtatgtaatagtaagagtcctgagccagaagttacaagataactgagtcctcattctagttttcctatcaacctgcagcaggcaaatcacatcaccttcctctggcttgatttccttatttgtaacatgaagagattgracaagatatttaaggtcccttccactccaaaatttcatgactcatttttctatcacatgaaagtgttacaygtagccttgtcacatatatcattttaacacaaacatttaatttgttgatataaagcactgagaatttctcaaacacagatatagttttgtttatatgaaaataagtttattcctaacaaacaatagccagtattctaattcagatcaagattgcctttccttttttttttttttttttttcttagaaagactctgtcacccaggctggagtgcagtggtgcaatcttggctcattgcaacctccgcctcctgggttcaagtgatcctcatgcctcagcctcccaagtaactgggattacaggcaccgccaccacgcctgggtaatttttgtatttttagtagagacagagtttcactatgttggccagtctggctgcgaactcctgacctcgactgatctgcccgtctcagcctcccaaagtgctgggattacaggtgtgagccacagtgcctggcctaagattgcctttcttctgttgctgtgtatacattttcaactgtatcttcctttgactgtctttgaaaaatgatgaattacatggtacccccatggtggaygaatcgagacatagtaaaattacatgtcgctcagttaaaaaaaaaaaaaaaaaagggctggccaggcgtggtggctcatgcctgtaatcccagcactgtggggggctgaggcgggtggatcatgaagtcaagagattgagaccatcctggccaacatggtgaaacccygtctctactaaaaatacaaaaattagctgggcrtggtggtgcccgtctgtagtcccagctacttgggaggmtgaggtggaagaatagcttgaacctaggaggtggatgttgcagtgagctgagataacaccactgcactccagcctggtgacagagcgagactctgcctcaaaaaaaaaaaaaaaaaaaaaatgggcaaagcactttgagtagacatttttccaaagaggacatgcaaatggctgataaacatgtgaaaggaggctcatcatcactaatcattaggggaagataaatcaaaaccaaagcaagataacacctcacaccctttaggatggctactatcaaaaacaaaacacaatagaaaataacaatcattgttgaaggaacctttgtgtgttgttgatgaaatatataaaatggtgcagccactatgcaaaacagtatggtgatgtttcaaaaaatttcaaaaaggattaccatatgatkcaacaatcccacttctgggtatatccacaaaataattgaaagcaggatctcaaagagatacatgcacacccatgttcacagcaacactgttcacagcagccaagagatggacgcaacccaggtgcccatcagtgagtgaatggataaacagaatgtggtgcttccacataatggaatatattcaactttaaaaaggaaggaaattatgacatatattatatagatgaaccttgaagacattaagctaagtgaaataaaccagtcacagaaagacaaatactgtttgatttcacatatatgaggtatctagagtgctcaaattcattcaaacagaaagttaactggaagttaccagggactggagggcgagtgaggtgaggtgttattgtttaataggtatagagtttccgttttgcaagatgaaaaagttctagagattggttggataacaatgtgactatagttaacactactaagttgtacacttaaaaatggtcaaagcccgggatatggcaaaaccctattgctacaaaaaatacaaaaattagccaggcgtgatagcgtgtgcctatagtcccagcaactcaggaggctgaggcaggagaatcacttgaggctgggaggtcraggctgcagtgatccatgatcatgccactgctctccagcctgggtgacagagtgagaccctctctcaaaaaaattataatgaaaataaaataaagaaacaaaaataggtaagatggtaaactttgtttttttgtcacaattttttttaagtcaaagttatctcagagtcaagggcctatttagggtcttacactttaaacactgaaatttggtttcccctagttctcttcttcatgcaaggatggaaaaccagaggaatagaggtggcgtctacgcaaagtttgcacctcctgtrcaggaatctttttttccacccggtggaaaccgtgccttaatcatcactggttcttggttggtacgtatcattagtgtatctgtgcctttaactcaaaagaaagaagttcatttggagccacttttagatgctttcacatgttaactgccaacctaaaagtctcttagcctatacatgaaagtgtggtttttccaagtttgagacttaataatatatgatatatgaaaggatgtataccaaagaggtaaaagtggttatcttggtttactaattaatgggttttttcattttcttctttatagattgttagattttctaaatttttgttgcatatatattttataagctggatgtggtggcatgcgcctgtagtcccagctcctctggaggttgaagcaggagggtggtttgagcttaggtgttcgaggctgcagcatgcaatgatcacacttgtgaatgaatagccactgcacttcaacccaggctatacagcaagaccccatctccattgaaaaatatatatatagctgagcacagtggctcacgcctgtgctcccagcactttgggaggccaaggcgggcagatcacaaggtcaggagatggagaccatcctggccaatatggtgaaaccccgtctctactaaaatacaaaaaaaataattagccaggcgtggtggtgcacacctgtagtcccggctactcgggaggctgaggcagggaaattgcttgaacctggaaggcagaggttacagtgagccgagatcgtgccactgcattccagcctggcaacagagtgagactccatctcaaaaaaaaaaaaaaawawaatatatatatatatatatgtgtgtgtgtgtgtgtgtgtrtatacatacacacactaaacactgtgtacatcacacgccacatatatatacatgttttggttataaaatcaaatttatttgtcaaatataatcagtgacataatccaaaaattatccttcacataatttaaatcttgggaatggtactcctggggtaaaactaaagtgaatgtaaccttttccctctctgatttcacagaatgaaattcttctcgagaaaaagaccaagagaaataagattctgaagctgaagttcccaagaacagaagaagaaagacggatgcggacccaaagtaaaaggaggctagaagctaagaaagagcagcggcagaaaaactttgtggacctggcctgcgagtgcagcgcagtcatctgctgccgcgtcacccccaagcagaaggccatggtggtggacctggtgaagaggtacaagaaagccatcackctggccatcggagatggggccaatgacgtgaacatgatcaaaagtgagtcatgcacccacggccagtgaggcccaaygtgctagagaggagaaatggctggaatgtgtagggggtggattttctttttttagattttacagcttaggttttcatagagcagatgtttcataaagtcacttaaccatgacaacgcctgtgaccctacccccagaaagcccacagcccatcaggaggaaagagtatcactgacagggcttctgaaggatgcgaagaggaaaataaggtctatggggggaaatttatccttatatttttattcttttatatagatgttgtgtatttttttctctcttactggttctcttcccatattttgggtttattaaaagccctgatattggctgggcacagtggctcacgcctataatcccagcattttgggaagccgaggcaggtggatcacaaggtcaggagttcgagaccagcctgatcaagatgctgaaaccccgtctctattaaaaatacaaaaattagccaggtgtggtggtgcacacctgtaatcccagctactcgggaggctgaggcaggaaaatcacttgaacccaggaggcggaggttacagtgagctgagatcgtgccactgcactccagcctggacgacagagtgagactccatctcaaaaaaacaaaacaaaacaaaaaaccctgatatttaataagttttgtaagacataaattattgaactctggctggtgcttgctttgacaatatcattctccttcatctaagcatttctttctgggactttcttcctacctttggtaaatctgtgggaacttcatcattgggtcacctggtgtgagtttagagtaacatgtttagcactgaagaaaagcttccacgtgctctcatcatcctcctcacctccctagaaggctgcctttttctggatgctagaatttaagtccacacaattaaaatattgagtcctgccatgcagaaatacagttgtgctggtattaaagcctgcagaagcacacccacagccctcatctctatgtctgaattctgttcctttttcctccctctgtcactataagggagtatcttgtattaaaaatactcaaactaatgacctggatattcrtcctcatcctattgccaaaatccggtgtcaccttgggcttatgctcaggtttcagttttctcatcggaaaagaaaataatccctaatgtcacctccagctctgtcgtattattatcactgagctgaagtattacctgactgtacataggtaattgcatgttcctgtgatgctgggttgcttaaatgcattatatataactagacttttcagtctattttgtgactcatgagtctgtctctttcttttcttagtctcctcctcctccttgatgtatactaagaatattccaactttatcttcctcaacaggagtcagctgtatgacgtatgtcatcttgccttctttatcagtgcgtatgtctgtggtcactagcagtttaattcatccacactgttttttttttttttgcatgtgcttgccctaccatgcgaatggtattgcttgctcggagttagatctatctctttcctccatagccagccagctctagtttattttccattacgtacctttaacgtaactagccgtgccaaaakgacaagtcaaacatgatttttattcagttataaagtagccttctagataatgggaggggacgggtttgctttggagatttatcaactgattatgtgacttagacttgaaacattttgttcctctgagttcaccaatacataatgagagggattgcacmaagtcaatgtagataatcttagaggggcttgtttttcttaagttgtcttaaaatttttattaagcactgttatatgccaggtgcatttaaaaaaaaaacaaggtctccctctgtggcccaggctggggtgcagtggcatgaccttggcttactgcaacctccacctcctggcctcaaacaatcctcccacctcagcctcccaagtagctgggactacaggcatgagccaccatgcccagctaatttttgtattttttgtagagttgggaatttgccatgttgctcagsctggtcttgaactcctgggctcaatcagtctgcctgcctcagtctcccaaagtgctaggattacaggcatgagccacctcacctggccccaggtacttttatatataagttatagagcatccctttgggataaaaatataggaaactttaggggtctccttagaagttatacaagtagtattagtgcctttatgtactttgtaaaagctgtcatttcttccaaccacatcaataacaatatacagaaagtttagccaagtatggggcacacacyggtagtcccagctacgtgggaggctgagacggaaggattacttgagcctgagaagttgagactacagtgagccatgtttgtgccactgcactccaccctgggtgacagagcaagaccctttctccaacaacamaaaagaacacacacacacacacacacacacacacacacacacacacacaaagaaattgttggtcataaagtagtcgagtraaattattcaagtgtcaaaaaataatctgagcatttgctaacattcacgtttagcagtgtagtctggaagaagtgaaggaatcatgacccaccatgtttctgcccctagcaaggatccaaggactatcataggctgccttctccctctatcctacctgaagatatctcataccagctgggtggatgttgtctcttcttggtcttagaccctgagaatgtacgtgaagcaggagagagataaaggcaaggtggggcatggtggctcatgcctgtaatcccagcactttgggaggccaaggcaggcagatcacctgaggttgggagttcgagaccagcctggccaacatgatgaaaccccatctccactaaaagtacaaaaattagccgggcatgggggtggcgggcacctgtaatcccagccactcgggagcctgaggcaggagagtcactggaacccaggaggcagaggttgcattgagccaagatcgcaccactgcactccagcctgrgcgacagarmaagactccatctcaaaaaaaaaaaggcaagagggattattgctgtagcgaggaaatattctttttgttaaggaatgataaaagaatgtctaccagtgaggcacctaacaccgcatttgagatttcaggaaactctaaatgcctgtacttaaattttacaaaaaagaccaatgttaccttatagtgtatctgttcagtgcttttggttgccctgggaactatgacagtgttcatttcacatttgtccttggtctgctcagcgggaaggttgaggactggataccagggcctggggcagggcttcctcttcctcagccacataagccaagagaatctcagcattttcctcagtggcttgttcaggaaagaaaaggccatggtttggcaggaaagagcaagtttggcaaccatgctggtcataggaaatatttgtgtgttttcaaagagaacataaatattatatgagatgcagtttgttctgtttttttagaagtgttactgaaaacgtaggtttggatacatcactacagttatgttttgaatttgccagaccttgtgttctgtaactagggcaggatttttgaagcttctttttagttggaacgccgcagcattgcagccacttttcagggtctgagcmatgataggttgtgttctccaacatatcttttctaaatgatcttgtctatcttcacattcgttacttttaagacccagacaaaactaatcattctctaatttgaaagtgttatttatgactattggaagcataaataaaattgtgactttaattttatatattctggaaaccttcccccgtaaagaaaaaaaaaatgtcttaaggtcccagagggccatgaataagactttgaaagtttaatagtttcttggttaaaactcttttgattacaagtattggagaacaaccaaagctagcttaagaaaaaattaaatttgaggagtgggagacgaggggagggaacctagaggatgggtcaataggtgcagcaaaccaccatggcacacgtatacccatgtaacaaacctgcacgttctgcacaggtatcctgtaacttaaaagaaaaaaaagaaaaaagtaaatttatttaaacacctcctgttgtccaagaagaagccaggcctcaggaagatactggaacaaggacatagatttgcaccaggaaccccgtgtctgtctgtctctctccccttctctctccctttcctccttcttcccctccttctctctctcccctccctcccttctctccccacycttctctccccactcttctctccccccattctctcccyccattctctccctcctccccacccctctctccccactactttatttctctgycccttagaaatcttcaggaagaaatatatctatttcggccaggcacagttgttcatgtgtgtaatcctagcactttgggaggccaaggcaggtggatcacctgagttcaggagttcaaggcctgcctggacaacatggtgaaaccccgtctctacaaaaattagctgggtgtggtggcgcacatctgtaatcccagctactcgagaggctgaggcaagagtatcgcttgaacccaggaggcagaggttgcagtgagccaagactgcgccattgcactgcagcctgggtgacagagtgagacttcatctcaaaaaaaaaaaaaaaagagagagaaagaaatataactatttcttacctcaagaatttagaccttaaaattctagacacaaaataactgacttctaattccagaatatcaagagagagactggctcagcttgggttttctgtcagtcagggtttagcacaggaaacagaccccagttggtatttaagcaagaaaagattcatacaggggactaggtactttcaaaagctctggatggtctacagaagcagggtctaggctgggtcacttaccagaagagcttctactcttctggtaagtgrtaagaggttcctctaaagagcttccaaattaagaagcctttatagttgcctgtcaacatccaggtagctggaaagtagatatgagctctgctgcagaaatcccaaaagaggaagcgatgctgggctctgattcacttctgcttccaagtcataagtggatctaaacagtggaacctaattcacaaagagcctagctgcaagggagtctgggaaatgtagggtttttatttcctttcccacctctctaattagaacaaggatggaatgaagttgggggagccgatttgtagtatctaccacaaattacatatctgcccatgactgacacagctgttgccaaagaggcaaggacacagtgtacacatgggtgcctggggctcaccctgtggatggaagggatggctgtgatcttggcagataatccaaatggaattcgtcacccacatgagatcctttcccagatatttatggaggccctactgtgtgctctgtttagcaacttgtaactcagactttgagttgagttcaagagctgggggtgagggatggtgagcaagagcttctgtattattgttccatcaatgtctgtctttgttttttgtttgctatggaaccatttttatcaactgatgttttgcctcacaatcggtttatgatccacagtgttttctccctctgccccatagctgcccacattggcgttggaataagtggacaagaaggaatgcaagctgtcatgtcgagtgactattcctttgctcagttccgatatctgcagaggctactgctggtgcatggccgatggtcttacataaggatgtgcaagttcctacratacttcttttacaaaaactttgcctttactttggttcatttctggtactccttcttcaatggctactctgcgcaggtaatgtaatgttgttattattgttatttactaagtagagctcttaaatgaataaaaawctagttctgaaaagacaatttatttcttctatatttgtagttttggggctgtgtctccttacagttggggcataattaagaatgatcatgacttctctaaatgtttctggtgctgtaaaaacattttaccttagaaaggaggggatttggccaggcatggtggctcacgcctgtaatcccagcactttgggaggctgaggcaggtggatcgcctgaagtcgggagtttgagatcagtctggccgacatggtgaaacctggtctctactaaaaatacaaaaattttcmgggtgtggtggcaggcacctgtaatcccagctactcgggaggctgaggcaggagaatcgcttgaaccyrggaggcagaggttgtggtgagccgagactgcgctattgcactccaacctgggcaagactttgtctcaaaaaaaaaaaaaaaaaggaggggatttgcttgtatgtttttatctttatctttggttattttttcatgttgacattaagagtagcgataacagggctgggtgcagtggctcacgcctataatcccagcactttgggaggccgaggtgggcgggtcacctgaggtcaagagttggagaccaacctggccaacatggtgaaaccccrtctcaacaaaatacacaaaaattagccagacatggtggcgtgtgcctgtaatcccagctacttgggaggctgaggcagaagaatcacttgaacctgggaggcagaaggtacagtgagccaagatcacgccactgtactccagcctgggcgacagagtgagactctgtctcagaagaaaaaaaaaaagaatattgataacaggccaggtgcatagagttttgcctataatcccaacactttgggaggctgagatggggagatcgcttaaggccaggagttcgaggccagcctaggcaacatagcaagacccccatctctattaaaacaaacaaacaaacaaaatgttaaataaaggaagcagatgagtatgtgctaactaggctggcatgtgtctttgttggtgacatggagcctctgtcatcccctcacagactgcatacgaggattggttcatcaccctctacaacgtgctgtacaccagcctgcccgtgctcctcatggggctgctcgaccaggtaggagcctcgcacaagcagggacacttctggacagatgagaatgcgttagagaagtcccaagcaaacgtttcaatgcattcttctggtgtttacttctttctgatcaaaccctattataattctgttgtcaggcatcaagggtcatggctgtgcttcttgttttgtaataaggaaagaggatttctctgtagtcccagctactcgggaggctgatgcaggagtatgacttgagcccaggtgttcaagtctagcctgggcaataaagtgagaccccatctctaagacaaaaaaaaaaaaaaaaaaaaagagaaaagaggatttctgtgactgggttgaattcattggcacacatatttgttatgttccttttagacagtaagagcttactatgaagatamctgaaggcagggcatggtggatcatgcctgtaatcccagcactttaggaggctgaggcaggcaaattgcttcaggtcaggagtttgagaccagccctggcaacatagggagaccccatctctacagaaaaatttaaaaattgtgggcatggtagtgcacacctgtgaagtcccagctacttggcaggatgaggtgggaggatcgcttgagcctggaaggttgaagctgcagtgagttgtgtttgtgccactgcactccgggctgggcaacaaagtgagaccctgtctccaaaaaaaaaaaaaaaaaaagaaaagaaaaggaaaaaaaggcacccgagagtccaatatgtctccacaataataatttactcattttaaagtcagtttaaatcctttccaaaatttatgtagctagtgcatatttttatctaataccaattcttaaaaagaaagaagcactataaagactaaaaagtaataatttataattaactcatcaacttgtatgagaaaattttttcccaaaggatttgcaacaatatatattcactcaggaggtaaaaacagtagcctccctacatatttttggacattactaatttgttttctttccataagtagcaaagtaataaacttatacctagcccttctctgaattaaatattaagtaatggtggtctaagcaatgaggttgagctctgcacaccacaaatattgcaggattgatcgattatcttgttcagtttttgccttcctaaaatttaacagcaggctgcaactttttgtgagatattaattataacatatctctgactgctttgacctgatgaataaaataccatcattttgttttmtccttaaggatgtgagtgacaaactgagcctccgattccctgggttatacatagtgggacaaagagacttactattcaactataagagattctttgtaagcttgttgcatggggtcctaacatcgatgatcctcttcttcatacctcttggagcttatctgcaaaccgtagggcaggatggagaggcaccttccgactaccagtcttttgccgtcaccattgcctctgctcttgtaataacagtcaatttccaggtacgtggctttcattggccgtattcagtgtctattggtacctacttatatttctgtatatagggtggcatgcacatccacctgactcccactgcacctgtgccacttacaaaatataaatgctattttcatctcttataccaagcacattttctrtttcttgcctgagtcaaggatggtttagtttctggtccagtattcaagccacatcatgcctaacttgctgaattctgttttcaggatkgttagatcctttatttcttgctaactcyccaaaatgagtgctctgtttttctctggtttcccaacagattggcttggatacttcttattggacttttgtgaatgctttttcaatttttggaagcattgcactttattttggcatcatgtttgactttcatagtgctggaatacatgttctctttccatctgcatttcaatttacaggttggtatttccaaattccaaaaataaatgtacagacaaatgtcattagtttagattttgacataacttctgttaagtaataaaatatacaaggtggaatggctgggcacagtggctcacacctgtaatcccagcattttgggaggccgaggcaagtggattgcttgagcccagcagttcaagaccagcctggacaacatggctaaaccccatctctacaaaaaatacaaaaaarttagccaggcatggtggcacatgcctgtagttctagctactggagaggctgaagtgggaggattgcttgmcctgggacgttgaggctacagtgagtcgtgatggcactgctgtactctagcccaggtgacagagsgggaccctgtctcaaaaaaaaaacaaaaaaaacaaagcacaacaaaacaaatatatacaaattattattgctagtgaaaattaatgtcttgtctggaaattaaatggtgatggtgggttgaaagggcataacatgatgggaggaagacaaattaaaatagctttacaatagcgctgtacgtgtgttgaattagataacttaagacttaaaaggctggataaaagcytattctttctttcccataaaacctaatactggggctagatgtggtagctcacgcctgtaatcccagcactttgggaggccaatatgggtggatcacttgagctcaggagtttgagaccagcctgggcaacatggtgaaaccccatctctacaaaaaatacaaaaattagccaagcgtggtggcgcacacctgtagtcccagctattcaggaggctaaggtaggaggacacctgagcccaggaggttgaggctgcagtgagccatgatcacgccactgcactccaacgtgggtaacagagtgagaccctatctcaaaaaaaagtcagaagtcttgatcacctaactttgcatttttaatcaatgcaatgtcaacaaatgtgctttttttccttatttgctcacttatgtaaatttgccttgtttcaaataatttaccttcccaattttgctttgcttagtctgattttaaaatgtctgttctttgagccataatggatattttggggaggccaatccagttgtaaaactttaccataaatgatctatttatagattatgaaatattaactatgttcttttttttattttattttttatttttgagacagagttttgctttatcacccaggctggagtgcggtggcacaatttcggctcactgcaacttccrccttccgggttcaagcaattctgctgtctcctgagtagctgggactacaggtgcacaccaccatgcccggctgattttttgtattttagtagagayggggtttyaccatgttgcccaggctggtctcgaactcctgagctctggcaatccacccaccttggcytctcaaagtgttaggattacaggcatgagccaccacacctggcgaaatattaactatgttcttaggaaaaaagaaccacagtgatgcatttgccatgttctttacaggcacagcttcaaacgctctgagacagccatacatttggttaactatcatcctgrctgttgctgtgtgcttactacccgtcgttgccattcgattcctgtcaatgaccatctggccatcagaaagtgataaggtataaakaatatagtcctttcccaactctgtccctcacagaaaccaaagcgtttcccaacagcacgtttcctgcaaaattctaagctcatgggaagtttggtaagaatgatttttcatgattgcttctctttaactctatctcacaaataagtcttttggaattgggagtttagtgtgcttgctttttaatacaaaaattaccaaacataaacaaaaaagggagaacagaatgagccccatatatctatctcctcagtttaacaattacagtattaacattttgtcatacaaatcagattgggttttttttctttatttaagaaaaatgtcaccttctgtagcaggatcctttgagctacaaggaacagaaagctgtgactcaaaacatctctacagtagtgcrtcatcattaatcattagtaggcttcaggcccagttgattgagcaatttaatgttgtcaagaaaggattgggctggttcttgccatctcttctctcagaaaccttcattattagcttcatatggatgctggaagatggccagagcagttctgggtatcacttcctgacctatcagtgtcggggggagataagagcctattctgtagctccttaggggccgtggaacttctcacccaagggccccagtacagtgccctcaggtctcacgtgccaaaattaggtcacttgcccattctggactagtttagcaagggaaatcaacctgcccaccgcccatgagaaatgtggctgtgaggggttggggggggcaatctgaatacaatcaatttccattagaaagaaggagagagtagaggctactgaggcaaccttcagtatccctcgggtctcccttttgcagtgccaacagtatgcagtaacaacccaggaaagaggccctactgaattttctctttgactgtacccatctggtctgaactagaaaagggcactagcttcagaggagtgggaatcttggctttgcattttctagctgtgtgaccttggaaaagttaaataaccttcccttggcttcaatatatatctccaggtaggtaggtaggtagatcgattgatcaatcaatctatgtatagatatagagagatggatatagatttatatcatcatatatatatgtcgatatagatagatagatagatagatagatagatagatatagccaagcactgtggttcatgcctgtaatcccagaacttttggaggccgaggcaggcagatcacttgaggtcaggaccagcctggccaacatggtgaaattctgtctccactaaaaatacaaaattagacgggtgtggcagtgcgtgcctgtaaccccagttactcaggaggctgaggcaggaggatcgcttgaacctgggaggcagaggttgcagtgagccaagatcgtgccattgcactcaagtctgggtgacagagcgagactgtctcaaaaacaaaaaaaaagatatagacacacatacacatacacacacacacacacacacacacacacacacacacacacaagtggggacagaactgcctgcatcaaaatggggcaggtgtcaggggagttcatcagtgttcatttctgtcaaccgtctggccaggcctcctccctggtgtggatcttattttcatccctccccatytctcccccttgcagatccagaagcatcgcaagcggttgaaggcggaggagcagtggcagcgacggcagcaggtgttccgccggggcgtgtcaacgcggcgctcggcctacgccttctcgcaccagcggggctacgcggacctcatctcctccgggcgcagcatccgcaagaagcgctcgccrcttgatgccatcgtggcggatggcaccgcggagtacaggcgcacmggggacagctgatcccttacccccaggctgggatgcggccacaaagcacgtctatttttttatgaaagactctcaggactttgtgtgtgtgtgtgaattgcattcatcacaaagatattgaagacaataaataatctttataacaaactccttgggttggactattaaacaatagcagagccaagaaataggacttttaaaagtcctattattcggccgggcgtggtggctcaggtctgtaatcccagcactttaggaggctgaggaggggagatcacctgaggccaggagttcragaccagcccagccaacatggtgaaaccctgtctctaccataaattaaaaattagccgggcttggtggtgggcacccgtaatcccacctatttgagaagctgaagcagaagaatcgcttgaacctgggagatggaggttacagtgagccgagattgcgccactgcactccagcctgggtgacagagcaagactctgtcttaagaaaaatttaaaaataggccgggcatggtggctcatgcctgtcatcctagcactttgggaggccaaggcaggtggatcacttgaggtcaggagaccagcccrgccaacatggtgaaaccccatctctactaaaaatacaaaaattagctggaaatcgcttgaacctgggaggtggaggttccagtgagccgagatcgtggcactgcactccaacctgagcaacagagtgagacaccagctcaaaaaaaattttttaataataataaaagtcctattattcaactggttatgtacattatggttgaaagggaacgttttaatccagtctcaatccagggcaatagaattacaaagcatgttgtatttcagttcaaatggtattgtattataaaattacagttacattttcctttckgtgatcttcagcataatttcccagaggcccctttttcctccctataggccatcttattaacagattttaaaatttatagtaatgacaaatgacttatcagtgttcatcatctgaaagctaagtggttcgttcaatcactttttcaaagttgatagtagattgcatggtttcatgtttcctcatattggtttattaattctatttaatcaaggaaaataacttcagattccataaagtttcagtttatttttagtttactactaggtgagatagcacattacatacttttactatcaaatattattttagcagcttcccatagtaccaaatgatttgattccctactctcatttyttaaagcatataaatatttatgggcttaaaaagggggtttttaaaaactgaggatatcagtaataaattgcagaatattttgcaaagctttcttttggaaagcaaacttttgtgcctgcctatatgcaaagtattttatcagggacttgaacaaagacctcactctttttcacttgtcttatgtcgagagaaaaggttattggcagccacattcctaagactggggaatggtgtgtccttttaaatttgaagatractttaggtaattatggaaactcctcaaagaggagaaagtaatttttttccagacatttttctcattctgtgtctttcacacactagtttccatagttcgagaattctgttttttaccattgggctgtgaatgttcacaatatcagtcctgttgaattcctatgaggtaatcacaatgtgtatatgttcattttctaggtatgataaaagaatrtatggctttttattctgtggaagtaaaatcctgaacgtttacaacttttccttaacttgtaaataaaaaattgtaagttttttctttttttacagaaaacttagcttgtgtaattctgttagtttcagatttctctcctgtttttgcaaattgtgggaaagattgacaatgcaaatgtgtcaaagacatactgttgggtgcaatattaacaatwttaaatgcaaatttctttggataaattatttctatattctgtaaatctgagatttaatgtatattttgtttaaaaaaatgatttagtaaaatctttgaaaagtatgatcttctaaagtatttaaattggcttttgttgttgttgttatttttaagaatagggtatgtgacagaagaatctagtcccacaaggtttctagaggaatgtaggggtcctttagtagtgagaaagtcggggacagggaaactaagtgttagggaagaagtgatggagaaagggaaactaagtgttagggaaaaggtgatggagaaaaggtgatcaggaccgggcactgtggctcacgcctgtaatcccagtactttggaaggctgaggcaggagaatcacttgaggccaggagtttgagaccagcctgggcaacatagcaagactctgtcttttcaaaaaaaaacatctcagtgtagtggcatgtgcctgtagtccctgctgcttgggaggcttaggtgggaggatcacttgagcccaggagtttgaggctgcagtgagctacgattatgccactgtactgaagcctgggtgagagcaagactctgtctctaaaagaattaaaaaggtggccagactttagagacagaggggtaaagatttagagttagggagatcagccaggcatggtggctcatgcctataatcccagcactttaggaggctgaggtgggcaggtcacttgaggccaggagtttgagaccagtctggccaacatggcgaaaccccgtctctactaaaaatacaaaaattagccgggtgaggtggtgcacacctgtaatcccagctactctggcagctgaggcaggagaattgctggaacccaggaagcagaggttgcagtgagccatgattgtgctactgttctccagcctgggcaatggagtgagactctctccaaaaaaaaaaaaaaaaaaaaggaagattgagtctgggtttttccaactgacctcaactctttagccagaatgaaaggaaaggtaaccctcaaccaaaagtaaggactggggctgggcacggtggcttgtacctgtaatcccagcactttgggaggccaaggtggtgggtcacctgaggttaggagttcgagaccagcatggccaacatggtgaaaccccatctctactaagaataaaaaaaagcagccaggcgtggtggtgcacacctgtaatcctagctacttgggaagctgaggcaggagaatcacttgaacctgggaggtggaggttgcagcgggctgagattgtgacactgcactccagcctgggtgacagcgagactccgtctcaaaaaacaaaacaaaaaaagtaaggggtgagaagtgagcagatagtcctagaaatacatgacgaatcgttggcagaaaaatgagcaaagaggagtgagtgaggaagtgagtggcaaacctggggtttgaggccgtgggagtctgacsaggctgtgggagtctgaccaggctgtgggacagacagctcttggacgcaagggaagctgtgaccccactaagaaggttctctctgcgtcgagatgggagactctttgggaggcaaaattagcagcaggtgatagaaaagtatcagtcttggggtgcttgggctgggaggagatgggcaaattattagcctctgcaatagaaatggcagaaaaattgagcagacctgggagatcatccctaaaaaaataaaggtcactttttcctgcaatatactactgtatttaagttgtttgagggataaatgtttttaatcaaagagcaccacctaaaggttcttagtcatgttcagcactagaaactgctcagtaacaacatctgatgggaataaaatgattcttgagagacttcaatgtgatagcaaaatgtaccctaatggaatctaaatatattttaacaattgctgccttcatgtgatgtgaatgaaacttaggaaaattgtcagcttctaaaagtcctgctagaaagttagggctgcgctacaacttctggggcatttataaaaataaaaaggcctgttaaaacactgaaaacaacacaacgtagatctcaggacaaagtggaggttggggcccttaaaaataaccactgtaatgcaatcattttctttctgctaaaaaatacagtaaaggctgggtgcagtggctcatacctgtaatcccagcactttgggaggcccaggcgggcagatcacctgaggccgggagttcaagaccagcctgaccaacatggagaaatccgtctctactaaaaataaaaattagcggagtgtggtggcgcacgtctgtaattccagctactggggaggctgaggcaggagaatcgcttgaacccggtgagaggtgacagcgtgctggcagccctcacagccctcgatcgctctcggcgcctcctcggccttggcgcctactctggcggtgcttgaggagcccttcagcccaccgctgcactgtgggagcccctttctgggctggccaaggccggagccggctccctcagcttgcgggaaggtgtggagggagaggcgtggtcgggaacccgggctgcacgcggtgcttgcgggccagcgtgagttctgggtaggcgtgggtgtccgcgggccccacgctccagcagccagcgggccccgccagcccgggcagtgaggggcttagcacctgggccagcagctgctatgcttgacttctccctgggccttagctgcctccccgcggggcagggctcgggacctgcagcctgccatgcctgagcctcccccacacggtgggctcctgcgaggcccaagcctccctgaccagcaccaccccctgctccacagcgcccagtcccatcgaccacccaagggctgaggagtgcaggtgcagggtgcgggactggcaggcagctccacctgcggccctggtgcaggatccactgggtgaagccagctgggctcctgagtctagtggggacttggagaacctttatgtctagctaagggattgtaaatacaccaatcagcgctctgtatctagctcaaggtttgtaaacacaccaatcagcaccctgtgtctagctcagggtttgtgaatgcaccaatccacactctatctggctactctggtggggacttggagaacctttatgtctagctaacggattgtaaatacaccaatcggcaccctgtatctagcttaaggtttgtaaacacaccaatcagcaccctgtgtctagctcagggtttgtgaatgcaccaatcgacactctatatctagctactctggtggggacttggagaacctttgtgtagacgctctgtatctagctaatctagtggggatgtggagaacttttgtgtctagctcagggattgtaaacgcaccaatcagcaccctgtcaaaacagaccaatcagctctctgtaaaatggaccaatcagctctctgtaaaatggaccaatcagcaggatgtgggtggggccagataagagaataaaagcaggctgcccgagccagcggaggcaatccactggggtccccttccacactgtgggagctttgttctttcatctttgcaataaatcttgtcactgctcactctttgggtccacactgcctctatgagctgtaacactcaccgtgaaggtctgaagcttcactcctgaagctagcgagaccacaaacccaccagaaggaacgaacaactccagacgcgccacgttaacggctgtaacactcaccgtgaaggtctgaagcttcactcctgaagctagcgagaccacgaacccaccagaaggaacgaacaactccacacgcgccaccttcacggctgtaacactcaccgtgaaggtctgaagcttcactcctgaagctagcgagaccacgaacccaccggaaggaacgaacaactgcagacgcgccaccttaacggctgtaacactcaccgtgaaggtctgaagcttcactcctgaagctagcgagaccacgaacccaccggaaggaacgaacaactccacacgcgccaccttaacggctgtaacactcaccgtgaaggtctgaagcttcactcctgaagctagcgagaccacgaacccaccggaaggaacgaacaactccacacgcgccaccttaacggctgtaacactcaccgtgaaggtctgaagcttcactcctgaagctagcgagaccacgaacccaccggaaggaacgaacaactccacacgcgccaccttcacggctgtaacactcaccgtgaaggtctgaagcttcactcctgaagctagcgagaccacgaacccaccggaaggaacgaacaactgcagacgcgccaccttaacggctgtaacactcaccgtgaaggtctgaagcttcactcctgaagctagcgagaccacgaacccaccggaaggaacgaacaactccacacgcgccaccttaacggctgtaacactcaccgtgaaggtctgaagcttcactcctgaagctagcgagaccacgaacccaccggaaggaacgaacaactccacacgcgccaccttcacggctgtaacactcaccgtgaaggtctgaagcttcactcctgaagctagcgagaccacgaacccaccggaaggaacgaacaactgcacacgcgccaccttaacggctgtaacactcaccgtgaaggtctgaagcttcactcctgaagctagcgagaccacgaacccaccggaaggaacgaacaactccacacgcgccaccttaacggctgtaacactcaccgtgaaggtctgaagcttcactcctgaagctagcgagaccacgaacccaccggaaggaacgaacaactccagacgcgccaccttaacagctgtaacactcaccacgaaggtctgcagcttcactcctgaagccagcgagaccatgaacccaccagaaggaagaaactccgaacgcatctgaacatcagaaggaacaaactccggacacgccgcctttaagaactgtaacactcaccgtgagggtgcgcagcttcattcttgaagtcagtgagaccaagaacccaccaattccggacgcactgggaggcggaggttgaagtgagccgagatcgcgccattgtacaccaggatgggcaacaagagtgaaactccatctcacaggaaaaaaacgaacaaaccaaaaaataaaaacagtaaaaatgattttcttgattagatattcctccgaacaagagatacagtgggtggctcacgcctgtaatcccaacactttgggaggccgaggcggatcacctgaggtcaggagtttgagaccagcctgaccaatatgatgaaaccccgtcactactaaaaatacaaaaattagctgggaatgggggcatgtgcctgtaatcccggctactcgtgaggctaagacaggagaatcgcttgaacctgggaggtggaggttgcagtgagccgagatcacgccactgtactgcagcctggaaaataagagagaaactccatctaaaaaaaaaaaaaagatataaatggtcaataagcatatgaacagatgctcaacatcattagtcatcagggaaagtcgtcaaaactgaggccgggcaccaccgtgtaatcctgtaatcccagcactatgggaggctgaggcaggcggatcaccggaggtcaggagttggagactagactggccaacatggtgaaaccccatctctactaaaaatacaaaaattagccatgcgtggtggcatgcacctgtcatcccagctactcgggaggctgaggcaggagaatcatttgaatccaggaggcagaggttgtggtaaactgagattgcatcactgcactccagcctgggtgacaaagtgagactctgtctcaaagaaaaaaagaaaaaaaaatcacactagaaagggttgattcttcctacaataacttaaaaatggcatataatcctcataaaaatgcaaacagtttcctgtaatgggctgattctaaagttcatatggaaaaattaatgtcagaaaactaagcaatgaggtgagaccactcctaccagatattacgccatattataatttgaaaaacagtttcagtagtgtggttctgatgca

SEQ ID NO: 95127 - DNA, 15134 bp, Homo sapiens
  misc_feature (1)...(15134): n = A,T,C or G
gtactttgagattgctatggatggtgaagagggctagggagttagccaagagagtttttggatcggccagaaggtgaaattctctatcctagggatgttgatgacaaatccagcaaccatgaagatgatttcctaaagctataatttttgaaatatttactataaagttttgttcccacttacacaggattaggttaattgggagagcaacaggattaacagtggcacatggtatccacytgggccttagagtggcctctacacccaacaaggacaagagatgtttcctgggaggaggtagttgcccaaagcgacagaaaagaagtattacaatcaggaagaagagaaaaatgttcccacccacggcgtcacgttaccacttatggctgaatattgattcttttaaataggtagcagaggtcctccaaaggttcacagatgtaggtcgtggtatcctgcttttgtgcctgtgactcataagaaacaggtttaatcctagacaggtgtacccaacaagttattccctgaagtttagcagcagaggggatactcaacaacacctgataggggctctgtcatttcggttgtaattgatcctcaggggaatctttctttccaagtttttattaagactaagcctcctggccgagcgcggtggctcacgcctgtaatcccagcactttgggaggccaaggcgggcggatcaagaggtcaggagatcgagaccatcctggcgaacacggtgaaaccccgtctctactaaacacacaaagaattagccaggcgtggtggcgggcgcctgtagtcccagctactcgggaggctgaggcaggagaattgcttgaacctgggaggcagaggttgcagtgagccgagatctcaccattgcactccaacctggctgacagagtgagactgcgtctcaaaaataaataaataaatataaaaaaatcagccgggcatggtggtgggcgcctgtaatcccagctactcgggaggctgaggcaggagaatcaggagaattgcttgagcccaggagacggaggttgcagtgagccgagattgtgccactgcactccagcctggctgacagagcggactctgtctcaaaaaaaaaaaaaaaaaaaaaggagaggaaaaaaatgcgtatttcctagctttgtccactggaaatatctagaaacaaaggctaactcagtagcaatgaatacatctagtatcagattggattactaaatatcatttcccactgaagggaaccagcgatctttggagagatgtataattccaagtctggggcaggaaatgtacaagatgagccaggaacatcttgtggtactggaaaacaaagatatgtataaaagatcactagggtcatatcgaaagattcaggagataacttgaagaggcttccactggcagaagatggggaaatttgcacctcagtaagaataataaccacaattatgtgaaacataaaagtgttaatccattatttattatttttatttatatttatttatttaatatttatttaacatttttaaaaggtcaccattggaatatgctagggcaacaaatcattattttaagaactggaaaataaaaggattttttttgagatgcagtctcgctctgtcacccaggctggagtgcagtggctcgatctcagttcactgcaacctccacctcccgggttcaagcagttctcctgcctcagcctcctgagtagctgggattacaggcatgcgccaccacgcccggctaatttttgtattttttagtagagataaggtttcaccgtgttggccaggctgatctcgaactcctgacctcaagtgatccacccacctcagcttcccaaagtgctgggattacaggtgtgagccactgtgcccggcctaattattttgtctttcttatcctcactgtaccaacaggcaatcaaatggctgatggggagagtttttctttatagacctatttcagctagtaaatgaagaagaaatgagaggacttagaatatcagttttaggctgggcaccatgcctcacgcctgtgatcccagcactttgggagcccaagggaggggagcagatcacttgaggtaaggatttggagaccagcctggccaacatggtaaaaccccatctctactaaaaatacaaaaattagcctggcatggtggcatgcgcctgtaatcccagctactcaggaggccaaggcaggagaattgcttgaacccgggagacagaggttgagctgagtgagccaagatcgcgccaccgcgctccagcctgggctaccaggtgagactctgtcccaaaaatatgtgtgtgtgtgtgtgtgtgcgcgtacacacgcgttttaacctctaatgaattaaaggatctaggcaatgatcatctatggctgctaacctcacaaaaagagggaaaaacacaaaaccacccatgaagtagtcttgccctctcccctccccaaagaatcgaattaagcttctagatgtaattacagaaaatacaggtatagattaccttgacactataggaatgcaattactaatatccagactacaggaaacttgcaaaaccaaaaacataaaaataaaaaataagatccaacatctactcccaatttttaaaagctcttagtagtacagctttaatgagacatatataacaagtcaaaaggcagtttcatgattattggtgaaacagcagaagcactcccgtgaaagtttcaggaaaaagacaatgttgtcctctgataccagtaacatttgagagactgttctgcaagtactggccaaggcaattagaaaagaaaacaaattacaaggtgtaatgaaaaaaaaaaaacaaaaaacaaaaaacaaaaagaagatgtaatggtgaggtaaaaattattatttgaaagagaggtgactaattctggggatcttaaaataaaataaaaatcattaggaacaaaataattcagtcgatatctagtttaaaaatggacatataaaaatcaacaggtttgctatagacaaggggtctgaaaactatggcctgtggttcaaatccaaccccttgtctgtttctgcaaagatttactggaacacaacaacgctcattcatttatgtattgtctatggctgctttcatgctataacggtgaagttgagtagctgcgacagaagccataaagtccacaaaacctaaaatatttactatttgaccccttacagaaaaagtttgccaacccctgctatagattaaaaagaaaatcagttagaaaataaaatgaaaaaaataaaagccccaattttggtttttagagaaagggtctccctccgtaacccaggctggtgtgcagtggtgcaatcgtgactcgaacggcagcctcaaactccttggcttaagtgatcttcccaccttagcttcttgagtagctgggactacaggcacatgccactgtgccccactcatgtttaaaaaaatttttttctttgtaggaacggagtcttgctatgtttcccaggccggtctcaaactcctggcttcaagcaatcctcccccatcttggcctcctaaagcactggaattacaggtgtgaatcatcatgcccagcccctcagttcttaatagaaacaattattaatataagctaagaagaaataaactttacaatatgtattaatagctattatatatgaacaaaacctcacaactgtacagatatccaaggagatgtgaataaattgaattatgtctttcctgatagaaaactaaagcaagcctttttctaaattaatctgccactctagtgaaagagcaccaggaatacatctgcagttgaacaaattgggtatattactcctgcactctggggaatttcaataagagggtgctagaaaggacttataggaggatttgtgcccatgttcagtgatttcagtcagggtttagggaagccaggcttctctctggcttggatgctgtcagaggtgggggtatgtctatgacggactatcttaatgagtcttgcccagaaggagagaagattagttggaggctaatgctgtaattggtaaggaaacaacagtcactctcttatgggagaaagagggatgtttcatgccttttgtggtttggacagtgttcacctttgccagcattcagatgtgacgatggagtggttctgtttctgtcttgctccctcacggtcacagagtgaccttgtccgatgctgatgttctctgaaattgtttatattcaacagaataccaaggccagctcccagatgtgcagggatgtataaattaaacgcaatttaaatctaaatttccagttttgtgtttgttttatgtgagaacttgaaaaaatatatctaagttgggtgtctgaacaaataaacattagagaagagctgagaaaccaaagagagaaaattgtgaaatctaaaagactgaaaagtgttgataaatttgactacaaaaaattagtctttgtcctgggtgcagtggctcacgcctgtaattccagcgtgatttgggaggccaaggtgggcagatcacttgagtccaggagttcaagaccagcctgggcaacatggcaaaactccacctctaccaaaaatacaaaaattagctgcgtggtggcgcaggcctgtggttccagctacacaggaagctgaggatgggggatggattaagcctgggaggtcgaggctgcagtgagccaatcaaaccactgcactccagcctaggcgagtgagaccttgtctaaaagaccaaacaaccacaaaaataagtccttgtccagcaaaaatcacctttacacaggtttgcaagacagaccacagataaaacattttcaatgcatttaagaaaagggttgatgtccctaataaactaaaaatgaataacttacctactaatcaatataaaaagagtacttttcagaatcgttttagatttttacaacgacatgtgccattaaaaacaataaaagaaaaaaacccggctgggggcggtgtctcacgcctgtaatccaagtacttcagaaggccgaggctggaggatcgcctgaggtcaggagttcgagaccagcctggccaacatggcgaaacccagtctctactaaaaatacaaaaattaggtgggcatggtggtgtgcgcctgtaatcccagctactccggaggctgaggcaggagaatcgcttgaacccgggaggcggaggttgcagtgagctgagaccgtgcctggcactccagcctgggcgacaaaacgagactctgtcaaaaaaaaataataataaataagaaaaagaaagaaagagggaaggacgggaaggaagggaagggaaggggggaaggaagggaggcagggaggagggggaggggggagggggaaggagggggaaaggacagacaacaagagtcaggactttataaccacggtacttcccccctcgccccccttctcctttccccctcctcttccccccggccttctttttccttctattcccctttatctcccatcgcccccccttttccccccccttcccccctcccttttccccttacgccctcttccctttcctccatttttccttctctctccccccctcctctctttccccccccctgtccctctttctccctccccccttcccttttccccccctccccctttccttcttcccctctccctctttccacttcccccccccccctcttctttccccctctccccctccccctttttctctctccctccccccctttctttctccctccccccccctcccgttttttctttctcctcccttctttctccccgccctccctcttcttcttcccccctctctccccccccccctccttcttctctttctcctccccccttttcttccccccttctctcttccccttttcctcccccctccattcttccccctccatcctccccctccctctccccccctttnnnnnnnnnnnnnnnnnnnncgccagcttcagtgtcagctcgcgagccctggcgtcgcgtaggagggaggatggagagcggcgacgaagcggccatcgagaggcaccgcgtccacttgcgctccgccacattgcgcgacgccgtacccgccacactgcatctgctgccctgcgaggttgcggtggacgggcccgccccggtggggcgcttcttcacgcccgccatccgccagggccccgagggtgagccctgcggccggactacggctcccggcagcccccgcgccggcctgcgcgcttctcatcgcctgggctcctggggatcgtggtccgtccggaggtggcgggagggcagctccgggctcgacccagcgtgggtcctgcctgaggccctttgcgcctcccgctccaggactcgaagtgtcgtttcggggccgctgtctacggggagaggaggtggcggtgccgcctggcctcgtgggatacgtgatggtgacagaagagaagaaggtgtcgatggggaagccagaccccttgcgggattccgggactgacgaccaagaggaggagccgctggagcgggacttcgtgagcaaagggatagggttgaaagggggtgcgggcgggagctgtagtcccgatgctgagccaggccccttccccaggaccgcttcattggagccactgccaacttcagccgcttcaccctgtggggtctggagaccatccctggcccggatgccaaagtgcgtggggccttaacttggcccagccttgcggcagckgtgagtagacgaggagttccgtcttgcccccgggtggatgggctggggagcacaattgcgcagacggagcctggaggattctactgggtagtgtgtgggaagcgtagctccctgaccactcttcctagcatgtctagaagcggttattctgaacagctgggtccttcctcgggtatgggggccagcttgccgccctgtcttacaagtccaacagtagaggcgactcctgttgcagattcacgcacaggtgcccgaggactgagaaccagagcttgaaattcaaagctgcgatcccttcacagcagtaaaccagctctttggaaccgattccatcaccccaataaaggagctcttcacagcacctgtgagtctgggcgccttagagcccctaagccagcatgggccctttccccctccccaccaagaactttgcatggctctggcatatagaaacaatttattgccgggggcaataggggtaagagaagccagaaatttttgcagccagcacccaccccasccccaacttctactttacaaaagaaatttttacaatcaccagccctctgtacagagctcccccatccggatcccttctcactgtacacagctgcctggctccctctggtccctgcttcagaggaggcctgggcctgtggccagctgaccttggagttggtctgagcccggagctcgccttggtgctgggcaccagtgggcccctgccaggcctgtcctctcctttttgagctgtcctcagccccatctcccttagagtgctttgtgggagctgcagtgggggcggggtgggctatcagccccagtcctgctgccgtcttggcactgcagtgggcagtgtctggtcaccacttccccctcttgctccagtccttgggagtgaagtgcagacacttggaktcgatccgcaggagccgcttgagcatggcccgctcatggccatccacgatgtcctctgacagtgtgaggatgtactggccctgggcagaggagatgggttcagcaggtggtcagcccacagaggactgcactctgcatcccacacacctgtctcccctgcctgcctccctaccttgtagtagttgatgagattgaggtactgcagagtggagatgacatcctccttcttgatgctggtgatttcactaatctcactgtgggagagcacaggtcaggttccctgaggacctttatctgtccccaggagccctgagagagaaagcccaggaacagacaagccatgccatgtacccccaggtagacagcgccaggctcacttgatggtgatctgtggcctctccccgctctccgacttcagccccatcaggatctccaggatggtctgggaccagtagcttcgataggataggaggccaaggtctgagaggggcttctcaggggtccctgttttcccttccactttggagagttcatagcctaaagcaatggagcaggagagggtgagtaagaggtcacagatgaacataagcaacatttaaaaacacaggttgccaaggcaggctgcctagttcctatcatggccctgccacttggcagttctatgccctccacttctctgtgcctcagttccctcaggaagaactgagtattcactctttccgtgcgctgagcacagtggagggcatgagggcactgagaggagcagctgcagtcaaccatgagggtgatcagaggccagtgaaggcttatgggcaggggatgcagagaaaatggctcatgggaagaaggggcctccaattttcctttgccmtcccgggctctgtgtctagccatgtaaggaagtggagacagattcctgtctctaatccagacctgagaatgcttgaattctcaaagtcctcctagctgggaccttgggagtgtcacctgctgtaagacttgagtggcctgactgggtggttgtgaggatgcaaggagaaaaggtgcaccaaggtgcttcctaagtcggggagaccattcctgggagccacgtgactgacccccaccatggctctttccctccaactcgtgctgatagctggccgctgggaggccgtccccagtgagatcctcagaccctgcacagccctgagtggcttcacatctcttggtcagtgtcttcattctccccagtcagggacctgggatgtttgttacttcyagaagcccttcctcaccctcataatggaccttagccccttgctggtcccactcacatcccgtctccattgctgtctgagttccaagactgagtttcttcaagcatccacttgtgctacyaggctgagaagttctgaggatgtgaccccatctgggcatcatttaaccaataaaatttctcgaatggaccataaccttgatcaggtaaagcctctgtgtcttcaccaggtcaacagctagaacttcctccttgtttctcaggtcagagcttggttattccaagtgagtggtgagacagacagaatggggggtgatggggagtaagaggctgggaagaaggggcctcagggttggggagggcactgaagagcccatgtgtgatgaagttcagagtcccttctggctttaagagactgacctcactggacacaaggagcgagggacaacatgcttacgtctatctgctgacagcattttggatacctgcctgcaaggctcaggggacaactggggacattagccactggtccttgccccagtactcgtatcatggcacacgttaccagatacatcagcaccagcggctcactaaccttctgcccatggctccaggcaggagcacgtaagtcagatttggggaaagctgagtggcacttagaaccctggccaaggagcaaactggggggctgagaacctaccccagataagcagggcagtcagcctgaacggagagaaccccgggagagtgccactgttatttctggctggctcccctagaggctgggctgcacagccagggttgagaatcacagtagcctggcccatctgcctgtgaggcaccgatagtgggtccactaccccctggccgcagcacacatactcactgaactcgatcagcagcttgccgtagccccggcgctggtagggaggcagggttaggatgcaggccacattgtagtcttccgttgattctttctcctggagaagggggacagrtgagtgtcagggaagggatctggctcaggacagggcacagggacagcttgggcaggcactgaccttggagaagtagcccacgatgtggaagcccttacagtcatactctgtcatgacgtagaagaggaaagggtctgtgtcatagtacagtgtcttatggtcaaggaaacacttggccaaaagacacaggttctgggaataactctgcaagagaaaaggcttgtcaccactctgggtatcccgccttgagcctggccagtggttcagggtcaaccaggagcttcactgttcgtgctatgccccaggctgctaggtgatgagtgttcttccctggctgggcctgacccactccaccagcccrcagcttaggcagggctgctcctcagtgttgaaaagcctgtgtgccagatgtgtgatggtgtctgagtgcctccctgctcagtcaggcaagtttcccgccttgctccgcacacctccattctaagcctgaccaggagagaccactgccttttaatgttttttaacagcagccaacgaactaatgtgtccaaagtgagactctgaccacggctcctcaaactaatgtgtccaaagtgagactctgaccactgactccctatctaacagtcttgggagtctagctgttaaaaaacctaacattctacatccacagtcacacctcctgggaactgatctgctactctacaacagagttaaggaattctggaatttaacaaaataactgccttagggtttaccccagcaaaattatgaatcctgctgctttacttctgcacacgatttctcctgcatttcagacattgtgggtttttttttttttttttgacacagggtctcactcctgtcacccaggctggagtgcagtggtgcaatcatgcaatcgtgggtcactgcagccttgacttcccaggctcaggtgattctcccaactcagcctcccgagtacctgggggtttctccatgttgcccaggctggtctcgaaattctgggctcaagtgattggcccaccttggcctcccaaagtgctggggttacaggtatgagccactgtgcccagccagaaattgctttttatttatttattttttttacacgaagtcttgctgtctcccaggctggaatgcagtggtgcaatctcggctcactgcaaactctgcctcctgggttcacgccattctcctgcctcagcctcccgagtagctgggattacaggcacccgccaccacgcccagctaattttttgtactttttagtagagacagggtttaaccgtgttagccaggatggtctcgatctcctgaccttgtgatccgcccgcctcagcctcccaaagtgctgggattacaggtgtgagccaccgtgcccagcccaggaattgctttttaaccgcctgctgctgggtactgccacttggatgcccaggtccacattaataattacaaaatggtggttaacacagcatcttcatcacctaagctctgtcccatgtacgagccttccctcatcctcccttttctgcctcccaaccagaatgatctctgcctttcacaaagaccacctttgtgcatccatgcctactcttcagaacaccactgcaagaaatcccctcagccactttgtcatccaccaaggctgaaaggtaaccctctatgaagctctgctgaccacctcctttgggtcctgctaacctaccctctgtttcatgacacttaggacactgggagctagaggtcattggtatgactgtctctcccatggactaagctgtcagagaacagagactgtctcattcctggctaccagcacctgccagacagcaggaactcaataaaaatgggctggactgatctgctggcttgactggtcagtgtttacctgagcaagaagaagctgtcatttgattcaccccagcgcctcactgcctctcaagcactaaccttgttcttacgtccatcaatctcaaagaaggagatggtgcccttgcggtaaatctcattgcctggaggatgtcgtaggtcacacttggtctggggaagagaggaggatcaggaacaagggcaacgtggagggtgctgggaaggcagcctccctggacccctcataccaaatgacgctgaagacacttgagactacggccgtacttgaggcagaactcgcacaggtagaggacaggcaatgtggtgagttcctgtgggtacggggagaagtaccacggcttgaggcggtgccggcccagctcaatgcactcaatgttcttcatccgggtgacgatgtcgtcgtggcttcgatcagacaccaggctgccagtcatgcgtggtgctgacggtattccatcagagctgtcctgggagtcctgcccagggccagtggaaaataccaggttgtaagagacagctcagcaggacaccacagctcacagccctttgacaggtttccttcaagcctaacagcaaccctaagggggaggtaccatgatccccaatttccagataaaaaacctgaaaccctaaaggatcgatgatgtggaaaagatcacccaatgaccccattttttagatggagtctcagtctgtcgcccaggctggagggcagtagcgcgatcttggctcactgcaatctccacctccggggttcaagcagttctcctgcctcagctttccgagctggattacaggcacccgccaccacgcctggctaatttttgtatttctagtagaaacaaggtttcaccatgttggccaggctggtctcaaactcctgacctcaggtgatccgccagccttggttggactcccaaagtgctgggattacaggtatgagccatggtgcccggccccaatgactcatttgaaccatgttctgcctgtctcctaatcccaccaacactagctctgcccaccaccccttctttatttttaaactcatcactaaataactctccaccctgcctgcatcccttccttttcacccagttcccttctgctgctccccagacccacctcatcagtgcccaaacaattcgattttcgcttccgtcctggctgggctgccactgccctacgggcggctccattctgccgagatagtaggaaaagaagggatggctgtgaaatgagcctgaaaaaagccaccagagagtagaagagaggaagrgaacaagagatggtttggggaactcacctggggaaaaaccgaggccggggctgtctcgctgggcactggagttgctggtgaaaccacctccaccttccgtttctgcagagagaaaccaacaaaggtgggtcagaaggtagagaaggtgggacctgagaagaaagcaaggtccctggaattgctgagggtaccgttgagcggtggttgggctgcaggcaggagctggaggagagcggctggtcaggctcgccaccgggaatggcctcccgctccttgggcaggttgaagcggagtgtgatctggaccgggattggcaaggtcttcccgctggcctgcgccgaggccggctgtagagataggtccagggtcttcctytggggcggggatggcagtgggaygsggaaggggaagaggggtccctcacctcaaaattatcaaaccccaccctcgccttctgaaggacacaggactagctactggactctgggagctacatgtgcaatttggcccccatcctttgcaagatgaagtcagggtgagagggagccgcctcctgcccatccaggagcycctaatgccaacagacaagagaaataggaggcaggagagaaaaggtgaagtgggggacctactcaccacctctctctctggagagccaggacgggacccaggaagtccgttcttagtgggggtcttggcctctttcttggggaactggatcttctttaggtccagccgctcatgcgtcacccattcatccagacgtttgttgactgtagcagtggggatggctcaggacagaatgccaaagactgtcccccaaccctaccctgatgccccacctcaggcccagaactcacagtcaatgtaatggacgtagaaaagcttccggccactgatgtccttcacgctcaggatctcggccagggctatgagaatagcatagacaggggccttagacaggccaggctatgagactccacccttccacgacctgaactccacccccaggccggatccctaagctccagcacttaggtctctcctaagcctccttcagtcacaagtgccacccmtttccaggccccgccctgtacctctcggagcagctaagagccacgccccttcatcaaagtatctgcgcctcgcccgccccataattccagacgcccctccccatcccgggatttcagttgactcccgcccctcgccctcaggttccttagtcccgccccccaacgtcactcacgccactcatcttcgttgtcctggttccgccgcagcacgggtaggcggcagccctcgattatctccccctggggagacagcgcgacgccagggtcggctactggggggcctcgggctctacccacctcccctggctccctccgccccgccccgggcaccggactcaccacctccgccatcttccctccctccactgccacttccggcccctctgggagacgtcacttccgggaccgagcgccctgtgggcccgggcctcacgaagcccctgtagagggggacctttgagagacaccgcgacccagctgcgaggggcaagactgcccctgtgactcgggggaaaacggagtgttacaagcctcaggccgagccctaggtggaaaccccataacgtgcacagccagtggcggtctactgagtccgtcacgtgacgcccaccgggtgcgaagctggtcacgtgtatgcggagcgggtcacgtggcaataccgtttttggctttgtcggagggaagtcctcgggcgtctccttgtggcggcgggaggtgttgccgggagtcaactgggcgcgagaggctggagaaaggaagtggccttagaagggttcgaacgctcccccaagtctgtggacttcattccgtaggcaagaggactcagggaagattcctagctttattttgtatattaggcttttttaatttgtatatatttatttttgagacggagtctcgctctgtcgccaggctggagtgcagtggcgcgatctcagctccct

SEQ ID NO: 95128 - DNA, 58897 bp, Homo sapiens
ttaaatttctgtctctatgtatttgcctattctgggtacctcaaataagtggaatcatacatacttatccttttatatctggtgtatttcactttacataatgtctttaagtttcatctgtgttgtggtatgtgtcacaatttccttcctttttaaggctgattaatatttctttttttttttttttttgagacagagtcttgctctgtcgcccaggctggagtgcagtggcacaatcttggctcactgcaacctccacctcccgagttcaagcaattctcctgcctcagcctcccgagtagctgggattacaggcatgcgctaccatgcctggctaatttttgtatttttagtagagacgaggtttcaccatgttggccaggctggtcttgaacttctgacctcgtgatccgcctgcctcagcctcccaaagtactggtattacaggtgtgagccaccacatcaggcctgactaatatttcttgtgtatatataccacattttgttcacccattcatctgtcaatggacatttgggttgtttccaccttttagcagttgccataatgccataatgagcattagtttataattatctgttcaagtctcagctttcaattctttcgtgatatacccagaaatggaattgctagatcatatgaccattctaggtttcttttttaaaatttatttattattttaaaaatttcttaaaacgttgaaagtacattaaacaaaaagaaaaattagttaccaataatcccaccactcaaagataaccaccattaacaacagtcaggcatggtgtcatgcagctgtagacccagctacttgggaggctgaggagggttaatggcttgagtccaggagtttgaggatctagtaagatgatcatgccactgcactttagcctggatgatagagggagaccccatctcaaaacacacacacaaacacacacacacaacaatagagtgttgatgctttcagacttcctaatctacccaaacatccataagaaaaataaaaagttaaaatatcatctctaattttctcagcaacactttgaggcaggtactgtggtcactctcactggcaggtgaggaaacagaggctcaatgaatacaggcaggggctgtgactcgaggagtcagttgagttggaaggggaggctgtaacatcttcaagcttcctcagaagagcaagtgactagaagtcgggcagaagtgtaggcagtgctgcagaagaagcaaaggctacaaggtgaggatagaactggctccaggtcataccggagattattaacaaatttggaatcagaattcagacctccctgatctggatttttcccaaagaaacacaccctgcacctggtcctgcacctggatttctcaaactttagtgcatatcagaatcctaattacaggaaaattcctgggccaacccacccctggaatttcagaatcagcaagtctggggcaagactctggaatccacattttaagcaaatactcaggtgatccttggacactttagaatcactaccctggaccataagccaaggcatttgattaattacacactaattttttttttttttttggagacaagttcttgctctgttactcaggctaaagtgcagtggcacaatcatgcccactgcagcctagaacttctgggtagaagcgattcccctgcctcagcctcctgtatagctagaactataggtgcacaccaccacgcccagctaattttttaatttgtagagatgggtctcgttatgttgcccaggctgatctccaactccaggcttcagtgatcctcctgcctgggcatcccaaagcactgggattacaggtgtgagccaccacaactggctgagagcactaacttccatcaggctccctcgagagcaagagactaagagttacctttgaaagagttccccaagcctccagaccaggcatgatctggcattctgggagattagctgtccctccttgcagccccacagtgcccacctgatcttctccaaagattctctcactttctgttctgctctgtggttatttatgaacagccctcactgcctccaaggatggggtagcctgcattcttgggggctgcccttagcatacttacctacgccactcagctcctgctggactgcagatatctggagagcatggaccgtacagaatctacttcaacatccattcaacattttactgaagacctgtgtgtcaggtaatatgctgggtgttggggatacagaagaacctagccacttcccatcccccacaccctggtccaggccaacgttggaccttgttggagccacaattaatcctcctgcaacctcccttgcacacctccaatccatcctccatgcaacagaatttaaaatagaaatctgatcatgtcactcccctgctttaagccttccagaggcttccattttttcttaggatgaagaccaaaattcttacattcaggacctggcctgcctgtcttgacacagctcacctcactgattcccattttgcttaattgtttgccctgcagtcactatggccttcttagagttcctcagggtcttcagtggtcccagaccgggaagctgtccatctcaccactgacactgagatggggtgtaaggagcaagatgggtattagggatcaactcttgcaagaggaagtgggagaaagtaggaatgggcagggaatgaaaaataggcctgacaaagcctcaggtaacctgctggggaagccctggagctatggaaacggctggattcttatatgctgagtacctgcctcttcacttagggtgccacagcaatcccaggctaggcgcatctccacactggccaggagtaatgtctcttatcaaccttccagggctggggtgggagcagctcatgggacacctcatttgggaaatctttgtgcagacctctgaactctcagaaaactccatcctttttatcccgaggagttatcacagtttgtaatcacgtgtgatgacctccgccttccctaagaaactgtatgttctacacaggtaggaacagtcagcttgactctttgtagtcccagaactcagcctcatgcctggcacagggtaagtgcccaagaagaatttgttaaattatggaataaagacgggtattatgtcttgcaaacatatgactctccagctatgtgggttgataggaggttgctgtgtatttgaagctctcatttagcttatagggagggctttaatgatcatttcaatcaggttttagctttaatatttaggagccagatcctatccatccccacctggtctagagggcaaaataaaagcaaatcactagtccgggtgaggtgactcacccctgtaatcccagcattttgggaggctaaggtgtgtggatcacttgaggtcaggagttcgagaccagcctggccaatatcgggacaccttctctctactaaaaatacacccccctctaccctcaaaaaaaattagctaggcatggtgatgcatgcctgtagtctcagctactcaggaggctgaggcagaagaatcgcttgaacccaggaggcagaggttgcaatgagatgagatcatgccactgcattccagccttggtgacagaaacaagactctgtctcaaaaaataaaaataaaaataaaataaaaaaatcagatgagaacaacaaaacaaaatgaacacacacacacgcaagcttttggactgggttagctgtgtacaaaaataaaaaataaaagcaaagttcatgctattgccaccatcgtcatcacaaccaccacccagaaatttttcaaaggctctgtgcattgtaacagcaagcttgaatttccaaacccagcgagctacacatgaatggtccctgcatgcgtgggctgtagcactgggttagaaatcacaattcctgctctccttttagctgtaccacctgaacaagtcacctaacctctctgagcctcatctataaagtgggaataatactgcctgtgcttttgggtaagaaagtgctttgcaaattgtacagtggttcacaagaaatcaatgaagcttttttcctcatgcaatctcagagagacgggttggcagagggcatattaggcactcgacttgtttttcacagtgatgacgtgggagcacacataagaaggctgtgtgcttgttgttctcagttgtggaaatagatttgtgatcacctctctaagcccctcctcccctgtccctactgatcagagacagagataacagaagagcatagtacactgacaagtgggtggacagcaagggactgcatggacattacatgcaagtcaaggtcaagcgtgttttggaggtggagggttatgtttgtgtctcaactgggcagttgataacgacgacactgaaggaggagctaagctctctggggaagacttttacctggagactgaatacctggccatcaagacctagtgtagacaaaggtgcgggggtggaaccagtacatgagagcccaaataactttccagcgcctttggtggaccaagccagtttgcagacataggaatactcaaagatatcttcggtttctgttgttctccccacctactttcctcttttattggcaaccaatgtatttaatcacagtatgaggtaggtgttaccctgactttacgcatggggaaactaggctttacgaagacgaggtagtacaaactcagttaagcagtgcacggctgtatgcaactgtggatattccgactcaggtctaccttctcccctacactgctgccccaactttcataaacctaatgtgagtgtgtgtgtgttgggatgtgggagctctgggctgtttttctggttgaaaacacccagactcacagaatttccaaggggaaggaccttagagggtatttaactcattttgcacatggagaatctgggacctagacgggattttgtagattctgtatttgtatttttgattttgtagattttggtgtctccattagaccccgagtcttccagaactccctttgcgccaccctacgccacctcctagtcttgccctgctcttgctctgggcaagccagggagcctttcgccagcagacaccgttaccaaacataatagcccccttgtgctgggcattcattcttcaacaaatatttactgagtggctcctctgtggcgggaactgttagaggtgctgcgaatgccatgaacaagaaagacactgcctctgcccctctggagctcgcacggttagtcgggggaggtaaaccataagccagtaaaaagtaaccgaagataatttcagatggtaggcagaaaataaaacggaagtgatggaggtctgaggtcagatggagtggtcgggaaaacctgaccacttggcagatggtccttgaagtctcacaacaaccctcagaggccgtgggcagatccccgttttgctgagaaggaagctggcgttcggtagtcagggcggcgtggccaagtcccagactcctcacccgccttcctgccagctctggtgggcagccgcaggcaccgtgtggccttggatgatgaaactcggggcgatgactgcaccatccagcagcctgcgtcctcgcaggtgcgggcagtgagggcggtaggggggcggacgcgccactggggacaggctgccaacagctctagcttcgcagacgcgacagagagcacggcccctgccccgcccctccaggctctccagcccctcaactgggacaaagagcccgcccagccccggccacgttcggacgaacgctcccgcctactgtccggtcccggtccggcccggcgcggggcgctgtgggacttgtagttcgcgtcactctccgcagccgctccggagcagccaggggaactacagggcccaggaggcagcgcacaggcccggggcggccccgacggtggtgggtgtgcgagcgcaggggccgggcggcgcgggcgccgggcgcggggatgcggctgtgggcgccggggccgggtagctgctccaggcgcgcgagctaaccgagtgcggcgagggcctaccaggggcgacaggcacgttgcatgcatgccttgggcgcagcctttgcgaaagccggttgggtgtgcgttggtgcttcagcggcgccgtggagggtccgggtcgccgggggatgggcaccagcgccgaagccaggctggcaccgctcgctgaaagagcccttggctgggcttgtgtgggggagtgctgcacgcctgggcagtgcgcgacgtgtttgttctttttctctttttgtgccagggtttctctccgcaagcgcgcgatgcagcgggcggcggcgctggtccggcggggctgtggtccccggacccccagctcctggggccgcagccagagcagcgcggccgccgaggcctcggcggtgctcaaggtgcggcccgagcgcagccggcgcgagcgcatcctcacgctggagtccatgaacccgcaggtgaaggcggtggagtacgccgtgcggggacccatcgtgctcaaggccggcgagatcgagctcgagctgcagcgggtgagcgcgcgctgggccccggggaggctggggccgctgagcaagggaaaaaccgcagcagccccagctggggtccttcccacgacgtccacccccatggccagctcctcagtcagccaagcctggctaaaacgagagaatgccccctcccgcccgttcacttactggtgcccagcaccgggcactcagtgaggccttgcaatacggttcacttgttgaattgaattcgtcaattgttgagcgggccgtgctgccaggcaccgcacgttgtgtgtctgccctactctcgtggaaccaaggtccagtggagagaggaacataagcgaatgaagaaagaagcaatagagtctcagtgataagttcttggaaaaaagtaaaacggaagagggttgggatgggggcggtgggagggaaaccattttaggtaggaggggagacggggtggggggggctctgcggaaagttggttctgttccccagtctctttctccgtgtctttggcctttagggtctttgccaatcctgattcccggaagagagtcggcagaattccttcctttaggcccctctggagccttggccgaccagccacttctgtggtctggggacagtcaccgaggtggggaaccagagagttgggcctgtcgggctttggtaagggggccctgggactttcttcatcttggtggtcggccggctggctaggatcttggcttgagtttatagcttcatgtaaggtgagcccacagccaggaaggatttctgcctccccacaaccaggatgtctggggtgggtgatagaggggtccctaggacctaggagagagttatagcctgggtggaattcaggaggcagagccaggaggggttatcttaaaaagtaaatactcctaagatttgtaagaagctaataatcacctagctgcttgctagagagagtctgactgagaatagaagtgggaaggagggttccttgatcttgccctcacccgggtcactagtgtcccatgaatgcatggcagtaagcttcagggggatcatgacacttggtcccattccagtggggacttgggggttttaatgagctcctgggcctcctgagaccttgttgagacactcagttctgctgactcaaaacagtgagctggacaagtcagagtccagtctcctgcggactccttgcagggctaagtttaaagctggccgggaggaggctggctttgtttctgtgcctccctggcccagaggtgggccgggcagagaacacaggctgttgatgtctggcaggctggagctggccctccttgacgcaacagcctccctgctaaaacacagctgggattaacgcgttcctggtttatcacgttacagctgatttctctggttcctgagctggcaggggttccaggaattacctctgccttttgctaaatagcaactcctgtgctggctccatgaggcttgaggatgatgaggacagaagggcactgtctttgccttgaggaatctgactgccacgttgttctctgagcctgagtccccttccccggattctttaagaatgtgttgggattttttagcaggcagaatacgtgagagccttccaagtgggagcagtgctgtgagcaaccgcaggaagttggggagttctgggcatttggggaagggggctggtgctgtagtggaacactaacagagggatgtgggaggtgaatgagacagaaaaggtggactggagtcttgtgtgctgggattaggatgtcatggtgcgttttggctggagttgggaaccaggaagggtttccagcaggggtgtgtattgatgattgcaggtgggcaaatttcttggtcactgggccagggacatctctgatttctgagacagaagctccacacccccatatcctactcctgagttagttgagtttttttggccacctacattctgtggtagtttcattcaagcgcatcccttctcattctcttctcactgtgagtctcagttccccggctgtgggtgctggccagaccagcttagatagcctcattgaaacccttccttcttgggagacagccttgcttccccttgccagcttaaacagtgcccttcttgcgagagccacatttccccagtcctttctttttatttctggcttgccttctccttgtgcagctttggtttttctgcttctgttttgaactgtcgtgatcaaaactggttggttagaggccggccacggtggctcacgcctgtaatctcagcgctttgggaagccaaagtgggtggatcacctgaggcaggagttcgagaccagcctggccaacatggggaaaccctgtctctactaaaagcacaaaaattagccgggcatggtggtacacgcttgtaactccagctactcggcaggctaaggcaggagaatcgcttgaacccggaaggtggaggtggcagtgagccgagatgcactccagcctcggcaacagagctcagagcgagactccatctcaaaaaacaaacaaaaactgattggttagagatgggatgggctaggatttgtagggagtagggtgacttggggtgaatcctgggcctcaggttccctagagtataaacagatgtggcctggctgggcctggctgggccagggtttcccctgccctcagttttatacctccttgtccattcaaaactgtccttggggactcagggtgactcgtgactcttggtggtaccaaggccttcatgctgtctatggaattctttcaccaggtgttctgcaaacaatgtgggccgtttggctggacatgtggctctggtgtttgactttgggtggctggccaagctgagtccctatcctttttgcttctctggtagtggagcctgaaggaggtggggaggtcggctaagggctgtgaaaggggccattctcctgcagccccagctctgtgctcttagaggggccttgcttctccctgacagcagctccaaaggggagaacctatcttagcttttcagatcctggtgttcactgcgagcagcacttaaaaataagctgcaattaaaaggagttttgaaaagatctgacagttcttcctcaacctactttttcccttgctttattgggggatgggggttggggattggtacaagtggagacaggaatggctttgcttctagttgtaaggcaacagtcagggcagacattcagaactgaggggaagactgacaattactggttacatcagtgtgtgttgcatccaaacaaaggtaaaagcagagggtgctaaggcacatggctatagttagctaagaactaagattggaaaccctgtgtgtgccaagcacatgtgttgaatctcagtcattgttttctgtggcatttagatgctactttatttatttattgagactgcgtctaattctgtcacccaggctggagtgcagtgatgcgatctcatctcactgcaacctccgcctcccgggttgaagtgatcctccttcctcagcctcccgagtagctgggattacaggtgcccgccgccacacccagctaaattttttgtatttttagtagagattgggtttcactgtgttggccaggctggtcttgaactcctgactttgtgatctgtctgcctcagcctcccaaagtgctgggattacaagcgtgagccaccgcacccggccagatgctactttatttttttaaagacagggtctcgctctattgcctaggctggaatgcagtggcacaatcatgactcactgcagccttgaactcctgggctcaagccatcctcctacctcagtctcctgagcagcttggactacaggtgtgcaccaccatgcccggctaatttttaaattttttatagagactaggtcttcttatgttgcccagggtggtctcaaacttctggcttcaagtaatcctcccaccttggcctcccaaagtgctgggtgggtaggtatgagccaccacacccagctactttttcctttgtaattattattaaataataatactaattgttaattatagctgttcagccaaacagcccatactgtttgcagagcacctggcgaaaggattccatagctctgtcacccaggcaggagtgcagtggcgcaatctcagctcactgcagcctcaacttcctgggctcaagcgatccttacacttcagcctcttgagtagctgggaccacaaggcgtatgccaccacgtctggctaatttttgcatttttttgtagagacagggtttgccatgttgcccaggctgttaattttttttttttttttttttttttttttaaagagacagagccttgttctttctcctaggctggagtgcagtggtgcagttatagctcactgtggcctcaaattcctgggctcaagtgatcctcctgcctcagcctcttcagaagctaggactacaggtgtgtgccaccatgctggctaatttccttttttgtagagatgggatctcgcttatgttgtccaggctggtctcagactgctagccttgggtgatcctcccacctcagcctcccaaagcgccaggattacctgtgtgagccactgtgcttggcctaratgctactttaaaacttgtagtgcaggcttccaataggatgaaccctccrcctacccagcctgcccaagtcagtcaccacacatacgctgggctctgcctttgtgtgctatgggccttagacaagtcattcagccttggtttactcttctgcaaaatgtgaccagtttatttctctgaaagactagtttgagatgttaatgataatgctttgaacagctgtgaagctaattagacctgccaagtcttccttctgaagctaatgagagtggtctggggataagaagtgctgaaggtcgcttgtctttcccacttcctgaggctctgggtctgggaagtgttctgtggggcttgctctttcctcctgggcctctgccttgctgtcttgagcaactcgcactatcctgtttggagtttattcagctttcacccctgcttctgccttggaatctgggcttctatagttgaccaccccacggatgcccagagttcaggggcctacaccctgtcttccctgcctcagtgatctggcagctcagccctggaggctcttgcctgcactctcagtcacagacgtgtgtagcygcagctccggtttcttctggtttcacttgtctttctgttttgggaccagatcttgtgctgagcctcagctgtgaaatggacctgttttctgggactgtggggtctagttggtgtttgtctttggggcctcttgctggagctttctgcccgccctagccccagtcagtgccctttttgggatcaggagcccgggagcattttcacattgtgctcctaggcctgggacctgcgggtcctctctcccacaccctgccattctccttccctgcacccccttcttattcttcaccagcctgggctcaggagggtggcggtctcatctgtgctactcatggctgtcactggggcatgggtgaccagtatttgttgaattggaggaaagttctctgccatcctttctgcccacaggccatgtgaagtgaccagagccatcccttgcataaggaaacagccttgtgcctgtttttttctccccatttttattgagggggagacaaatataattgacaaagaaaaattgtatatattcaagggacacagtgtggtggtttaacatttatatacattctatatgtaatatgatatggaaatgattatcacagtcaattattaatactccatcctttaccacacatagtcaccatctgtgagtgtgcgcctgagacacttaagtcctgttctcagcaaatttcaagtaaaaaatacaggttttttgttttggctttttttgttgttgtttgttttgtttttgagatggagtttcgctcttgttgcccaggctggagtgcaatggtgtgatctcggctcaccccaacctctgcttcccgggttcaagcaattctcctgcctcagcctcccgagtagctgggattacaggcatgcgccaccacacccagctaattttgtatttttagtagagatggggtttctccatgttagtcaggcgggtctcgacctcccaacctcaggtgatccacccgccatggcctcctaaagtgctgggattacaggcatgagccactgtgcatggccgaaaaatacagtattattaattatagtcaccatgctgtacattagatccccataacttattcatatttttttaaattactatttttttgagacggagtctcgctctgttgcccaggctagagtgcaatggtgcaatcttagctcactgcaacctccgtctcccgggttcaggtgattctcttgcctcagcttcctgagtagctgggattacaggcacctgccaccacaccaggctaatttttttttttgagatggagtttcgctcttgttgcccaggcttgagtgtagtggcgcaatctcagctcactgcaatctccacctcctgacttcaagggattaccctgcctcagcctcccgagtagctgggatgacaggcacacaccaccatgcctagctaatatttcctgaccttgtgatccgcctgtctcggcctcccaaagtgctgggattacaggtgtgagccaccgcgcccgggcagtagatgtattatttatgaggtacatgagatattttggtacaggcatgtagtgtgtaataatcacatcagggtaaatgaggtatccatcccctccagcatttgtccttgtcttacaaacaatccaattatatatactcttttagctttttttttttcaatgtacaattattattgactatagtcaccctgktgtggtgtcaaatactagataattccttctactttttggtacccattaaccatccccacttctccccacccacccctactgcccttcccagactctgggaaccatccttctatgctccatcttcacgagttcagtttttaaaattttttagctcccacaaataagttacaacttgcaaaatgtgtcatcttacaactgaaagtttgtaccctttgaccaacattgccacatatgcactcccccaaccccactgctggcagctatcacctctgcttttattagttcaacttttttagactagtttaacttttttagattccacatatgagtgagatcatacagtgtttgtctttctgtgtctggcttttttcacttcacatagtgtcctccaggttcatccataattttgcaaatggctggattttcttattttttaaatggctgaataatagtccattgtgtatatgtaccatatctttatccattcatctactgatggacacttaggttggttccatatcttggctcttaggaatagtgctgcagtgaacaagggagtgcggacatctcttcaagacaatgatttcatttccttcagatctctacccagcagtgggactgctggatcctagggtagttctatttttaatttttcgaggaacctccatactgttttccataatggctataccaatttacattcccaccagtggcgtgcagggttccctttccccacaccctcaccaacactgatctttgaactttttataataaccatgctaacaagtatgagatgatatctcattgtggctttgaattgtgtttgattagatgttttgcatctttttcatgtatctgttgacgatttgtgtgtcttttgtggaaagactcttcacatcctttgttcatttttacatcaggtttaatcagttttttttcttgagttgtatgaattccttatttgcatatatttgatatttggatataaggatcccattatcagatattttgtttacaaatacagttgtctctcagtatccaaggaggccttccctcggatacctaaatccaaggatgctcatataaatggcgtagtatttgcatatgacctatgcacatcctcccgtataattaaatcatctttacagcctctatagattacatataatacgtagtacatattgtgtaaataatggttcaactctattgtttagggaacaatgacaagaaaagtctgtatgtttgtgtttagtacaggtgcagggtttttcctgaatttttttttgtttgtttgttttttgttttttgagtcggagtcttgctctgtcacccaggctggagtgcagtggcgcaatctcggctcactgcaggctccgcctcccgggttcacaccattctcctacctcagcctcccaaatagctgggactacaggcgcgtgccaccacgcctggcaaatttttttgtatttttagtagagacggggtttcaccgtgttagccaggatggtctcgatctgctgacctcgtgatctacccgcctcagcctcccaaagtgctgggaatacaggcttgaatcaccgtgcctgaccctttcctgaatatttttgatccacggttggttgagtccgcagatgctggagccacggatgcggaggctgacggtgttcccttccgtgggccgcctttttgttgattgtttcctttgctgtgccttgttagaatatccatccgcccctgaccctcatgctggtgcgaggcctgtgggttgggraggacagttattctccctgctaacaccctatgaaatatgccgtccctagagctggggggttggtgccctcccctgatccctgcttgagccaaagcggcgggaggggagccctccctgggaaggaccttccgtgcatctgtgccgcacaggggaggtggctctgggagggatatgtgcaggtggattcgaaggtggctctagaatgccgtgagaggaatcaggatgctgcggctccttagtccctctgagctggcagggccctgagggcagggcaggggcgaggttcccatgggtgctgtgcctgtgggctctggaccagtcactctgggagtctaccccagggctcttggtatttcccatcccatgtagaccttgagttcccggatgcaggagtgtgctcagaacagtttcttctgcatggtggcccttggctgggtgggctggtttcttcacccattcagggtagccagtgtcctgacccccagctcatccatcatagcaaagtgtccaggatctgcaggcaccaagacccaagaatggaggtgctgtgttcccaggcttcgcggcagcggccctgcattggtcgagcagtgcggggggagggcacgggaaaggaacattcagggctctgttccaggcgttattctctccctgtgttgggctggcccagggcccacagctgtgtgttggttcctgggcctcacaactgtgacagatttactccctgtgaagaatgggctgtatccacatcccagaaatcacccaggttcagcgagctagacctggggtctgcaacaattcagtcaggctgagcaaggaccccatgccaggagcccaggccagtgccaagcagtggatcgggcccgtccctttgcacacagaggcttgggtaactgcccacaccctcaaccttttgggatcctggctgtgggatgagtgtgggggctgcacacccctgcagccagagcctctccagagtgcctgtacccccatgcagtgggcagtgctgccctggctctccagacacagtggctgcgtctggatgccactgggaatcttttttttttttttgagacggagtctcgctctgtcgcccaggctggagtgcagtggcgcaatctcggctcactgcaagctccgcctcccagcttcatgccattctcctgcctcagcgtcccgagtagctgggactacaggcgcccgcccccacgcctggctaagtttttgtatttttagtagagacggggtttcactgtgttagccaggatggtctcgatctgctgacctcgtgatccgctcgcctcagcctcccaaagtgctgggattacaggcgtgagccaccgcacctggccgccactgagaatccttatccatgttggccagacactgaagaactcagcagatgggccacaaggggcttagaggacccccttccccgagaaacatagcttgtaggacttacgccctgtttatgatggtccagagccacttccggggcatcttcagtcccccatgcctccttgcttagggcttaggggtggcacactagggccagaaaaacatgtttagctgctgcttttgtctctcaagcctgctggtttgttgttgttgtttttaggagacagggtcaggccaggcgaggtggctcacacttgtaatcacagcactttgggaggctgaggtgggccaatcatttgtgctcaggagttcaagaccagcttgggaaacatgatgaaatcccatctccattaaaaatacaaaaattagccgggtgtggtgacgcttatctgtagtcccagccacttgggaggctgaggcatgagaaatgcttgaacccgggaggtggaggttgcagtgaaccgagatcacaccattgcactccagyctgggtgacagagggaaaccctgtctcaaaaaaaaaacaacaaaaaaaagggtctcactctgatgcccaggctggagagtagtgacgtaatcatagctcactgcaaccttgaactcctgggctcaagtgtgatactcccacttcagcctccccagtagctggggctataggcatgtgccaccatgcctggctaattttaattttttgtagagacaaggtcttgggcaacttgaaagtgttgcccaggctgttgttgaactcctggcctcaagggatcctcctgccttggcctcccaaagtgctggaattacaggtgtgagccaccacgtccagccactggtttttacttaaggtgtacattactgattttgaaaaggccatgtcttctaaagttgcttttattcacacattgcatgaaaaggagaaaagacaagtgtcacaagcacagagttatatctgtaaaatttgtatttggggtacctttggggaaggggcagctggagacaggacaaaggccaggccctcccacccgggctgtggccaccaccttgctgagcccgtttttcctcccactgtgaccctggtgaccttgttcctgggccggcttttgtaagatgatatttgtactctgctaagggctttcacactgtttgtttcaggtaatcctttcagctgccctgggaagtccttgaacctgttgttgactgcatttctcccagtggctgattgggtttatcagggaaatgtgcaggattcccacgtttccaggtccctgtaattctctatgtcaagctctgctttcgcctttgcagcagccatggtgtccttctgtcacctccccagtgatgtcacaagggtcttggacttctctctgtgatctctcttctgtgctacacacattgctcaggcagtggcctcaatttgctcttcagtcagtctttttaatccctgatgcttttttttttttaatgtgaaaatcagcccagatttttcattctgcaaagaatgggttgcaagaaaatgaccctgaggattccctgctgatccatgtcttccgatggggagggtgtcctcagtgtccctggctagtcatttagaccattgcggtagagctgcgcctggggcaggatgcagaggagtctgggaccctgtgtgcctgacatttggcatgttctgctgctgacccctgcctccctcccacacatctggcccggagctgccttttagacttccctgtgtggtggcagtcaggcagcggagcagcagctgttcgggatgcttgggcagccagaaaagctcttccagcccttctggaaagtgggaggcagaggaggagcatagtggttaagaagagtgaccttggaatccgtcttcctgtacttatattcattcccagcacttacattaatcagttatgtggctgggcacagtggttcacccctgtaaccccaacactttgggaggccaaggcggaggatcgcctgagcccagaaggtcggggatgcagtgaaccatgatcacaccactgcacttcagcctgagtgacagagtgagaccctgtctctacaaaatagtaacaataagtaataaataaaattatgttggtcaggcgcaatggctcacgcctgtaatcctagcactttgggaggctgcggtgggtggatcacatgagttggagaccagcctggccaacacgttgaaatcctgtctctactaaatacaaaaattagccgggtgtggtggtgcacgtctgtaatcccagctactcgggaggctgaggcaygagaattgcttgaacccaggaggtagaggttgcagtgagctgagatggcactactgtactccatcttgggcaagagagcaagcctctgtctcaaaaaaataaaattatgtgaccttgaggaagtttctaccctttaagagccttgatttcctcatctgtcaaatgggattaatactagttcttcctcatggggtggctgtgaaggttaaatgagaccaggcatgtcaaaggcctggcaccaagtcagatacttggtaagcctcaaaatagggctgtttattaatatcctgcgggaaccttgcctggcctctggaatccagggtttaagagtttctaagtaaccacctgttgctttctctctgcccagggtatcaaaaagccattcacagaggtcatccgagccaacatcggggacgcccaggctatggggcagcagccaatcaccttcctccggcaggtgagccgcccccaggagcagaggctgcaggagggyagggccctgggctgggcgggccgtcataggggccgtcctctgccccctcgatgtccaggccctcccagcctgataccctctggctgtctcccttagcctccttcctgcctttctgaggttgttgaaaattcccagacctgttttggggttgctctggtgtaggagcctcccagggagactcttccacaaggcggggtcctgggagctgagttaggaacttggtgggcaaaggcagtggtggggtaggcggcagcccagaggacagggaaaggctggctgggctgggaggaggcgtcggggggcagcaggaggtgtcatggtgggggcaggatgtggcttcccacttgagaccctcctgggtgtgagtgtgggctctgctgcgtaccagttgggtggctttgggcaggtggaagttggcagagcgccgcctcgggagattgccgggccttggtgaggcgatgagtgcagaggcctcctggggcccagcacaggagctccagattggggacggccactgtgagccgctgcacccctggctgcctctgcagtgacccagctccctcctcaggctccaggagaaggcggcttccatgtttcagtctgagcactaacctcgagagtgctgcctgggccgggattgtgggattatgggattggtgggctggaggcggtggggtgggagatgccccagggcaggacagaggcgggagacccagtgtgtgacagctttttctagaaggactgaggcctgttttgttttatttaggttttgtttttgtttttgttttgtcgcccaggtttgtttttgttttgttgcccaggttgcagtacagtggtatgctctcggctcacagcaacctccacctcctgggttcaagcaactttcctgcctcagcctcctgagtagctgggattacaggcatgcaccaccacgcctggctgatttttgtatttttggtagagatggggtttctccatgttggccaggctggtttcaaactcctaacttcaaatgatccgcctgcctcggcctcccaaagtgctgcgattacaggcgtgagccaccatacctggcctgttttatttatatttatatacwtatatatatatatatacgtatatatatacacatatatatacacacacatatatatgtgtatatatatacacacacatatatatgtgtatatatatacacacacacatatatatatataacacacatatatatatatatatatttttttttttttagagacagagtcttgctctgttgcccaggctggagtgcgattgtcatgatcactgctctctgtaacctcaaactcctgggctgaagcaatcctcctgcctcagcctcctgagtatctgggactacaggtgtatgccaccacacccagctaatttttaaaatttttggtagagacagggtcttgctgtgttgcccaggctggtctcgaattcctggacccaagtaatcctttcctgcctcaacctcctgagccacactgggattgaggcccattttggatcaaaatgcagtgctgtgtgtggttaaggttcatgggctagggccatcagggaggttgagccccaagaacaccagttccctgttccctgccttgttctctggggcagagggctggggaggggctgggagggctcagcccacagcccctgagggagttgtcacagggcagtgagggagargagctgaggctggccctggtctgaggggcgctcactgggcctccctcccacagccactgctgctgacccttggagcaggccagcagccctggatgttagagtccccatgctgggcccaggaaggggaaatgaatcagaccacacagagtggctctgccagggaaatgaggtgggaggaggccagagggccctgacttccctggagcgtgagctttgaaggggagggccaagtgagagtggcctctcaggagaggtcccctcatgggcctgggtttaagttgtggcaggcttcagaacaggccttactcagccttatttgctggagacgtgttcccaggtccagccctgccactgtgcatggcaggcccagcctctccagcctggtgccagctgcctctagccttcacacatctcctctgacctgcgcaggtgcacctgggaggcgggcaggccagctcagtgcccattgtgcagatgaagagaagctgggctccatgaagccaggcgctcgctgaagtcaccccactggtgtcagagccacaagtcctgaccccctcagtgcacctggcttggctcctcagtgccagcctcaacttgccgggcgagctggggttaccagcacttttgtacacatttgcttgcttaatcctcttaatttgtggggttggggtgatgttctctgttacagagaagagaaagctggtccagttttcatctagggaggaaagggggtgatgaggaatgcagggggagggggcctagggcgttgagggagctcaggctgggagtagggggttctgcagccatgctccacccagctgggcatcgcctgccccctgctctgcaaacccctgattgtgccttgggtgtgtgagcccactgtccctagcggaagagcttgggccaggggcgaagtagcagcctcattctgatcattggcttctcttccagcagcccaggtcatagtgcatcccaactctcaacttctccccttctgctgcagagagcccagcgtcttcccctcccactcccaagctcccacaggctgagtcctcgcagagaggcttgcgtcagccccatccctgggagctgtcatcctcccagtggcctctgtgctcctcctggagctctaggagtgggggtgctgggagctcagcctgtgtcttgttcccccaggtgatggcactatgcacctacccaaacctgctggacagccccagcttcccagaagatgctaagaaacgtgcccggcggatcctgcaggcttgtggcgggaacagcctgggtgaggccccaacttgccaggcccctaggcgtgaaatgaatgagtgttcccaggcggccccagcctcaagcggagggtcctgcatgcgaatgggtgtgtgaacgtgtgtgggtggctgacagcacacagagtaaacaaaaaatagcgtcctcttcccactcacaccttgctggcctcgtttattaagcaggcggtgccggtgccacctttaggtgcaagtgcctgcatcatgccgggtgtgggtgctcctcctgggagccagcctcattggacagcagctgagcctgccttcgtcacagcaggtttcacccagcagctggaggccaggtagaaacgcagtgctcagttttgttcagcatccttgcctctctgtggcctccagctctgaacatgtctctgcactgtcttggagatggcagccaattgctagggaagggaagcaccttgggacccctccagcccctttctctggctttcttcagtctgatggtgccagtaccccctggtacttcatggtgttcccctcaagccggccctcactcatcctttcagggacccatgccccaatgtctgcatcctgacgtggcaccaggctccacagagtggacctggaacttggcccctgtagatgtgaagatgattctctccctcccctgcggtgatggagttccagcctctgggcctccaggtttttgttctgtcattttctttcctctgtttatttctgctggttccttcatgcagcacccacgctgggaatccagcttccttcgccctgaggaaaactgctgttgttcttagagtcttcctaggatatgagccctgatgttcccgaaagtggagctgagggtggggacagattcccgtggcttgctcagcaggggagtggccccccttgttgtctccatctcccgccacccccgccaactttttctgctccgtcccttattgacggccctgtgcttaccctcctggctgtggcccccctgccctccctttgagtctggacactgtctctctcaggagggggccagctgccccttgctttcccacctgccagcctggatggggtgtgggctggggccttgtgtgccaagacctaaaccacaggctggcagaaagcagccctgcagcccagaggcccggcttccgggctcctttcccccctgcaccctctgcctggccccaagggcaaaggtgtttcccaaagaccccgtggccatgggcctaaaactcctggaagcccccaactgagaggcagggggaggggaatgtgccttttgtgtgtctgatgcgagtgtctggggaccaggtacggatttttgttccacgtgctaagcctcatcaacaggtttttgcaacttcgtgtgagccagagctggggtagtggggctgagagactgtgtccctgtgagttccctcgtggggtattacagcaaaagaccagttggccctcatggtttttgggacccaccctaagccctgttccaggacctcataaacaggtgaggtaggagtccttggagtctctctcatccttcagccaggaagtactttgtacccacctcctcggcttgcaaggaaggttcatgtgtgctaaagccccttgttagctgtagacaagccctgcccattccagggggcaggacagtgtggtccttcgcgtgacagggacatagtggtgtcgctctctgtcacctacgctctgggcagcctgagcacttttctgcccacaggagtaaaaagaaatggagcatgtcactatgctccatggccaccctgacccacagggagattattaaatatgtatacaaagtcttgaagctcatccagagattttatttatttttttgaaacagagtgtcactctgttgcccaggctggaagtgcggtggcacgatcttggttcactgcaacctctgcctcccgggttcaagcgattcttctgcctcagcctcctgagtagctggtactacaggcacgcgccaccacgcctgggtaatttttgtatttttagtagagatgagatttcaccatattggccaggctggtcttgaactcctaacctcctgatctgcccaccttagcctcccaaagtgctgggattataggcgtgagccaccgcgcctggccactcaggatgtgtttttatcataccctttaaaattatttcttgggccgggcgtggtggctcacacctgtaatcccagtactttgggaggccaaggcaggttgatcacctgaggtcaggagttagagatcagcctggccaacttggcgaaaccctgtctctactaaaaatacaaaaattagccaggcattatggcgggtgcctgtaatcccagctacttgggagactgagacaggagaattgcttgaacccaggaggtggaggttgcagtgagctgagatcatgccattgcactccagcctgggtgatgagagtgaaactctgtcccctccaaaagaaaaaaatatatattatttcttagcagggcttcatgtttttgttttttttttcttttttcctttttaagagatagggtctttccccgtcacccaggctggagtgcagtggtgcaatcatagctcactgtaaccttgacctcctgggctcaagcagtcttcctgtatcggcctcccaagtagctgggactacaggcacacaccaccacactcagccaacttttatattttttgtagacatagggtctcactgttgtccaggctactcttgaactcctgggctcaagcaatcatcctgcctcagcctccagagtagttgggattacaggcataagccaccacacccagcaacttcatttatgttctgtttgacgagcaatttggttctcaggtttgtcctggatctcaatggggttgaggtaaaacctagcacctgcctggggtggggcaggagctgtgtgcccttgtcaagcccctccctgagtacataccaggctgtgttctagacaccaaagacactggtgagcaaggtgggtggagcttctgtgctcacaaagctatcagatttgggagaaacaaacatgaaaaagaatatatacgaatgtgtaatcactagttctcatgagatctcggagagagctgcaggattataacgaggggctctaatggagaggaagagcttaaggggaaacgtggcattcacgctcatggggaggatgagtaagaacctgcaaatgcatgccggaccagcgaacagtgtgtgcaaaggccctaaagttgggacctccatgtgactgaatgaaggggccctagggcagtggtgttcgatgaggtgggagtttggcagtgggtcctcagcagggtgtagtggagcacagcccgcagtgggcaaggtgctccgagagaaatgcacagaagaaacgggtaacagcccctgccctggaggaaccaagagtcaagagtcagcgtggggagggcagggctgcttctgtacaaaataactggaggggccagcacagtggcttacacctgtaatcctagcactttgggaggctgaggtgggagaattgctcgagcccaggagttcaaggctgcagtgagctatgatcgtgccgctgcacaccagcctgagcaacaaagtgagaccttgtctcttaaataaactaatacataataaagtaactggagaaattataggctgagagattggctggaggtggagcagaatctttagggcaggcctccgggagacagactagaaatgagcctagaaggatcagtgtggtttggagcataacgtgagatctgaagaaaaagaaacccaggagcctccttggaagggtagaaagtctgtgacccgcagaagtaacattcagagaagcagagggcttgctaatgggtgaaggcctgggtgttcagggaagtggatgctcttagaggcaggaagaatgggaggccttgaggaggagaaggtggggcattgaaaaggggtgaagggaagcaaggagtcctagaaggtctctcttacagaagctcagaaatagcaactaaatcacctattgggggagggctctaacaccagcatctgcacctacccttttttaaacttacaaaatactccaaatgtattagaatactcaaaataacatgacagaagcccatgcccaccacccagagtgacacaagttaacgtttgccagttggcaccttagagtgttggtttggctgttccttttacagctgtgcagagcccaatgctgcgcagagaggctgaggcagagctaggggattccagttcagggcttttttttttttttttaaagaccgtctcaatctgtcgcccaggctggagtacagtggcgcaatcttggctcactgcaacctccacctcccgggttcaagtgattctcctttctcagtctcctgagtagctgggattacaggcacctgccaccatacctggytgattttttttagagatggggtttcaccatgttggccaggctggtctcgaactcctgacctcaggtgatctgcctgcctcaacctcccaaagtgctgggagtagaggcgtgaaccactgcgcccgaccccagttcagagcatttgactgtgttcctcctcgatgccaggcctggactgatgcatgctgaggccccagaggagaatctgctacttccagtcgccatcctgcctcctgggggtggtttttgcagtaaccacagaaggaatagtctggttttctttaaatgcagtgtaaaattcaaaagatctaaaagaatatacaatgaaacatctgccttccacatctgacccccagcccccatgcacttccacagggaattcacctcaccagtttgagtcttcttccagagagatcttgcacctgtacaaatacatctttccattttattttcaaaaacctaaatagcggcctgacatttaaaaaaatcttttttatggaggtaaaaatgttaacgtacagctggaatacctttcacacatgcacacatcgatgtctccccaccaggctctggatacggagctgccaaccccctgtacactctctcatgggtctttctagtcaatacccccaccccagagcagttaaccactgctcagcttccaggaccattcgttagttttacctgtttttgaacttagtataaatggctttcaaccctaaatggcagcgggagggtatgttcacatgggactggaggctggaggatgccttgcagtcccagggttctgtggttgatgctggtcagagccctgggtgcctggggctggccagtggtgctaatgtggggtttttgtttttatttttatttatttttttgagacagggtttcactccaggctggagtgcagtggtgtcatcatagctcaccgcagcctctacctcctgagctcaagcaatcctcccagctcagcctccaagtagctgggactataggcgcatgccaccacacctggctgattttgtattttttgtagagctgaggtttcaccacattgaccaggcttgtctcaaactcctgggctcaagtcatcctcctgcctggcctcccaaaatgctgggattactgcgcccagcccagggggtgctattttggagcctaagtgttggcccactctctcaagtcctatggaaccatgtgtaggcaaccatggtaaaggcatgggaatcccagctctagtgactgacattgtcacagatcacatataaatccgaggagggtgggtggaacagttgtggacaccatttgactgagtagaagccagggcctagaataatgtgtaacgcatagtaggtactcagtcagtactgggtgagtgagtggatgagtggatggatgtgtgggtggatgagtagatgggtggatggatagaggggtgggtggatgaagccaagacaggtggttaagcagtttcccacagttccaaagcaatgggagttgggccccaccccgagaccctcaccccaaacaggcatccctctaattatatggatgttaattatattgaccctgtggagccagacatcctgcctctgttactgtcttgcctgctgtcttacagggtcctacagtgctagccagggtgtcaactgcatccgtgaagatgtggctgcctacatcaccaggagggatggcggtgtgcctgcggaccccgacaacatctacctgaccacgggagctagtgacggcatttctgtacgtgtgagggtggctcgttgttatccggtgtttacccacatgaagagcagccttgcctgttagggcccagcattggaattggctagcagggagggtggcagcacgggtggccaccctctggtcccccagccctggcagcctgcagtctttgcctcttttagtcttcatgagcctagacactactgcagcctcgatttctgtccggagtgcacaccagcaggtccagctgcagagaagccgggggacacccgagggtagccactggcctttctgtggttctgcacgtactggtgttcctcctgtgccaggtgctggggagacaatgggaaaccaaacacatcatttggcctctgcctacacaggcagagcagaccagctgatatcacaaaaataaatgcacatcacaagcttttagtttctcttctgcagtagagaaggacagggtgttatgggaaggagcagtgggaactccgacctggtggagcgggggcaggaagtctccaaggaaggccgagtagacaccgacctgagggacacacaggagtgaactgggagagggggtgtgctctgagctgaaggtcactgtgtgcagaggcctagagctggcaggagtctgagtgctgggaactggagatgctgggggatgagtgcacagcaagggtcggagttaccaggcgtgggctggcaaggcagctggcaccagtacagggccttagaggccrtgctgaggatttgggtcattgtgctaagaacaacagggagccactgaagggtttgaaggagaaggaggtggagcagttagatttctgttcctaagttttaattttggctgggaggggcacaggaggcaaaaggaggtatctcgggctggggtcagctaccgatggggtcggggagggctggggccagtggttacttgcagtctggagtgcagtggagttacttgcagtggagtctacagtcctgggcttgggggactggtggagcctgcagtcctgggcttgggggactggtagagcctgcagtcctgggtttgggggaccggtggaggtttcagtcctgggcttgggggactggtagagcctgcagtcctgggtttgggggactggtagaggtttcagtcctgggtttgggagaccggtggagcctgcagtcctgggcttgggagaccggtggagcctgcagtcctgtgtttgggggactggtggagcctgcagtcctgggcttggggaagtggtggactacagtccttgmggtggactggtggagcctgcagtcccggtgggggactggtggagcctgcagtcctgtgtttgggggactggtggggcctgcagtcctgagcttgggagactgatggagcctgcagtcctgggcttgggggactggtggagtctgcagtcctggggtggggggactggttgcctgcctatccctttctgcacacgcctcccagggcctggaatggtgctgggtgctgtcaactcatctgttctcagggagccatgtgctgtctgaacgcttcctttaatggggctttgtttcctgacctgtaaggctcttgtttgttgagtgcttttttcctttcccaaagcctttcttacacgttaagctcttattggagcccatgggaaatggaggcccagagacattaagtggtctacctgcctagagtcagttcttgtgacatttgggactctaacattggagctccagctaccaatcacatcatcttccattgccttctgctgtcaaggcctctcttgaatcccagaaatgcccagtgtgggaagaggtcctggaggagggaagggggcgtgtccacaagattcagtggaaagaatcaagtcattgtactttaaaatctcgtggcatttttgtagcaaggaactgagtctgaaaaaggacctatgcccgtgtttaaggtggagactctccctgcagagggttttgtctaattaattcaatgaattactggcacatccaccaataccccaaaggaatcccatggcctggtttctcagaaatcttcaacaagcatcctgctcagcttggaaaacaggtcaaagcgccacctggtggcagtagatgggtattttatcccattttaagagtcccctgttggggtgggtgtggggtggggtctttccaaccttgggcactaatactgataacacacattcctgggccccacccctgacatagggaatcaggattacaggagcagggtcagaataattctgagacagggctagtgtgggaactattttagaagtattaaaaatacaagtattgagtctgtttaaaaatatatatttttaaaagaaaaataatatttttaaatttttaagtagggaggtggaggtctcactgtgttgcccaggctggtctcgaactcttggcctcaagcgatttggctgcctcagtctcccaaagtgctaggattttagacgtgagccaccgtgcccagcmtaagtactgagtcattaactacacgttctgcactgtgctgagaactttagaatgttgtattttgcttactcctcgcagctgccctcattttacagatgaggaaactgagactcggggaagtaaagcgacttgcacagagttggactggaggcatgcagtggggccacgggtgaaaggctaggtcagggatgggaagtagtgctggctttctagatgtgaattctctgttgcagacgatcctgaagatcctcgtctccgggggcggcaagtcacggacaggtgtgatgatccccatcccacaatatcccctctattcagctgtcatctctgagctcgacgccatccaggtgaattactacctggacgaggagaactgctgggcgctgaatgtgaatgagctccggcgggcggtgcaggaggccaaagaccactgtgatcctaaggtgctctgcataatcaaccctgggaaccccacaggtctgcactttacttcctcaccagtttcgtagagggtgggggtggctgatacactggctgtctagaaaccagagttaaataattggagggtctctctgcccctagtttcccttccagatttgctaacctaaagccatgaaatttgccacaggccacctcaagaggtgagtaggccaggtgcggtggcccatgcctgtaatcccagcactttgggaggccgaggcagatggatcacatgaggtcagaaattggagaccagcctggccaacatggcgaaaccctgtctctactaaaaacacaaaaattagcagggcatggtggtgtgcgcctgtagtcccagctgctcaggaggctgaagcatgagatttgcttgaactccagaggcagaggttgcagtgagctgagatcacgccactgcactcaagcctgggtgacagagcgagactctgtctcaaaaaaaaaaaaaaaaaaaaaaaaaaaacttagccaggtgtggtggtacatgcggtcccagctactagggaagctgaggtggaaggatcgcttgaacccaggaggcagaggttgcagtgagccaagattatgccactgcactccagcctgggcaatagaatgagaccttgtctaaaaagtgagtaaatgcagacattttctggggcagtttgaataataattattattttatagagattgggtcttactctgtggctccaggcctggctgaagtgcaagtggtatgatcataactcactgcagccttgaactcctggagatcttcctgtctcagcctcctgagtagctcagactacaggcagcaccaccacgcccagctaatattttaattttttatttttgtagagacagggtcttgctgtgtgtcccaggctggtcttaactcctggcctcaagtgatcctcccaaagcactgggattataggcatgagccactgcacccagccagggttgtattgttatttttaagactggttttttgggtgtttttttcccctgttcttcatttgcaaagacttgcctccttgagattatttactcacaaacttaccgttaatcataggcctcattttaccrtcactcttccttatttttctgaactggatttgagaatgctggtgtgtgtgttggtttttctttgatacagcactgctgtgtacctttaaggcctgagaggaaaatgtcatattcaaaacaaaagcaactaaaccaaaaaaaccactaatttccagaagttgaaaagcacccccaattttgcatatttttctttaaaaaaaagtctgcagtcctgcctgttttgatctttctgggccgctgccttcatatgcccccagtgctatttggacacagggaacaagggctcctctctcctcctttgttgagataaattgggtcagggccaaaatgcattggagttggttgtggaatctgtttctcgggaacatcaaatgatgcttcagtcagctgaaaacaccccttgaattcccgagtgcagaaaatgggtgcagctggcgataccactggcttgtttaccccagctcctgggagtgtgggggataaagattcagtaggaaaataacatagagctggcttctcaatcctggttgtacgttagaatcacaaagggaactttgaaaaatgtcaaaattgaggccacaccctaggatctctgagatatcggtagcctgtgctgccgaggctgagacccactgcctcagaagcatggtgcccaagctgcggggccccacttcagacacttggatgtaattgggccggggtatggtttgagagtttgcatctctaacaaattcccaggtgatactgatgccgggcccaggaccacacttggggtagcaagttctgcaacatcttgggaaagacactgtacctagtccacatcacagagtcaacacattcttggccaggtgtttacataaatcttttcacctgactgagaagaagtcattgtaccagagaagtctcctgctctgagtaaagaggtcattttctattaatctgatatattgacataagtaatttttataaagaataactttatgagtgggcaggacctggccttgctcccggggtcttcactgtgtgagagtcagtcagctgtgagaagagggtctctggaaaatagaaacccacctgtgatgaccatatgtcttgtctggaccacacactgtgaccagggtggcttaaaggtgtcagagtggactgggttcttaaaccaggacccttttggtttcaagacagaaacccaacttgagactgaagggattggagggtggaactgtggagtgcagggttgaagcagtgcgcctgagtcagagtccgtgtcacaggagcctcggtaccctcctcagctgtaccttcctctgggttgcagtcctcaggaagaatccatccttggagtggcttcagcactttcagccattgccatcagctgagctgccttacagccgagcctcttccagagtttcaccattcccaagttgggtcacctgcccattcctgaaccagtcaaatccctgggactctgattggcagctctgtgtcccaggcctcccgctggagttccccataggacagtggtattaggccattcttgcattgctataaagaaatacctgagactgggtaatttttaagaaaagaggcttgattggttcacagttctgcagactgtacaggaagcatggtggtatcagcttctggggatgcctcaggaagcttccagtcaaagcggaaggtgaagggggagcacgcacatcgcatggcaagagcaggaacaagagagagaatcagggcggggcaggggatgccgcagactttcagggtctgctcccttgacccaaacacctcccactagacccacctccaacatggggattacatttcaatgtgagatttgggtggggacaaacatccaaactacgtgaacagtcgtgatctgtcactcaaaggaggatgctcagtcaccagctacagatgttcccatcagcttttggggaattaatttggcccagcctcgaaaggtacttgggagacccctctccagcctttggggcctgtatcaaagccatgtctcatgtctcccccagctgtgccctggcttctctaatgccatttatgacattcccttctcctgcgccactgttcatgcacttatctgttcactggctcagcgggcatgctctgaggcgctggagagaactaagttctgcccttatcctcacgctgtgtgtaacagcagtattatttgcacacactgggtctcatttcctttactgggctgaagtctttttaaggctctggttcttgcttagtcacttgtgtttcctttagcatttagtgaacacagcttttctggtgctcaaatcctggtttgcattccaacaggataaagtttgtggcatcacaagcatggaagggcaagaccaggaggaattacaggcaggttctgctgtcctcagaaaccagcccttctctgtctgtgagaatagtggctggtttcttatagaagctggggcctgccaccctcctggcatcccagaaccctgagctttttaaataggaagcctagttggtgctttcttggcagaagaaaagttggtccgttagtaaaggaattggttcattgcttagctagttcaagatagaaattctaatggaatcatgccacagtcttacaaggtacgtgtgtatgttttttccaggcatattttttatatttttccatagaccagaatataggtattattaacaaaaaggtaagatactctatatactgttttgcatatatatatatgtatgtatatatatatgtacacacacacacagtaataggctgggtacagaggctcatgcctgtaatcccagcactttgggaagctgaggttggtggatggcctgagcccaggagtttgaggctgcagtgagctaggatcatgtaactgcactccagcaagagtgacagagcaagacactgtaaagaatatacatacatgcatgtatagaaacatatgtacacacacttagatatatatgtaatatacacaggcatatagtaaacaaacatagcccttgttaagaagttagcaagcctgattatagtggtggttttccagaggatattgtgagcacatcagatattcccggtgccacactcaaagcaggtctcaggaaataccgagggaaggtcccatttctacctcgttgcgtttactccttccctcacctgtacccatggcatttcgtgtgaacggatggatcactatcttgctgtttgcactcatttctctaaaatgggggctgggtgcggtggctcacgcctgtaatctcagcactttgggaggccgaggcgggtggatcacttggggtcaggagttcaagaccagcctgggtacatggtaaaacctcttctctacaaaaaataaaaaagttagctgggcatggtggcttacgcctgtagtttcagctattcgggaaggctgaggcaagagaatcacttgaacccaggaggcagaggttgcagtgagctgagattgtgccactgcactccagcctgggtgacagagtgagactccatctcaaaaattaaagagaaataataaaatgtgttgtaagtgttctctgttagcgttgagtcctgcagcgtgctcatctttagtgatgcatggtagcagctgacaggagacaccaaagctggtgcccaggcccattcacttagcatttattctgcagttattttttgagcatctgttgagtgctgtcttccagggcagacgatgagcggggagaggccttgtccctgccttgtggagctcatgggtgcctctctggggagaaagaagctaactcttcacccggtggccacagccaatgcgagtctcttcaccatctgctgctggtgtgcagtaatgggggggagggcacaagctgatagatttaactcctgcagttgtattttcctgctctttgttttatttttgagacagggtcttgctctgtcacccaggctggagtgcagtggcacagtcatagctcactgcagcctcaaactcctgagctcaagcaatcctccagtctcagcctcccaagtagctgggactacagccataagccaccacacctggataatttttattgtagagttgaggtgttgctgtgttgcccatgcggtctggaactcctgggctcaagcggtcctcccaccctggcctcccgaagccgctgggattacaggcgtgagccattgtagcaggccttttctccctgctccttatgatgcttccatgcctttctgttctgcagcacagacataccacacacacaccacatacacacacaccacagagacgtacaccacacatagacacatactacaaacactgcacacagacacccacacatgcacgtgtgtgcacacacacacaccaccacacctacacaaataccacatagacacacaccccaccacacctacacacacaccaaatacagacacacacaccccaccacacctgcacacacattacacaccatacacagacaccccaacacacctacacacacaccacacagacacaaacacactcttacaccccaccacacctacacacgcaacatatacagacacacaccccaccacacctacacacacaccaaatacagacacacataccccaccacacctgcacacattacacaccacacacagacacacctcaacacacctatacacacaccacacacagatacacacacactcatacccccaccacacccacacacacactacagactcacacacacaccacatacacacaccccacacacaggctcatatacccaccacacctacacacacacccccatcacacctacacacacacctacacacatacacagacacatacaccccacaccacactacaactacacacacaccacacagacacacacacacccaccacacctacacacacacacatcccaccatgccaacacaccacacacagacacatgcacatgtgagtgtatgcgtgcacacaccccaccacacctacaaataccacaccacacctacacacaaagccttcataaaaataagagccgggccgggcgtggtggctcacacctgtaattccagcactttgggaggccgaggcgggcggatcacctgaggttggcagttcaagaccagcctgatcaacatggagaaaccccgtctctactaaaaatacaaaattggccaggcatggtggcgcatgcctgtaatcccagctactcgggaggctgaggcaggagaatggcatgaactcgggaggcggagcttgcagtgagccgagattgtgccactgcactccagcctgggtgacagagcgagactccgtctcaaaaaaattaaaaaaaaaaaaataagagagccaggtgagaaccccttctccctcgcataactggctgaggagagtcagacacacaggctgctcttctgggcgtccctggaggccgactacaccatcatgcatggcagctggggaggggggcctctgcggggagggtgttctatgggtctcaagggaacacagggcactgagtgattctggatgggcttctgacctggggacaatttaaacagcattacaaccgacattttggttttcttgggkattttataggccaggtacaaagcagaaagtgcatagaagatgtgatccactttgcctgggaagagaagctctttctcctggctgatgaggtaagaatgtccccactcagagggagtgggcactagctttctcttctagagggagggacccagcccccattgttctgcagccagagagaactgtcttggtgttggaggaatgattctggcctagggtgaggatatttagttttacaacttgtgggactgtgacttaatttacccctttattggtttgtactcttggttgtaaatttcagaaattcagcccaaatcacttaagctccaaaagaaaaaggaaaaagaaaaaatgccagtggggtcacaggtacgcagctggatccaggggcttggaccttatctttcaggtcctctttcccttttctacccctctgtgttggcctcatacacaggcctgttatcttttcagcctagagattcccagcctagaaagagggctttttgccctggtggttgcagcaagtctcagaattgagcttcattggttcagcctgagtcacacgcccattgctgaaccaatcactgtgatgtaggggttccagtatgcagattggccaggcccagagcatagggtgggccctctgctttcttctcccaaacctccagatagagaaccaaggagggttattccttgagggccaattgagggggctcctacccaacaaaggagggtgggttcccagtggcagaaatgactgacgcccactcctcataaagctgcagttctgtgcctcccagcgcttctgtatctactgtctcatttaattcgcttacatctcaggaagggatcttaacccggtacctgttgcttcttgaactccagttctggaaccagggtctgctcattctttttctgttttgtaagaaagaaactgaggttccagcaaatcctctttttatttcctcttcatttctgcatggtttccggcgagctgcagcttctagcccgctgccttcatttctttgctccttgtcacccccccacacatgccacacacataaatgcagacacacacacacgcatacacacacagacatacacacatatacatatgtacatacagacacacacagacacacgtacatagacacacacacatacatacacacacagcttacccatcaaattgttgccttaatagtagatgggcctgatatcttcatttctaaaggagagaaagggcagcagagagacccatgggtttcctcacaacctggtatacagaacttccttctgggtctgggaagaggaggacgaggaggacagggcctggcttggcaatggagccagcttgaccctccgactgatccccagggccccagaaaggctcagtttctctgatctccaaaatagatggggaattaacctcaaaggccagggtgggtgtctgccagctgtgagtgctggactcgggactggaaagaaccaaacgggtataaaygctgctctggcagggaaaagtgggtggaagaacacaatgattccactcgagtggggggttaagtgttgcaaaggaaacccaacagggttagctcttcaaataggaggtcagaggaaagggccactaatgccgtcgtcaccagtgttggtaaagcaaggaagcaccgtgctttaggaggagagtctgcttgggaggatgggggtctcagcaccatcactggtcagatggggtggaagggaagtctggggattgggtggggacgagtgtgagagaaatcaagtgagctcctgagctgtctcagcatccagcctgaggccttgcctccttgcttattccagaaagttycttcaggcacacttggctcatccctggaatggcacaggaggctgggccggctgggcctcatggcccacagcacctgtgccctcccttgccttggccacactgggcagcagcctctttgaggaccctttggtgaccgtccctgccgtgcccccgcaggtgtaccaggacaacgtgtactctccagattgcagattccactccttcaagaaggtgctgtacgagatggggcccgagtactccagcaacgtggagctcgcctccttccactccacctccaagggctacatgggcgagtacgtgggcctcccttccctctgccactgctgggcctgccagatcctcacgctgccggctcctctgccctgccccgtggtccacccacttggatggagagaaggctgcccttatctgttgcttctgctgcatctccccagtgggagagccgtggtgtgagaacagccctggtacaggggctcaaataagggcgtgctcagagaagcctgacaacggacaaatggagtggaaacaggactacatggcagcttgcgacacctggtgttttctctgtcacttgttccgaggttgactgatgtctgagaggtcagggagggcagatagagcagacaaacagatgctgttaggctgactggctgtgctctgggtgcagggctgccttaggcactgtgtgacctcagaggctaaagggtcagctgtaatcctgtgtctgttcattcagctaatgtttactgagcacttacgatgagtccggcactgatctcagcaccgcggatgccgcagcgaacaccctcctgccggcacaaagcgtgggttctagtgaggggggagagctgtaggcaaatgagtaaatcgtgcgtcccacggagaacagtcattaggagagaggtaggggtggggtcgaaggctgaagtggtgcagcctcactgaggagttggcttctgagttaaaccccgaaggagtgtggtggggaactgtgcagatatctgggggaagagcattgcaggcagcgggagcagcctgggcaaagaccctgtggtagcagcacacctgctgtgctggcagaacacacctgccatgttggcggaacagccaggagctggaaaggagggggcacgggggcagtggcaggagtggagacctgagaattataggaggccaggtcacctggtccactttgctgattgtatttttcacttgtgttcagcatgagataggagctgttggagggggtgtggccttgcttagctggtgtgttgctccttctggctgctgtgtgatgggggatggggacagaggccaggaggctgttacagtctcccaggtgagatatcgtgcaccagacagagatggggagaggatcctggatgtatttgaaggtggagttgataggaattgtgagtggaaaagacaggtgtgggagagaagagtcaaagatgaatcctggccaggtgcagtggctcacgcctgtgatccaagaactttgggaggccgaggtgggaggatcactcgaggccaggagtttgagatcagcctggataatatagcaagaccccttctctacaaaaaaatgttttaaaactcasccaggtttggtggtgcgcgcttccagctactcaggaggctgagatgggaggatcgcttaagcccaggagttccaggctgcggtgagctgatgacgccactgcatgatgaatctttagttgttcaaacaacaggaaggatggtgttgcagtcaacagatgaggaaggctgagggtgaagcaggtttaaggggaaagagcaggagtttggttttggacctgttaaactgaaacatgccagcttggcgtccaggtggagagagatgtgtaagtctccaggcaggctgacctctggtgggtggtttaagtttgggagatgtccgggtgtgaattgtaagattgttggagctctaagcctggacacatctcatacktacatggagtgaggcctgggcctgggcccccactgctaggaggttaggggaaagaggaggaagccacagagactgaggagagaccagtgggtttgcagcaaagggcatgtgttcccaacgtggtggggtcctattctgtgccaggtgtcggcatggggagggctcttggttgttaggctggaacagtgtaagcgtgaagctcaaaggaatacttccgccaggtcaagggagcagtccccttgggatggctgccaaactgttcttgggcttctttgatctgggcgcaggctaacaggctggtctttctggtctaccctgtagcagttctggctccttgcttgacttccttttgctctgtagctcttttcctaaacaaatctgttctcggtgaactcagttttcaaactcaagcatgtttaccacacacttatccattgccccatctcagttattgattacactaccagtcagtgccctgatgttgggatcctgagtcgtgcccggtgttctcagatctggatgaattagggtctgactgctttactcattttgattctctgctcatcagcaaaggattaagcagaaagttctttctttccatttttgttaccagacacttttctgagatgttagaatttatcttcccaccttgaaacgtccagtccagggatcagatgggaatctttgccagttccgttcagcagtgtgatcccaaaagcatggtttttttgatttttgttttgttgttttgagatgtaatctcgctctggagcccaggctggagtgcagaggcgcgatcttagttcactgcaacctctgcctcccggtcttggttcaagcaattctcctgcctcagcctcccaagtagctaggattacaggcatgcaccaccatgccaagctaatttttgtgtttttagtagagacgggtttcaccatgttggccaggctagtcttgaactcctgacctcaagtgatccgtccacctcggcctcccaaagtgctgtgattacaggactgagccacttcacccggctcccccaaaagcatgttactaagcatctcattgtgtcaggtgctctgaggctgggggtgggggatgcatggaggaaggtgaccaggttcctgcctccaggcacctgcgttcctgtggtcgttagtgtgaacgtttgcagccacacaccagagaaggagatgtatgttgctgatttggtctggaaagatttttttttaaaactcatcatgtgtcctcagcttattttcatatgatttgatttataatttggctataaattacagaacttggcacggtgactcacgcctgtaatcccagcactttgggaagctgaggtgggaggatcgcttgaggccaggagttcaagaccagactgggcaacatagcaaaaccctatctctacatacataaaaagtgaaaaaaattagccaggcgtggtggcacacacctaaaggtccacctacacacaggtgtggcacacacctacagtcccagctatttgtgaggctgaagtgggactattgcttgagcctaggtggttgaggctgcagtgagctatgatcatgccactgcactccagcctgggtgacagaaaaagatcctgtctcttagaaaaaaataggagtttgtacacaatcatcactgttgttcaccttccattggcaagaactcagccacacctggccatttggtgttgggtgtgggaatgctttcgattctggctgtccaaatggcactttgttgaggtctttctataactggtggtcctctccctctctttggccctccaggtgtggttacagaggaggctacatggaggtgatcaacctgcaccctgagatcaagggccagctggtgaagctgctgtcggtgcgcctgtgccccccagtgtctgggcaggccgccatggacattgtcgtgaacccccckgtggcaggagaggagtcctttgagcaattcagccgagtgagtccactgtgatgcgtctgcacccctgtggccggggtcacgagagttcctgctgggccagtggccagcctgtctccaggtggccagacagcagcctcctgagggtgtggcctgcaggtgcactcatggctcttcagagcctgaaccacccctatgagttgaagtctggaagcgcagctgggcattgtttggaagtaggaggactgtgagtgtgtgtgggcaggtgaacccttcctcttcctcatggcgagtgtcgaagagggaagggagctgtgtcctgataacacactggggggactcatgaaactgaaaagaagacgaggaggtagaggggcgcagcatcgatcccaggcccccacccgcctctgccaacctgtgtcctcacagcttgacagggtcctccagctctgacagctttgaccagttcaaacaaaggaatttatgggtcaagtaatctagaagtcagctcccaactggtccaggctcacttcttttttaaaaaattgtggtaaaatacacataaagtcgacctttttaacctttataaagtgctcggttttctggcattcaggacattcacaatgttgtgcggccatcactgccatccatctccagagccgttccatgatcccacactgagctctacctgttacccactaacaccctaccctgccctccccttagccccagcagccacccttctacccccttctctctgcactcacctcctcgagattcctcatataaatggagtcatgttggccgggcgtagcggctcatgcctgtaatccaagcactttgggaggttgtggcaggcggatcacctgaggtcaggagtttgagaccagcccggccaacatggtcaaacctcatctctactaaaaatacaaaaatcagccgggatggtacatgcctgttatcccaactactcgggaggctgaggcaggagaatcacttgaacccaggaggcggaggttgcagtgggctgagattgcgccatggcactccagcctggatgacagagcaagactccgtttaaaaacaaaaaaagtagagtcatgtcttatttgtctttttgtgactggcttattttccttatcatgatgtcctccaggtccatctgtgttgtggcccgtgtcgtgattccaggctgaaccatgctccccacgtggacaggccacatagtgcttatgcctccatctgcagcccacaccttccacgccacttggccggcggcacctgtggaagccctggacggtgactgtgctccagccgtggacatacgcccagctcaggcccagtcactgaccttgacttgctctgcctgggtcctgtgctgcatgcacaccacacagacagagggtggggcgcgctggtcccccccagatgcattggtggggcccatctgcagaagaatgggcatgtgtcctagaagcatgttctgaggaattccgtccagagccaagtccatacagactgacaggcaacaactggtttttctcattttctggaaagacatcctggtacgagaatagaacccatgacacaggctgctgggctctaccctttggcctagaactccctggtgtctgtgtgccccacaccccagggcacgtggcagcctcccagggtgagcgctgtggaagaatttgtgccgggagatgtgttccacccacctccctgttttgctgtgctcaggctcacacaagctcttctttggtcagtctgtctgataccccagtgtcgaaggaacagaccaccccacccactccgtctgtgtggtgtgcatggggcatgtgacccaggcagagcaaatctgagtcaacgcatgggtcagaggggacatgtgttcaaagctggagcaaagtcatcatctgggatttccgcaagtgctgcaggaaagatcagtggctggagtgaatctttatccagagatactgactgctgtgctgtttccatctctcatcaggagaaggartcggtcctgggtaatctggccaaaaaagcaaagctgacggaagacctgtttaaccaagtcccaggaattcactgcaaccccttgcagggggccatgtacgccttccctcggatcttcattcctgccaaagctgtggaggctgctcaggtctggggcatgggctgggctggctctctcttaccaggttcacctgagatgctgggttgggggcccctgcttatcttggggagcagaagtgctggccctggaggctcggaactgtatgcacctctcggccagagggtgttgaccgtgtaaagatgacaggttcttggaggcccagctgtgtgctgtgttgatgggcaaacatgaggtgggccccaggggaaaggagctgatctggactctgtgaatgctgctgctcccaagggcggtgcccaggtgagatgcctgcggrggaagcagcaggagctaccacctccacccagccactgcattctggagcagcgcttcccaaacttcagtgtgtgcaccgatcacctagggcctttttttttttcctttttgtggagaacgggtctcgctagattgcccaggcaggtctcaaactcctgggctcaagccatcctcctgcctctgcctccctaagagttgggattaccggcttgagccactgtgcctggcttgtttgttttgttttaattacatttttatagagagagatggggtcttactttgttgcccgggctggttgcaaactcctgggcctcaagggaacctcccatttcagcctcccaaagtgctggaattgcaggcgtgagccactgcctggcttgtttttttgttttttgttttttttttctgagacggagtcttgctctgtcgcccaggctggagtgcagtggtgcgatcgtggctcactgcaagctcggcctcccgggttcgctccattctcctgcctcagcctcccaagtagctgggactataggcacctgccataacacccggataattttttgtatttttagtagagacggggtttcaccgtgttagccaggatggtgtcgatctcctgaccttgtgatctgcccacctcggcctcctgagtaccttgttaaacacccaagtctaggccccatcctagacctacagaatcagaattcctagtgttaggctgggtgcagtggctcacacctgtggtctcagcactttgggaggctgaagtgggaggatcatttgagcccaggagttcgagaccagcctgggcaacatagtgaaaccctctctacaaaaaatttaaaacttagctgggtggtgcatgcctgtggtcccagctccttgggatgctgaggtgggaggatcgcctgagcctgggaggttgcggctacagtgagctgtgatcatgctactgcactccagcctgggcgagagcaagatctcttctcttaaataaatttaaaaaaaaagaatccctgggccaggtgtggtggctcatgcctgtaatcacttttgggagcccaaggtaggtggatcacctgagatcaggagttcaagaccagcttggccaacacggtgaaacccccatctctaaaaatataaaaaaaattagctggacatggtggcctgcagtgtaatcccagctactctggaggctgaggcagggagaatcgcttaaacccgggagctggaggttgtagtgagccgagatcacgccattgcactccatcctgggcgacagagtgagactctgtctcaaaaaaaaaaaaaaaaaaaaggaatccgtggtgtagtccgagcgcggtggctcacgcctgtaatcccagcattttgggaagctgaggcaggcagatcccttgaggtcaggagttcgagaccagcctggccaacatggcgaaaccccatctctactaaaaatacaaaaattagccaggtgtggtggcacatgcctgtaattccagttactcaggaggctgaggcaggagaattgcttgaacccaggaggcggaagtagtggtgagctgagatcataccactgcactccagcctgggtgacagagggagactctgttgcaaaaaaaaaaaaagaatccctgatgatagaacctgagaatctgtagttaagaggctccccgggtggtcatgcaaaccagtgtgtgggaagcagtgttgagagtgcctcagagaagctcgttccatgaaaattgtgtgcagaccccagggccccattttcagaggattatgcagcttgacctgcaggaagccactgctgatgcctgttgagtggctgcctggggatgggcactgcccgatgacgggcaggaggaccactacctacacctggctgtcctgcagtagttttcaggtgtctgtgcctggcaccagccaccagcagtatcccagcgtctggccctggtcctctaggagcggaaggggagaagggcactgccgtgggagagagacctgccatttagattacatttggctttgagggttgaatggtgtgtttgcaaagccaggaatgatcatgagctctgtctgctcccataggcccatcaaatggctccagacatgttctactgcatgaagctcctggaggagactggcatctgtgtcgtgcccggcagtggctttgggcagagggaaggcacttaccacttcaggtatgacttcctctccgcactaggggctggtccgggtcttgtccagggaaatgtggacttcttgacatggagcagaggactacttcaaagagagaggtgcggagaccctgtcctctctcgagtcacccctactctgtcctgctgcagacccaagctcagaccctgcccagggattaagaaaatctgggtggttgtctgctcagggttatattccctgaaaggtcttccttgactattctgtctctcccctctgccatcggtcccatcgctgtctgaaatgttcctagtagggtgttttcttattttgctgtccgttttcaactctgcgatggcagcacacagctgccagtgcctggagtggtgctggcatgtgcttagtagctcctggcagcaccctgggccatggcactgcctgtgatcccagagcctgccgaggaactgcaggggaatttgctccactcatgcccagggcataccccgttctggccctgcatggatgggaatgccggtgcccagagctgagctggctggagcagaggttttccactgaggccagttctcttcagaacaacatcttccccatacatgttgctctcagaggtctcctgcggcagatgctaaaaaaaagaaatggcatgagctgttagcacccggagccaagtcttgacttargcaaggttgtgggttgtgtcccctgatggacaaaccttgtccggttggccttcccacccctggtcaggctcatctcggtggttgatggcttgatgagaaagtgatttaagcaagagggctgccaggaaggccagggagcattttggtgcaccagagggaggtgttagttactgtggcaacttggaaattcctttggagcagagttgtgactggagggtgtctcactgtcagactgactagagataaaaaaggcccctcaggtaggagtgaaatctctctctcaaactctaggaaagcccgagtcatactctagagaaagttctgatcagtggtcaaaatgttccagagggctgagtgcagtggctcacacgctttgggaggccaaattcaggatggcttgagtccaggagttcaagaccagcctgggcaacatagcaagaccctgtctctacaaaaaattgtttaaaaactagccagggatgttggcgcatgcccgtaatcctagctactcgggaggctgagatgggaggatcacctgagcccaagagtttgaggctgcagtgagctatgatcactctactgcattcaagctggggcagcagagtgagaccctatctccaaaaaaaaaaatatggccaggtgcagtggctcatgcctgtaatcccagcactttgggaggccaaggtgagcagatcatgaggtcaggagttcgagaccagcctggtcaacatggtgaaaccccgtctcttctaaaaatacaaaaattagctgggcgtggtggcaggcatctgtaatcccagctactcgggaggctgaggcaggacaattgtttgaacctgggaggtggaggttgcagtgatcgcgcaattgcactccagcctgggcaacaagagcaaaattccatctcaaaaaaaaaaaaaaaagtgatgcaggccttctgcagtaatgggtggatatgtcttagcctaaatgctgctccagtttattgcttttgttcacgtgtattacttgggtgaaaaaaccaacatgtgaatgaaggggaaagtggtccaagtgctgggtgctgtccgggctggagctgtcgaagcagaccaggcagacctccctcttccattcctagaggcagtttagctgctggattcgttcctctcccatcttgcagagcagccaggctgacactgttgtctctcctgccaggatgactatcctccctccagtggagaagctgaaaacggtgctgcagaaggtgaaagacttccacatcaacttcctggagaagtacgcgtgaggacgcctgagccccagcgggagacctgtccttggctcttcctcccaatgcccgtcaggctgaactcgcctcccccgtgactytgcctcgggcctcgcagaggccgctggtcacttcgtcatcattttgcccctggagacgtctttctttgtgccttgatgttgagagcgcctctcttttgagcaaacaagcattctatatgcaaccagagtagaggggacctgctcagcaggtgtgaccagggttctctgaatctgttattgtttttgcttctggaaagttcatttggggtttacaacaactaggatgtgttgggtgagatgtttcagatctggagaaatgagcaggtgtcgggaaatgtgtgacttaaccgtggtgagggctggaaatccaaactcaccaccatgatctgtgaaataaagcccttagcggtgtgaagcatccggtcctttgaacagaagggcctggaaggcccctggggctgagaaagggtccgcccggtggcctggaggcaggcgccrggagcgcagtagcacgtggactgggcaggatgttgcactagcttggggtagatgctgggggctgcggccacggtcagagggccccactgtgaggcgtgggtgtgagccaggctgcaggaggaactgggcctccgcttcccagcaacgcagccaggcctgagaattctgtgcgcccggcgggctttgggaatgaggggttcccttgaacatgcgtaggctggaaccccgtctgagaggtctccctgaatttcagtgacacatagtgcagcccggcagtgtcccacttccgtggagagagccgctggaatggtgtggacccatcccgcgggtgaccggtgcctgttctcccctgaccgagcctgtgagcacatcgccccctgctggcgacagcggggaaatgagggctgaaaatatcctccccacaagggcaatccccgggacctgccgagcagccaaggccctgtcctttcttgaatggtggcgagctgaatctggtcggtttcctagcttttaggtggtaaaagtgcctggcagcttggctgccgtggaggagtcagtcgtggttggaggttcattgccgtgctttcatgcagagtgttttgccttcatgttagcttccggctcccctcccaggctgcagactctgacctgtggcatcaggcttctcccagtacaggagggtgccatcccccagcatgcggcttctctgccattagcagccctgggcgggccgaccacactcgaggctgcggtgctacgggcttagccctcgcctccctcactgggagcttccccatcctccctgccttccccagtgggaagttagggaagctcaggagcctgggaccccgcatgtcccaaaatgggattggagaagctggagagaaagcagaagaggccgaggagtgaggcagcagcctctatgcttgatttccacaccgggtccgtgcagaggaaacagaaactcccaactgtccttacccaccgacatcacagcccctatgaagaaagtagccacaatctcaaataacaaaagggaatgttctaaaactttttcttccttaaaaaatggagaaaattgcacttgtgcttgctgtgtggtatataaaccaggattagtcccagggtcgtgaggtttctggtgaaaaggttaaatcgtagaagctagtatattttttatatttttgtaacaattgcttttttcatgggggaggcggggttagtatttatagtcctaacaagtccagtaattttttataaatcttcagattataaacagcccctaaaaactttacaacgtttacacagttttttaaaaagagactgtatacacttgatttgctttcaaaataaataaggtcagctagtctaggaggttaacgtcgggtaggaatgctgatcatgataggtttggttttctacagattctgttccggtgcctttcctatccaggcaccacctgagaaagttgtcatttgaggtcgcacttggaagttacatctgtgaagtttctgtcattcgtccagatctgtgtgtgtagcatgtgctgaggaagcacgtgctgggctgtgcctcagacagtgcatcaccgggcacccagaggcttgcctggctattcctgttctggtgtgtgtggagtgttggggaggaacagatgcagatcaacctgtggctgttttcccgtctaggttctcacaggtatctcctgacagaggtacttaacaatggctctgctggaaatttctatraataaaatgtccaaaatggtgactgcgtttaactttcattgtagtttgaatgtaaacattgaggacattactaactttacaccttcactctttgtaatttatgttcccagcacaataatggacatttcccccaaacatgacagaactccactccaggcacagcttctcagcttccatgttctttttttttttttttttttggagaccgagtcttaccctgtcacccagggctcaggctggagtgcagtggcgcgatcccggctcactgcaacctctgcctcccaggttcaggcgattctcctgcctcagcctcccaagtagctgggattacaggcgcgtgccaccacacccagctaattttatatatttagtagagacatggtttcaccatgttagccaggctgatctcgaactctcaacctccggtgatccgcctgcttcagcctcccaaagtgctgggattacaggcgtgagccacgttgcccggcctccatgtcatcttagggcttgatcctaagacccctgtgctgcttttttgttcacttatggtggagaaacttcatggattctttgaaatacaatgtgcttaaaatgaacacagaccgtggctccctggtggaagagaaataagaacaaacagcctcttccctggggctggggagggtgggcgagggagcactggaggcccgtgggcaaagggggaattgtctataagagggagttcgttcatttcccatatcgacgtttgattttgatgtgtgattttggaattcaggactttttctcaaaactcaaatttctgtgtcttcactaaagaaaatttggtggccaggcgcagtggctcatgcctataatcccagcactttaggaggccaaagtgggaggattgctggagcccaggagttcgagaccagcctgggcaaccaaaaaagatgctatctctataaaaattcaaaaaactagctgagcatggtggtgtgcacctgtggccctgtctgcataggaggctgaggcagaaggatcacgggcccagtagttcgagaccagcctgggcaacatagaccctgtctctacaaaaaaaaattgaaaaaatgagccaggtgttggggcacacacctatagtcccagctacttgagaggctgaggtgggaggatcacttgagcccaggaggttgaggctatagtgagccttgatcatgccactgcatgctagcctgagtgacacagcaagacccagtctcttctttattttttttgagatggagtcttgttgcccaggctggagtgcagtggtgtgttatcagctcaccgcaacctctgcctcctgggttcaagtgattctcctgcctcagcctcccaagtagctgggattacaggcatgctccaccatgcccagctagttttgtatttttagtagagacagggtttctccatgttggtcaggctggtctcgaactcctgacctcaggcgatctgcccacctcggcctcccatagtgttgggattacaggcgtgagccaccgtgcccggccgactcagtctcttaaaatttggaaaatatagaaagaaaaaattacttcagttggaagtgatagaaatccactcagagtagcgtcagcagaaagaggaagtatggcctcgcgcacctgggagggaagcctgcttcggtttttaagttcactctgttaaatgcagtctgtctcgtccaactccacttgaaaaaatcccaagggaggatcctgattggctgcctgggcccatgtgcctttctctgagctcgcctctgatccatgagaataaggagcttgggtggccctgttcacacagcaggaggaggtggagcccactggggccataacattgaagaggagacgctgctccccataggaaagggagttggatgtggtgctgccccagcaaaacccatttaccacagggccttttcagagagggatagaggagggaggggtgagttcagggtgggttgaggggctgagcgtgctggctcacacctgtaatcccagcactttgggaggcagaggcaggaggtttgtttgaggctgggagttcaaaaccatcctgggcaacagtgagaacccacctctacaaaaactatttttaaaaattacccaggcatggttacacatgtccatggtcccagctactcaggaggccaaggccagaggatcgcttgatgcccaggagttcaaggctgcagggaatcgtgacagcaccactgcacgtcaacctgagccacagagcaggacccagtctcttaaaaaaaaagtggggtgttggcggaggtgaaagtgagccaagattatgtcactgcactccaacctgggtgactgagccaaaccttgtctcaaaaaaaaaaaaaaaaagtgggtgatgcgtagaagggaggggatgatgctgttttccactggtgggcacctgaccacttctcagtgctgtctgctgatatcctgtcactctgccccccaagtggggagaactccaagaagaaggaagatgaaccttactgccagccatccatcagctctcttccttaggaagcacaggtcggctggagagtcagagagagattttattttccactttaaaaaaagacatactgaccttttggctctctccaatttcatctgcctttgctctgaatgcaaatattgggggcatccctcaaagtccttttgaagatactaaattttaaaactttttttttttttggagacggagtctcactctgtctcccaggctggagtgcagtggcgcgatctcagctcactgcaagctccgcctcccaggctcacgctattcttctgcctcagcctccccagtagctgggactacaggcgcccgccaccacgccggctaattatttggtatttttagtagagacagggtttcaccgtgttagccaggatggtctcgatctcctgaccttgtgaaccacccgcctcggactcccaaagtgctgggattacaggcatgagccaccacgcccagccaaaactttaaaaatggattcatacgcagcttaacaaaaacatcaactatctctctttaaaaaactcaggagtttgagaccagcctggctaacatagtgaaaacccggctctactaaaaatacaaaaaatcagctgggcgtggtggcaggcacctgtaatcccagctactcgggaggctgaggcaggagaatcgcttgaacctgggaggcagaggttgtagtgagccgagattgcaccattgcactacagcctgggcgacaagaacaaaatttcgtctcaacaacaacaaaaataaaacccaatccatttatgcctgtaatcccagaacttcaggatgctgaggcaggtggattgcttgagcccagagttcaagaccagtctgggcaatatggcaaaaccctgtctctacaaaaacacaaaaattaggtgtggtggcacatgtctgtagtcccagctactctgagactcaggtgggagtatcacttgagcccgggaggttgaggctgcagtgagtcgagatcatgctactgcttttaagagagaccctatctcttaaaagcaaaaacaaaaagcaacccagaatcccagtaatgtttagaacaaagacagaccataaaagtgtatattacataaaagtgtgaaattctcaaaaaatattttatcaaagtaaacatgcttatatggaaaaaccagaaaataaagaaaatgtgaaacccactgtgatcctctaaccagagttaatcaagtctaacattctgggaatatttctttactgttcttttcctgagaatatttttatgtggttgacgggggtgcatagttctgggtcctgtttccccttgaatgttacaacatgttaataaaaatgcctgatgaaaaacaaaaattagctgggtgtggtggcagccgcctgtaatcccagctagttgggaggctgaggaagaagaattgctttaaccgggaggcagaggctgcaatgagccgagatcacgccattgcactccagcctgggtgacagaacaaaactccatcaaaaaaaaaaaaaaaaaaaaaaaaagcctggtgggcagtttctatggctgcctcagccattccatggatggatgactgtcattcatggcacctccagcatttaggttgcgtacagttcttggtttctaaaataataccggccgggtgcggtggctcatgtgtgtaatcccagcactttggaaggctgaggtgggcggatcacgaggtcaggagatcgagaccatcctgactaacacagtgaaaccccatctctactattaacacaaaaaatcagccggctgtggtggcacgcgcctgtagtcccagctactcgggacgctgaggcaggagaattgcttgaacccaggaggcagaggttgcagtgagccgagattgcaccattgcactccagcctgggtaacagagtgagactccgtctcaaaaaataataataaaataaaataatgccgtataaggaacgtacttacataaagagggtacttctctctcccacccttgtatttaggatcattgcgggccattcttagcagttccattgttagtggtggaaggtgccagcacgcccagctaatttttgtatttttagtagagatggggttttactatgttggccaggatggtctcgatcttttgacctcgtgatccgtctgccttggcctcccaaagtgctgggattacagacgtgagccactgtgccccgcccgccatttaatgcggtgcatcttaatgcacgtgcccgggaagttgcctctccctggtgcctgcattcaattaacactttagggcaacaggtgtggatcatcaggaaatggactctccctggcatgggctcccagtttatcccttttagagaggcaatgttatcactcgacattcctaacgggtgggagagagcactctgctgcgccactcagccctaactacctgtaacaccatgaactcttccaggccagtgttccctaccagggcatgacacctcttcttcactatggtctgggaggcagaacaccaaagggactgtcccgagagcagcgtccagggtaggtggaccatggcatgcaccttggctctaccccttaccagctgtaggattactcagtgttaacactgtaaaacggggctaatacccactcattgggtaatagaataagtgtgagtggctgggcacgtggctcatgcctgtactcccagcactttaggaagctaaggcgggaagactgtttgagtccaggagtttgagaccaacctgggcaacatagtgagaccctgtctctccaaaaaatacaaaaattatccaggcatggtggcacatgcctatagtcccagctacttgggaggctgaggtgggaggatcctttaagccggggaagcagaggttgcagtgagacaagatggcgccactgcatgcactccagtctgggggacagagcaagactctgtctcaacataaagaaacacaaatagaataaatatgagaattaaatgggagaaaaaaatgcatgtgtgtgtgtgtatgtaacttagcatagttcctagcaagcaaatatgtttgttgagcactttagctgattatctttggtttagagcagtgctgatataagtgttcaatatatgttcgaattgaaggaaaaaatatgcccttagtatgccaaatacattgtgaaaatgccatttcccaacatttccaacacatgaacgtattctgctagccagagtgtcagaggcatttgaagcagagtgactctatcttgaatagggactgggtagaagaaggctgagacctactgggctgagttcccaggaggtgaggcattctaagtcacaggatgagataggaggtcagcacaaggtacaggacacaaagaccccgctgataaaacaggatgcaataaagaagtggctaagggccgagtgcggtgacttacacctgtaatcctagcagtttgggaggccaaggcgggcagatcacttgagatcaggagttcaaa

SEQ ID NO: 95129 - DNA, 100073 bp, Homo sapiens
  misc_feature (1)...(100073): n = A,T,C or G
aatatagctaactttagttggatatttttcaaataaacctctagtgacatagattaagatctatttcaccttgctaaacaccttttaaaataacctgttggctgggcgcggtggctcatgcctgtaatcccagcactttggggggccgaggcaggtggatcacctgaggtcaggagtttgagaccagcctggccaacatggtgaaaccccatctctactaaaaagtacaaaaattagttgggtgtggtggcagatgcatgtaatcccagctactcaggtggctgagacaggagaattgcttgaacctgggaggcggaggttgcagtgagatcgcgtcactgcactccagcctgggcgacaagagtgagacaattcttaaaaaaaaagaaaaaaaaaagaacctgttgaagtctgaaaaactcagccaattagttattaataactgaagtaaatgatttgtctgacattaaacaagtgtaactgttgttttcgctaaggtttgttgaattttgaagtatatctccataaatacccaaattgtttctcctttatgcaatgtgtgagtacactaataaatatactttttttacgtgaatacaaaaactagataataacttcaaactggattcattcaagaaatggcagaagagcattacttttgcctgggagtaaggatttttccactggccacctaagatctctgggcagccttttggtgatagggtcagtgctgccagtgcaatgtttgcctatcactttttctctgtgtactatacctgggtatttactgataggctggagtacttcaggaaggaagaaccagaaatagcagggtaagaagtgaatacctcatgcagcccgaggcatcagctgaagcagctttggccatcagtagggtgacagatcaccctcctgttcaacttccttttaaccttgaaaactcaggctaaatatcaccagtcataggatctcttcatagtccagcagtcatcacctctgtttttatgtactttttaaattactctaaatatccttttattccagcaattaatcacatttccttagaattatttgtgtacagctgggcacggtggctcatgcctgtaatctcagcactttgggaggccgaggcgggtggatcacgaggtcaggagttcaagaccagcctgactaaggttgtgaaaccctgtctctactaaaactacaaaaattagccaggtgcggtgacagatgcctgtaatcccagctactcgggaggctgaggcaggagaaccgcttgaacccaggtgacacaggttgcagtgagccaagatggtgccactgcactccagcctgggcaacagagtgaggctccatttcaaaaaaaaaaatcagaattatttgtgtgtacatctccatctcccacatcagatcatgggcacctcaggacagtgacttctccttcttggacctgggaagtgtccctaattactactgaacaaatgggaggccagccacatggctaacacactccgaagggcatgaagaagagaacgtgcaaaagcacgctgctacctgattatatgtggtaggtcctcagttacaactttccctactcttcaattgcattttctaaaatcagcaatacagatacttataattttctgaacataccatgttatttcatgcatctctctgctttacaattttcaagcttacacacacatccatcttacagaggggagtgctgacaaaaaccctaccacttgtgttttttgtttgtttgttttgttttgagacagggtctcactctgtcacccacgctggagtgcagtgacacaatcttggctcactgcaacctccgccttctggattcaagtgattcccgtgcctcagcctttcaagtagctgggattacaggtgcgcaccaccacgcctggctttttttaaaatttttttgtattttttgtagagacggggtttcaccgtgttggccaggctggtcttgaactcctgacctcaaatgatccacccgcctcagcctcccaaagtgctgagattacaggcctgagccaccatgcctggctcctaccattttttaaagtctcagttcatatatgatctttccccaagaaaatctgacatcagtccccactctcctcccaaggttgaactagatgtccctcctttgtgcactcacaatctcctttaatttactgaccagtttaatccatattctgggtttctttgagagaaaacaatgactgatgcccacagtgaactcaatgttcttcaacaggaggatgcactgaaatgcccagacacttcttcacctaagctgcgtgtttgctgggatccattgtttgttctcaaacctatttctgccagtcgtacttgttagtttaattgagtaatttaactagatgtcacttgagtgaatagcacatgagtgaaagagttgtgttttctatgaaaacagatggatgctttggaaagataagatgctagaaatcgtacttttgaatgagccataggcaaaactacagacaggataggggaggggtatgtagtaatcttgaaagaatctcctttcagatttttttaagtgcccttaatttctaacttcactttataaaattccaacctggaaattgttgaagatgcctaatgaaagtagtttatgaagttcctatcagtagactcatgtcacaattagaagcctttggccccatatcaaaagattagtgacgtgtatgtgttaagtcaaaataaaatgtctaaggcatgcacgtatcatctttacctgttcaaccaattatgtattgaagtgatggggaaccagtgggcggcaggaagggagtcgggtatctttctctttcaatagattgtgagtttcttgaagacagggaccacatcttgctcatctaagtagtacctgtgcctgagaaaagtgttcagatcctcaaagattttcactaagtgctcttcacccagtagaatgctgcacttatttttgtttagggggtttcaggtcttgttcagcatttatgcattacaaccacgagggggcaatatagtcacattccttgtaatgaccacccagtggtgttgcctccacgttagagcccctaatatgatgagcccccctaaaatgcattggagaaactgtggcataaacatctcaccaacactggcattctttgtatatccttctcctgtttatttggaggagttgactgattctatcttttctaaacaatataaggatcaactagcaatcaccattttattaagttatgcaagtgcagacagcttctggaaggaagaaatgaaaatgagatggtggagaaggggtggtacaggggaaaccttcatgtaaatgttatcagtagtatcagggatgatcaattggcacaatgttatctatggtgtttttcagggaagtcttggagggaacactactgaagaagttacagattctgtgtctatatgaagcagaagacctcaatccttcctctgtcccctgaatgagtcttctcccagttcctatatgtccgaatcataggctccgaaaattaagtttctcgttgctcatatcttttcagaaggaatgtcctctcctaagagcaagagggtagtgagatgaaaaagaaatctattgcctttaaaaggaaagaccctgagaaaataaaaaaagagtgttttgctttttagtaaactgctgtgctgaatcacgactaaattggtgatctgtgacatcaaagggtcataaacagcctagcttgagtccaaaagaactgaggcctccattttcacagtaaaagaatgcctattccaaaataatttttgagaatgaatgaaatctaaaacaagataagcagtcctgtttacagttatcatggggtattgaaatagttggcgtggaagttgggtgactcagtgggcaggacatttggggtcagagcacttgggaagtcaggctgacctgcgttaaagcctcagctctgctcctaactagtgactacggtcagatgccctcccttccctaagcgccagttttacattgctcatatgtaaaatacaggaatggggaaattggacaaatgatctcacaacctctcccaggtctaaacaatcatatatttcttttccaggaagtagcttacgtatttgtccttaacttcctgtttcaagaagacagctttttgtttttagatgcaatataaaaacaaaataacaatcacgcaaattgctatttttcttttttttttttgagatggagtttcactcttgttacccaggctggagtgcaatggcgcaatctcggctcactgcaatctctgcctcccgggttcaagcgattctcctgcctcagcctcccaagtagccgggattacaggcatatgccatcacacctggctaattttgtatttttattagagacagggtttcatcatgttggtcagtctagtctcgaactcctgataccaggcgatctgactgcctcggcctcccaaagtgctgggattacaggcatgagccaccgtgccaggccgcaaattgctatttttcaattcacatttactttaccttttcttagggcaagatctggcagagtctaagatatggtggaaactaatataaaaggatttttccaatgaaataagaataggatgttgctatttaaacttcatatacatttaaaatgtgctagtttgtatgcagaacagaaactcaaactcagtatttgcccctagctgcttacattggaaggcagtggtggcagtttactcaaaatgagtaagaaaataaatcagcttacaactctagactgtacagacatgcaggctgccttttacgtttctgactcctgatttatttttctttcccaccttcccacggcgaagggcagtcaatgaatactcagatcaagtgtctgtctggaaagctggcagtcttccagaaatacaattaggtatgaaagaaaagtcccatccctcacctccatagaatattactccaactctttcacagcaggaacactagagtgggaatgagaagtgtggcccttgtgtgttacgttacttcttttgagagtatggtcatatccatccgtttgtagcattacacaaggagtcagttaaggtacaaggggtgtgagacccagtgactgcccccaaagtgcttgtcactagagcttctctccctcacctctacttggccttgacatttgggttcgttcagagggttgccccatactgcctttgggttcgttcagagggttgccccatactgccttctggtaaaatcttggcgccctaggcctaagcctgctcatcttgtgcctccttttcctcctcctcrgggcccattccagtggaacagaagtgctactttgggggtggactgaaacaagttgctgggcttccattggccattgccacttgcttgtcgttgtgaggaggggccgtgcctccacaggcccatacctgtaacctgacgatactgttgtgagcgggaatggaggaagtgcatggaagcccctcagcacgatgcatagtgaacagacaagctgtgaaccttgggagttatcaccatgtgtgatgatgctggtgaagaaagcctgcactgaggaggctgtcagcctgggtttgaatcccctcatttggaatataatcttggcaaagtctgaaagcctcaattgctcgtttgtaaaactggaagatagtaggacttgctgcccggggtcggggcaggatggagggggcccatgagaattaaggcagagcccagcggagtgcattgtaaggatccatgagtgtgaaccttcgtttttactactgcatatgaggatcctgccaacaaacctggcggcttcaagcatccttgcccttaaccaaataagctcttaggtcctagaggcaggaagacttccttgaagaggcgcgggaggctggtgaggggagtggaggacgctctgggaccctctgggggtggggcgggcggggtgaacttgaccccaggccgcgtgccgggcgtgccatctgccgctccgctgcaaggtctcgcccgggaccggggctggcggagcgcgcgcccgcgagtaggggccgggccggggaccccgcctaggcggcggcggccgggtccccaaggctgggcgctgcttgcggaaccgacggggcggagaggagcgtggcgggaggaggagtaggagaagggggctggtcaagggaagtgcgacgtgtctgcggagcctttttatacctccttcccgggagtccggcagccgctgctgctgctgctgctgctgctgctgccgccgccgccgccgccgtccctgcgtccttcggtctctgctcccgggacccgggctccgccgcagccagccagcatgtcggggatcaagaagcaaaagacggtaggcttccaggcgccggcttccctccccgccaccgcactgcacgcgccgacccccaacccccaattccccggcacttgggtcccaccctccccgggagggggcgtsgggaggaggagtaagagtggggcacggagggaagcargagaaagaggctctgtgtggaattcccggggcagtcctcgccccgcagcccctctccaccycgcgactctgggaatctgcgctccttggggtcgccgcgcccgcgagagacctcccgagcttctcaagtgggtccggatctagatcyaggaccagggacaggaaatcccctttctttcccaagagctcttccagacccgccttttcttctgtagggtctcggagcagatcgagctgactcccgttctgccaggtctggtcgctggggttttgtctatgggaacttccttggagtgggctttaatgacggactttcatagaggaaactgcaattatcaaagcaaactggaggaaattgcatttctacactggcgggatttagccctctagcttgatttcggcattgggtggcatctcgagttcagtaatgaggggtgagggtgcccctcggtttggtggagtaagatgaggggactgtgttgaggaggcacacttttacccagaattaataatctgagctgtcctcctttaatgggaaatatgagggcgtgtcaaagagaaaagtttctttcccagcaacatgggcacctataaattttgcattcttaaaaatggcagcagttctatttgtcaattataccccaataaactgaaaaaaaaaaaaaaaaaaaaaaaaaaaaaccgggagcagtaatcatagactcttagagttggatggcgccttctagacagcactggggccacgtcagatgtggtcagcaagccttgataaaatcctactcagcagtttggccgctgaacattctatcttcagccaccaccctgcaagcctcagatgattgtactggttactgaatgggttgacctctctctagtagrtagacgtgcaatggacacatagtaggtgcctgataaatgtttattcttatataatgtgtattaccgaaatatctttgaggtgtatttgtggtgggccggggagaggtttaaaaaaaaaaacaaaatataaagccaagaagtggggaaggagtgtggaggggccatgcagggctagaagggtcatttgagcagcaagagaacagggtgggggctctgtggctccagggaccatactggaccagcaggagggtccagggtgtaggtggcatcaatttgggaagggacatttatcaaaatccagctgcctttctcaggagtaatttttaagtgggggactctcagcgttgtaacatatttttgaaataataaatgaaaatcacttgtattttgttcctatttaatgcgattaatttctgtaaaatcctaaatagtgtcttctaaatggcaagccgctgtgccagtagctttttatatcartggggttttaattcccaccttcctgcttgcatcaagaattccttctcagttgtgatgggggactttgtcaagcattagaaagggacgaggtggtctctcctcttgatgcctccagtcggcaggagcccaggaagaggagggtttgagaacagggtcattacaaatcaattgcgggggctctgcacagtcagaagcagtgagaaatttgagggccggagggtttggtttttgtatttacacattctgaaccttctattttttgttaggtgggtgtatgtgtgtgtctgttttatacagcattaaattaactcctgaaacagctaactgaaatagaacttttctgaattttgatttagtctaacgcagttataacccaggcaccaacccaagttcccaaaagggctagataggtactatcggtactatttacagcaagccagctgtaaatgcatgtggaatctctcaagctttgaatgttcattcaaaatgtgttttgaaaccttgcaggccaaagcaaaatctgtccgcttgtgtgacctctgaactaatcaattatttgataagtattgctgacctcacaagctagcctaggagtgagactgagctgatcttttacggtcttataggaatcatcacattgtttactgcactgtcaacagaggacagttaattcacacagcagccactacagtaacttcaaatatttgttgagcacctactgtatgccaggtggtatactgggtgggggaggcggaaaaggagatacctcttttccaggtttttttggccacactctctggatgaatattgcctttcagttcagaccactctaggaagaggagatagttttggtttaaatgagagagtgtaggatgactttttcataagctttagaaaaaataaattaagtgttcttttataaaggaaggtagcacattccttctgttttatgcatctttaccatggaaaccaaagaaacagctaccagtcacattcatcccttcatcatttccacccctcrcttacctccaaccctggctaccctcccacccccacccccyatacacacacatagacacctaggagagggaaagggacagacygcctcyaggggactggaaagaagggaaggcaaaggcctgggcctttcctcttacatcatttcctggattaacatttttcaaggcccacagacagtgctgttatgttctggagacacccaatctgaaaacattgactgagatattaagttatttccgaaggatcaaataggaaaacaattggaaaggagtgaaaagatactgaaaaccacagcgctctccatagatgtaagggattatcaaccttttccttatttattttctttctttctttttttttttgagacagagtctcactctgtcacccaggctggagtgcagtagcgtggcatgatctcagctcactgcaacctccgcctcccgggttcaagccattctcttgccccagcctcccaagtagctgggattacaggcaccaccatcatgccctgctaattaccttttccttattttcagaattgtgcacagtataacattatttttctagaagtagccactttttttttttttttttttttttgagatggagtctcgctctgtcacccaggctggagtgcagagaagcgatctcgtctcactgcaacctccgcctcccaagttcgagcaattctcctgcctcagcctcccgagtagctggcactactggtgtgtaccaccacgcccagctaatttttgtatttttagtagagacggggttttgccacgttggtcaggctggtctcgaactcctgacctcaggtgattcacccaccttgaccttccaaagtgctgggattgcaggcttgagccactgcccccagccagaagtaattacttttaaaactatataaagacactaccgaaggcaagacatgaattctagatgagcaactactggagggagggacaaaaagcatttcctagaggccagacactcagacatctcatccccacagtagctctcatctcaggaaacagctttgtcttcaggggaggagaaataccaggggcagggcactactgaaattcaggtctgtccagcttcaaaactcatgctcttgaccccctccgtacttctgtttcaggatgtaactgctctggcccaaagttttctcatctgtaaaatgtgggtaataataactttccccttacaattgtcgtgaaaagtaagtaactcctaaaaattgtcttgctcagtgccagacccagagttagtgcttcatatgcagtagctatttcatttgtattaaactatactgtcatggtttggcatacataaaaagaaaaaacagcacacatcatactgttttgaagactcagtaaatgacaacagccagaatatttttgttttgttttgagacaggctggagtgcagtgctgctataatgggtcactgcagtctcgacctcctgggctcaagtgatcctcctgcctcagcctcccaagtacctagtactacaggtgcacaccatcatgcctggctaacttttaaagtttttgttgttgttgttttggtagagatgaggtctcactctgttgctctggccagtcttgaactcctgagctgaagagatcctcctgccttggcctcccgaagtattaggattgcaggcttgagccactgtgcttggccagccagaatatttaataaggaaaaacaaatgcagaaatatagaggtgacaatttgaattcttattgtgataggctggatagaagacactggttgacctctggtagaggtaccagagtatcagtgagtttttgccaacaactttggccaagaaagataatccatgcatagagtaaatattggactaacttctctccacccttcctgtgccttcaactattcctatgtgcaccttaaaattagtgtttcccaattcatgccatcgccatttattagatcatctgtttggactttggtgcggttaaaagataaatgtggttaactcagttatatgtctctttgagatagttatctttgtcttttatcacttttctgttgatgcatgtggctctgtggtttgctgaggggataattaggcttacctctaacatggaacttttagggaattagagtctgggaaaggcatcaatgatgtcaatctcagtcctaggagatttctgtttatttcaaaatctatcactaaatagtaatgggcactcattagtctttgtgtttggaagtcttaggaaaatgcagaaactaaaggtaaataaacataaatataacactagttcaactgttctattagcccctaggtgatttgttcatatgacacttggaacagcttatatgcccagcacctgacagtgatcctggcacagattaggtgttcaatattcattgaataaatgaatgagtaaatggctagagaattcattagaggatgtatttgctcttaggatccacattttttcctagattcctcactctcccctcttctctttgtgtgcttggttatttttgactgggtatttgtcattactgctgaaaaattgcttgtagagattccttcaggcctaggatgaatgactttgttttcagagaggatttgcttttgtttctgccaggtgtctggccccactcctagcctaggactcctttaattgaatttaccacttttttttttttggagacagagtctcgcactgtcacccaggctggagtgcagtggcgtgatctcagctcactgcaagttccgccttccgggttcacgccattcttctgcctcagcctcccgagtagctggaactacaggtgcctgccaccacgcccggctaactttttgtatttttagtagagacggggtttcaccgcgttaaccaggatggttttgatctcctgacctcgtgatctgcccgcctcggcctcccaaagtgctgggattacaggcgtgagccaccgtgcccggcctgaatttaccactttttaaagacttaggtgatgtgaatttggattgctattttgcacatgagagccagcttgtgaatacaacttcccagggaccaccctccccttttatactcactttctatgccaagacaattgtccttgccgtctctctgagtgggaggtaggtttattctggttcacccttatttttagagtgtagggtttaggagcccagcttaacttgaggaagacctttttttcttttcacttgagtgggttctgggctttaatttctgttccacctctctcagtgaagctgtcaaaatcagttcatgtatgctcctctcagcaaatatgccccataaggataaaagtgcctctctgcttacttatctctttgagttcttgctttcttccagattttggcctagtagtttcttcctattttgtcagctatttgttgttttaatttttttttcttttttttttttttagatggagtcttgctctgtcacccaggctcaagtgctgttggcgtgatcttggctcattgcaacctccacctcccaagttcaagcgattctcacgcctcggcctccctagtagctggggttacaggtgtgcaccaccacacccggctaatttttgtatttttagttgagacgggttttcaccatgttggccagactggtcttgaactcctgacctcaagtgatctgtctgccttggcctcccagagtgctgggattacaggcatgagccaccatgctcatcctgttgttttaaatttgattattttatgttattactagcatttatagttattttcagtggaagcatcaatctgaataacctacccatcactgctggaaacagagacctctaccctttctagattcctgtgaatcattaacatctcctatcataccttaccagacctgtgtcgctgtcataaaaggagtactttttaaacatgaactctagtcagatagctagtcaaaaatctttgatttaatcctttttccctaggatgtgctacagtgtggagtggggagtgctcaccttgtcttggtggtctcttcctatgcagacatccttagagatgtgcattgtcctgtccaatccttagtgttggtccaatttcaagtgcgttcttgtctgaaaggccccttcaatttaaacaactctccttacttctttcatgctctcctgggtaccctgaggccgttttgttgctccagcacaactctgaggtcgtggggkatgaatttggtgggactagttaaggtccttgacatgtccccactactcccaggagtgtaggaactaggttcctactttgctgtgaccatgcagggacttggaggagctctgggggctgctgmaacccaccctcttttcctctgagatcagaagcacatccaatgccctctgctttcagagcccccagggctatttggcctccctcttccccaagctcagcaccaggggcaggacactactccctgtttcagactcagactggtacccaagcttgctttgcttctcttttaataaagattaaagctttcccaaaaggttaattggtttatcataagcattgaatttgttataaattttgtcttcttgttcctttttcctgtctttttgatcaccacatttttgaaaaatttacaataaattggctgggtgtggtggctcatgcctgtaatcccagcactttgagaggctgaggtgggcggatcacttgagcgcaggagtttgagaccagcctgggcaacatggcaaaaccttgtctctacaaaaatgcaaaaaattagccaagtgtggtggcgcgggcctgtagtcccagctatctaggaggctgaggtgggatcgccccagtactggaggtcaaggctgcagtcagccatgatcatgccactacactccagcctgggtgacagagtgagaccctctctcaaaaaacctcaacaaaacaaacaaacaataaattggtgcacaagatgaaaatattttttctctgtacaaaagagccactgtattaaaacttgaaatataagttgcctctgatgacacgtggtgtataaaatggattccatcagttgactgatgtgacttcctttaaaatcttatcagcatccctttctgcatttcaaatttactactgaagttgattttgctgtaattgatattgtgcaagcacgactgtaatataaacatgacaaactcaatctgtataccatcaaatattaacttttggcaataaatgcatatagcctgtgacaataaagattttttaaaacagttacataaatatattatgtcaaatgctgcatcattcatagtgataatttctctgctagtcaatatttggtttaaatgtctagttaacacctgctttatgttttattattgatttattatgaaaagtattgatttttatccaccaagcatctatatccagtctcataccacaattacttttttaaaacaattttatgttgggtgtgtgcttttaaagacatttgtagactttatggatttaaactacctggaagaaaatccgagattytatccctataaactttattcttctacaccctcctccagtcattattaatttatgaataattcatgccttcccaatttccagcaaagtaagcaactcaagcattagtgatgattttattttcatacatttgctagtgttaaaaacctgaattaactttttggccctctgctgggggtcccatgtgtattactttgtttccttaagctctctaaaatcctttcctttttcagttcctgtcaaaatcctcacgtatatatttgtttacctcactcactcaacaatatttattgaatgaccaaaccaggatctctatttgtcataattaacaatagctaccaaagccttatattctttaattatagtttttagtctattcactgtckttaagtctattctaaacacagcatttgccttttctaattgaagcactccacccgcacctttatattatcaacgttctgcccagtaagtcttgcagtggccttgagctaaaagcaataaaattcccaattgacttttcttacatttcctcattcatttttctactaagttgaacattatttactctatattaaggctgtctctactttaaaaatgtgtgtgtgtgtgtgtgtgtgtgtgtgtgtgtttaaaaataattctagtattttacttctggaaggaaaattaggaggtcacctttaagctctttatatgacagttgatatacagcgttaagagctgtgccaggatctatggccattctttggcttgactgggtggggatacttccactaagctagaactctgatcaccctaccacacgcttaccacttctctctttatcacgtgctctttgaaagtgaccctgcctattttctacagctttatttcctctttcattcaacaagaaatattttccataaacaaaacttcctcccagttggtttattacattctgacttagctttagcattttgttgtggcattctggggacagaaaatacagaccaaaaagcagtatttgaaagatgtaacttgaccgttttgaaatatttttgattggccggactgtttctctttagaaaattcaaccctttcccacctcactcagtcttccttaaaccttctcaagtggtttaattgttttattaaaaaaagggatgccattgattagatagcatgcaatgcagataaagttgtatttggtaaaggctggaccaagttcagttatacgccaaagcctcagttcagttttacctctaaatctatccatttccattgcttcctcagttcgcaaagtactatgaagtcgattacagtaaccatgtgtggtcttcccaggacctaaattgctgactcccaatagagagtgttttcctaaagtatatgagtaattatggctcttgggccattgggtcactagtacaacaatgttttgagtagttactaaaaaataaccaaatcataactaaaataatttttcatttgacctttaagttagccaacagaataagaagacatcaaataaagcctagacattaaaattccgattgtggaatgtgcgttatttatctgaagtttctttttttagagcatgtgttgttagaaaattcctactctgttgtattctgttcattgccacgatttattgagcactgacctgtaggttaactcattgactcttcaccatctcgcgaagcaagtttgtgaataaatagtccaaagggaactcatttaactgaaatgggtctttaaagagttacccaaaggagaagttagaatcttattagcttctctgtagttaataagatgtttatttcatagaggcaatgacacttcatgccatgtagccaacacagctagattaggtaactagtaatgtattactgcttcatttgtaaaatattctggcagctgtctactgctagtatctcaagataataataatgaattctattgagaagcattccccagcacttttattaaaaaagagtaagtggcataaattggcaaatacatgttaccctcactatcacacgcatttctttctttatggtaacataaggtgaataattggaaaataaattttatttgytctcagactcaacctgtatgggtaatagtttttattgcctagccttacggctatgtcagtattcagcaaacgtgaacagaataatttgtttccactagctgcaatacttgaaccaagttgtaatattaatatgatttgtagataataaaaaagaaagtagaacaccagtrcatttttcacataaaaatttgacccagttcaaggtcgacgcttaaggatgttgtcaaccgatcaatgaggagtgcctagaaatcatgggattgtaaaaggtatgttccttggtgtttggaagaaaaattagggagcgttgtctccttctaacacataggtaagggaagtccaagtttttcagcaatcctgggctagtgtttcagcgataggtactaggaaggttcatattcccattctcaggagatgattgcataaaaagatggagcacacacacacacacacacacacactcatgctgaggagagcagcattggctgggtgtatttcaggggatgaaattgaagtcttttactggagaggagctgcattatttaaataaaaagaatcatggtgactgcatagaagttgaatcacagaatttgtgtcttcacagtgggatacaaaattctgtctaaaggatgtgttgtctctgcacagttagtcacatttagggaatggaaaaatctgggtcatcaaaaatacccagtttcttccattttcttctcagtgttgaggctgtgactcaaaaagtctcttacacatcacactgtgttattaatccttgttgtcataataacatcccttgggattcaggaaggcaccttgtgtacccaacagggttccccaaatagaagaagggaacaagcatttatccagggactatccatacagtatcccatctcatcctcacaataacctatgaagtagttcttatccctgctttacagtagggaactctgagcttgtagagactaagtaacttgcctcaggatgcataaccctaagtggcagagctggaacacaagtgccatgttttcaatcattcttttttttttcttcagttaaaataacatataatggatactatgactgtgagaatgcaaaaggatcttttgattatttaaacatgcattttaattttgtctttgcagactaaaaggatgatgcaggcactttgaaagggatttccttaggggctttttgtaatgttgtgtaatctttagaagatgtagattttagcaaatgctgttaaaaggcaataaatgttagtttggatgaggctctgtggccagttttaggaacagtagtctttggaattgaacccaacatttcaccttaagaatacaaggcttcagtgttctagtgggtgaatgcatacactcaagaataagtgattttagaaataattgcagtgacttacacataactctacacccagccttgtccattatgtgagtgctgcacagtcgagcattcatgagttacaagttcccaaagccccacaggctatgggcctgttctctggatgtactagaggtttcatcagcatttccattgctcagcacagaatgttaatatttcgtggttcagggagattgttttatatacacagcctaataaccagaaccaattgagaaaaaaatataaagaaaatacagataggtagcaaagtacagcctacagtggaacaccaacagggctagtgttaggaggggcagctgagacctgggttgaacactgtaattgtgtggctttgagcatcttctgattgaagttacacatttcaggagactcaattttatgcacgtggtattgccataagggtaattgctacctccctgtattatagcggagttcctctgggcatgcataatacctttctttcatcatgctcatcaagacttattcatactttgttatcaattatcctagtagctctacatattaggtagttacaagtattacaaatcatagattaggccactaacataaagaaatgaggtaaattccctgcagtcttcttgtggggccatgtaacagtagagaccacttgagtttgccaagtttggtggccaagtcccatgttttgtctgagaacagacagaggctcagggatattgggatgatatttggtatgaagggtttcttatttggactgcaccaagttaactgtgtgctgtgaaacattatatggcttcattttcattgggagaactagtgatataaatgatgtaacgtgaactaagtgatttagctaattacacatatttttggatgcttctaaaaaactaatatgtgatccttggagtagaggaagttgtacattcaaggttttctaccctttttgtgtgtgtttattttaatgaggacaatgggaactacaccatttctttcctgytagttcatcctggattacctttttatatccattaaacatagaaattctgaagccatgtctgcctacatgtcatcctgattgcctttgtgtataattgcagatcaaatgtagaagcagtgactacttaaaaaaaaagttgttatagaccaaggcttgaggaaagagaaaggtacagtgacaatgagatatcttgggggaaatttggtcccgtagaccaggggttagcaaatcatatcctgtgggccaaaccacagtcacctgcctgttttggtaggcctataagctaggaatggtttttacatttttttaaaagactgatggggagaagtgaaaggaaaaattatattttgtgttatgamaagtatatgaaattaaaattttagtgtctataaataaagctttcgaaacgtaccatgcttattcgtttacacattgtggcttcttttacagcaaggatgggtatttctgtgtggcctgaaaggctgagaatgtgtactgtctgatcctttaagaaaaatttgccacctcctgttatatatagtgggggccagtgttcagttggaagatgcttaggcccatggcctgtcagcgtgtaactctatgtgtctgaattcagagagctgagtactagctgtacttcatgagccccattgaattgtgtttgttgtattgtcattgttttgttaaaacattatttttttaaagttctgtggaacactagtgtgtctactgtaatgatattattcagattatttattaattagaacattccctttataaatatctctggaattttctttgtttttgtttttgtagagatgggtctccctatgttgcccaggctggtcttgtactcctggcctcaagcgatcctcccaccttgccctcctaaagtgctggggattgcaggtgtgagccactgtgccagcctgggattttcttcatattctctttataaaaattcatagagagacatttctgtctagttttactaccagaagggttatatttttcttagctgtgtgtgtgtttgtgtgtgtatgtattcatgtgtgtgtgtgtgtgtgtgtgtgtctaattcctttgcgaattttgggaccatccaggttttccccctcaagatgcctgccagaaagctcagaagtgaatttttggcttactttttttttttttttttttttttttgcaccagctttatgcttggtaccacttcgttttatgcccctgggttgttctttcctttttcttgtccacttctgattcatgagtttttgctatgctttatgaatcttctaagtcactgaatacttttaggaactctacagaacattaaaatataaaattaatagtaagacatatctgaatttttgttctagaaggtcccagagctctcctttaccattctacctcagagagcccttttccttctgcatgttatcttgggactgtccagggctctatgcctgcagggcctagagccagtccatgaagtgctcattgagtgctttgtggtctaatgttctacccttcctgcaagcttacaaatcaaccccttcaagactgataaagacagagcagaggttctttagtatctagagtccccagaagtcaggaaggttgtgaacttggatgggtaaaaaaaatwtctgttttgagatgaagtcttgctctgtctcccaggctggagtgcagtggcacgatctcggctcactgcaacctccacctcctgtgtccaagcgattctcctgcctcagctctctgagtagctgggattacaggcacgtgccaccacacccggctaattttttatatttttggtagagatgggttttcaccatgttggccaggctggtcttgaactcctggcctcargtgatcctcctgcctaggcctcccaaagtgctgggattacagatatgagccactgctcccagcagtaattttttttttataacttgtaacagaaatttggcattttcttcaattatgaagacaggcaacaaaccacagcaatattagcaatacttgtgactatgtcaccagtagaaaccacagatactttaatatcagattatatcgttgcagatattgcaaaatatctgtgctttttataactagaaaattaagatctataaaaagatctataaaagagttataaaaatacttcaaaattaagattataactgtctacctagacagatagttcttgttatttaatacattgctaaagaagcatatttattaccgtgctataatttttaaaaagcattttgttaccgtaattctttttcttttattggcaatcctttgtgttttatgcatttaaaaacacttttctgagaggggatccataggcgaccataggggtttttgactccaaaaagggtaagaaacctccatgcatgggtgtgcccacatgcatgtatgcacacacagacacagatacacaatttttacatatggtttcaaggagttacagactcctcttacaagacccatatctaggaactgcagtttaagatcttatgccctgttggctaaaattcaaaatagcaggccctaagagggacggcctttattttgtctttttaaaacactattcaaatgaatcttttctagtaatgacttacaacaccctcttagtcatagcattagcactggctgttatcatttagtattacctctttcttctataaaacaaggaatgtgtatgtagttatgaaatcattctcttggtttataccatatcaactagatatttgtcagtgaaaaattgaaaatctacctcttcaccctctttgaattgtagtttgcattaaaaagattcgcatatttgaattttcaaaacttggtatgtgtgtattttgtaagtttggaattggataaaaattacaaatattataataagttaatgacataatcccttttgtattcttctgtgtcttgagtggttttgttgctgtaagtcaagcacatttattattcatgtatggggggccaagtttcatctgagaatgtaatttcatgctaataggttgcgttgtaagtccctggttaggatttacttatacctgcatgggttttatgcttccctgtgttccattcattacgctgctattctgaatgcatctcctaatttagtgagatctgagagccaccttagagattacgtagtccagtttttctccaccctgcyaagcttcacaaaatattratgcctggacctcactcctagtgaatatgattgaatggatctgtgttggggaatggaggcagtcttcaaaaactggctacaaggtttcttggttcagccaggcttgagaacctcagcctagcctaattccttccccatgcaaatgaaagcattgtaacatgcctgagggccaccggctcagatgagttttctctacttcagaaagctattttccctttccasatttcyttctttttttttttttttttaatgtaaagccatttcccagccagtgcagtcttctgtggtcactacattcctcatggaatatttaaaattatttaaaattaaatattccatgaggaatgtagctggaacgtttaaaagcttactatccttgtcctgttttaccgttacctaatgggaagacagctttctggaaaaacctgaagaccattctttcttagtgagctgttcttgacggtggtgactttatctttggaaatttgcccgattcccatatcacaattaaggaagtggcttaagaaagtagcttgtaattctctagagtgtaagtctccagatctcactgttgaactttgtatgttccagtaggactaaatctaaaataatttccttgtcacatttgatagacatgagtattagggacccacattggaagaaccctccaaaaacggacctgtctttcctttgtgagttttcagtgtaattctagcatttctgggagaaatatgtaagtacctcaagggcagaaatcctgcccacttaaatgtttcataattatcacctaaaacttagaatggatcaaattaactaattagctttgtaccttttcaacacaagctaatagattgcctgacttcgtttatctgatcatgaattttgatcaactttatctcattaggtttaaaaattaatatgttgcgttatatagcacttatctttacagagattattcatcttcaatgcaataaataaaagaaaagccaagccaggtgtgatggcacatgcctgtagacacagctacttggcaggctgaggtgggaggatcacttgagcccagcggttccaggcctgcagtaagcccagattgtgccactgtactccagtctggatgacagaatgagaccctgtctcaaaaaaaaaaaaaaaaaaaaaaaaaaaggccggatgcagtggctcatgcctataatcccagcactttgggaggccgaggcaggcagatcacttgaggtcaggagttcgagaccaacttggacaacatgatgaaaccccatctctactaaaaataaaaaaattagccgggcatggcagcacactcctgtaatcccagctactccagagattggggcaggaaaattgcttgaacccgggaggcagaggctgcagtgagctgagatcacgccactacactccagcctgggcaacagagcgagactccatctcaaaaaataagataaaatgaaaagacagayatttaatgcagatatctaagctttaaaagattggatgactcaagccaatggcaattctttttttctgatttacagttgtgtttttttaaagatggcaactttgttttactttcttcttccttctatattattttgaagtgaatttgactrcaaatattttgaaaaatatatgcccctatgtattgaatctaaaaagcaattacaatttgtccttttcctctaattctcytatgcaactatcagaatggaaaataaatttcaggatacttttggatcaaaaatgacagaaatcaaattgcttgacatctagtaaccagagtggacatgaaagaggagtcaattctacagcaagccctgtaaccagctccgtgcaggagaaacatggagaattaagacaatcacctccctctaagaagctttgtgtgcttttcccagatcttcattttcataggcagtatgatttcaaaatgttgtccagtaaaaactctttatcaagttataactggaaagctacccactatctctttatataatgacagcatccactatgtaagatttatattacatgcatgcgtgtggaatgtactttgaaccactctctaactatgatcataggtcagtacctgccagagaatggagatttttaaaaattgtgatcacagatttgagaatataatctttttaaaaaagatatgcttagccttgtaaataaagataagcattttaagaatttattttataaagaaaaggtttgatggagcaaagatttaagcattgagaaacccatagacctacaagaaaaaaacatgaatcttatataatcacagaatggggaagaccacttctaagtataatacacattcagatactataaatttttttgaatataaaaacttttttttcccagaaataaatctgcatctttatagccaactgattttctacaaaggcgccaagactatacactggggaaaggataccctcttcaataaatggtgctgggaaaattgacgatccatacacagaagattgaaactggacccctgtctctcaccatatacaaaaatcaaccgaagatggattaaagatgtgaatataagaccccaaactttaaaactactagaagaaaacacagggaaaacacttcaagatattggtctaggcaaatattttatggttaagaccttaaaagcatagacacctaaaacgaaaatagacaaattgaactatattaaactaaaaagcttctgcacaacaaaggaaacaatcaacagcatgaagaggcaacctgttgaatgagagaaaatattgcatactatcttctgacaagggactaatatccagactatatcagaaacccagcagcgtaaaaaaaaaattccattaaaaagtgggcaaaggacatgaatagacaattctcaaaagaagacatgtaaatggccaacagatatgtgaaaaaatgctccacatcactaattgtcaggaaaattcaaatcaaaaccatgagatattacctcacctcatgtagaagggctaatatgtaaaaagacaaaaaaaaagtaatactggtgaggatgtggaaaaaagggaattcatacactgttggtgggaatgtaaattagtaaagccactgtggaaaacaaatggagatttctcaaaaaactaaaaacagaactatgatacagtccatcagttccactacgggtatctattcaaaggaaaagcaatcagtatatcaaagagatacctacatttacatgtttattgtagcactattcataataggaaagacatggaataaacccaggtgtccatcaacaggcaaatggataaagaaaatgtggtatatgtttacaatggaatactattcagccataaaaaagaatgaaatcatgtcatttgcagcaacatggatgcaactggagatcattatattaaatgatataatccaggcacagaaggacaaacattgcgtgttttcactcatatgcagaagctagaaaacttgatatcatcaaggtagagagtagaatgatacatactagaggccgggaaaattggttagggtggggagatgaacaaagataggttaacaggtacagatacaattagataaaagttataataagttctatcgttctacagcagagcagagtgactatagttagcaacaatgtattgtatatttcaaagtagctggaagtgaggactggaattgttctcaacacataaaaataataaatgcacaaagtgatagactcttcaaataccctgacttaatcattacacattctatgcatgtaacaaactaccacatgcaccctgtaagtatgtaaaatataatatatcaataaaaagccaaatattttaaaaattacatgccaattttttttatgtgtgttaaaacaaaagtcaaaagacaagcgaaaacctaggggataatttgtaactcataggagacataggactgttttccaaaatatatagaactcctataaatcaatatttttaaaaatcagcaggtctgacacagtggctcatgtctgtaatcccggcacttcaggaggctgagacaggtagattgcttgagtccaggggttcgagaccagcctgggcaacatgacaaaaccccatctctacaaaaaatacaaaaattagccaggtatggtggtgcgtgcctgtagtcccaggtacttgggaggctgaggtgggagtatcgcttgagactcgaaggtcaaggctgcagtgagccaccatgatcgtgccactgcgctccagcctgagcaacagtgagaacctatctcaaaaaaaaaaaaaaaaagtcactctcatcacagtctccactgttgtaatggtccactgtctgcaaggacaagttattgatcaggaggatttccaaccaagagcgagaacccaaacaaattagcacaactcatcttctgcttctgtaacaaacaagttgtccagttgtcactttgggcactaaagagggacttactctcagatttgggaactagacccgttactattttctttagcactggagggagccttcctttatttggtctcactctaagttggtttcacactgaagtcaattttaagtctgtgctttgcaagtatgaattgaaaatggtggtgtggggtgctttcttggctttggcacctggataacaaagttccccaggaacaagctttcattcatcaatggaatacactggatttctgtcttacagttcagggtgggccagaaggagccatggtgggtctgtagagggatgaattagcatcctgttagaaaggtgctgggtccctcctcagtcactttgaatgctccctgtttttgcagcagtcatgacccatatttttaaacttttaaagtataaagtccatacagaaaaatatataaattttcagtgtgctactcaatgaatttgtgtgatggtatttcaggtagtattctgttttctaatctgtgtactggaacacactttcataactggcacacagattaggaaacagaatactacctgaatcccacaaatgccttccagtcactacctccttctcctcggtaaccatcctgactaatcttgccggtttttgagcttttagaaatggaattctacgttatacaatcttttgtgtttggtttcttttgctccgagatgtatttgtgagagtcattcatattgtttgtgtgcaattggaatttgttcattctcactgctatatagtgtattccactgctggaataattaaatatgtgtttctcaactgggggtgattttgccctttgagggacattgagcaatgtctggagatctttttctagttgttacaactcacagtaagggaagcgggtgttgctgctattatcctacaatgcacaggaccacaggacagccctccaacacaaagaattctcaggytcaagacatcaatagtgccaaggttgagaaaccctgctgtacatagcgttggatcgtgtgaatataccaccatttatttctctgtgtatttcttagagcctcaacttgagcattcatgagcataatgcagctcagccctggctttgaagttcttgaaaccatgcttaccaccatcagaataaaaagactaycaaacaggaggagttttaaatgtttacaataactgttagagtcaaaatacactgtcatgtatagccttggtcatagacaaaaattgtacattttggaactactacaagaatttgaagaggttttaagtgagaaagtgaaatgggctaagtcaaggttttcatcaaagaatgaaaagacttttcttagaaacagctttattgagaaataatttatatactataaaattcacccattttaactgtacagtttaaagattcctagaaaatttacagagttgtacaaccatgatcacactctaattttagaacattttcattacgctaaaaagatccctggtgcccattcgcagtcattcccattcctactccaagttccgagaagctaccagtctactttctgtctcctgatagtttccttttttggatgtttcttataaatggaatgataaaatatgtggtcttttgtgactggcttctttcacttagcataatgttttaagattcattcatgttgctgcaggtatcagtacttcatactttttatggctgaatacgattccattgtgtgggtataccacattttttatccattaacaggttgatggacatttgggttgcttacagtttggggctattatgaagaatggacatgaagaatttttgaagcgtggctagataaatggttagcacaagtaggcttttgaagaagggacatgattctgggccagatgacttattttgtttagaggaataatttgagtgattgaaaaaatagaatacgaagggaaaaggacaagaatggcacaagaagtattagacttacagggaaaggagatctctgacatttacccatacagaccctagtatttcaaaggcattgtatagccatgccggctaggctatagagcagcaaaggtctacagaggagcaaagggtaacatcccactctcttccccagtcttgcaggcacaaacgcagttggcatagccttgaggctgatttttccagatgaaccaggaagacccttggtttttggcagatttaataaccaacattcaaacaaggcactttaaaaaatctacaattcgagaggatttcctggcactatataaaaccccttccatcaatgggagttgttctcccttcttgaattggagtgttcattaagtccataaaatggaaagcacatgtaggataataacacagatattttgtgttagagaaaagttatgaagcatggcatcgaaagaggttagaaaaaaaaaattcactaaaaacaatcatgaaatggtaaagaaaattcccatcctcaacccatctgcatcaaatgaagatgctgctgacagtagatattaaaagagatgttgaacacataaggtccaggtggccrcaatgctttccttttatcccttcctacatagatagatggaagggactcggcacaataaaaagaaggagcatgtagaaaaacatgggcgatttgagaccttccaaggcagagcaggccagtaaaggtgaagcagctggaagccttttttctccaccaggaaaggaggatagagagcaagggaggttttaagtgggagatgctgcgygtgctttccccataaattctgagggcagtgcacagtattccaagttgtgtagcttctcacatgcaagctaggcccagaaccacttgagttcacaactatttctttctttttctttttcttttttttctttttttcttttcctttttcttttttcttttttttttttttgagacagagtcttggtttgtcccctaggcactggagtgcagtggcatgatctcagcttaccaccatctccctctcccgggttcaagcaattctcctgcctcagcctcctgagtagctgggactgcargtgtgcaccacctcacccagtgaatttttgtatttttagtagagacggggtttcaccatgttcgccaggctggtcttgaactcctgacctcaggtgatccacccacctcaggtgatccgcccacctcagcctcccaaagtgttaggattacaggcgtgagccaccgtgcctggcccacagctatttcttgaaaatgagttcaacaatgtggaccttctgtgtgtgcaagggaatatgccttatattcatcctctattctatcacctgacaagaacgaaacagagttcaatggtctaaatttgcattcacgtgcagggytcctagaaatgatgatcctgcataattgttgtggaaatcatttgtcttctattggattcatgaaggcttaaacacatggtcaggggatcagactcactaatagctcttttatgtttcttccacttattgagataaaatctttttttttttttttgaaacaaggtttcactctgtcacccaggctggaatacagtggtgtgatgatggcttgctgcagcctcaacctcctaggttcaagtgatcctctggcctcagcctccagagtagttgggaccacaggtgcaaaccaccacacacacttggctaattyttaaaatttttgtggagatgggggtttcrctatgttgcccaagctggtcttgaactcctggcttcaagcgatcctcccaccttggcctcccaaaatgcttggattacagaagcgtgccaccacacctggcstcagatgaaatatcctgcatttactccatastagagaaaaatagagaygtgacatgtagcctgcatagcttttttgaattcttttacaatcactctgtaccagtacgtgttgtcaacaaaatgcagcaaaataaagagttgcatgataattttaatgcatgaccaatgaagattgaagccagcctgttgggttaatcctgttttgtttcaatcctagtctttcccctcaggagctaggtttttggctggactgactggataattgttgcaggaatctctttccatcttcatgtatgaaagcagtgatggggtatgtgattaaaccatgttagacaatatgattaggccatgccattattctttcacagttgcaaaggtaagctatatttctcaggctgtcatccccacagctaatgctttgtgtaagtcttcagggagcagctcacatgtgctgatgacaagttcagttcacagtgtgacttgtccaacacaggatgtctgccgtgtctttgaacgctatagattatttgctttgctggtttttgtgttttaaatacgtggaaccgtacaatgtgtactcttctgtgtttgtaagatgcatccttagtgttgtgcrtagctgtcctttgttcattctcattgccgtgtggtattccattgtgtaaagacatcacaatttatttacccagactaccactgatgggcagttgggtgtctcaatatttatagcaactgtgtgaggtaggtgctattattccatccattttgctgacggggagattgaagctacgagtggctttagaattgattacctcaagtcacacaggtcatttcgtggttgagccagaccttgagccaaggtagcccaggctccctaccctcacccttttatgcctcartgtctgactgagctatttagtgaagcacttctttgatctgtctctgtctttcttttctccctctaaaggactgcctctgaaggaaaaatccaggtcaccaggctacacagggactcatctctacccctgggactaaagcttggctctcagatccagttttctgagcttagggtagggctatccccagtgaccccattcattcacctgccatgtctgaatccatgggaaatcctttgtaggctcaagctgagccccccacttcaaaagcatatttaaaagccaaattaaccccagagaggagagttgagcttgtctctgtgttggtatatttttggctttaactgttcaggctctactcttttcaagcagagtatgaggaaacytgaggactacatttttgttttgttttgcttttcctgtattagaatttttattttctgtatggagtcttctctttaatgtttgtaggaaaagaactgccaactcatattttatgttttttagaaaattgtcaggctgagtgcagtggctyatgcctgcartcctggcacttacggaggacaaggcggcttgagcctgggagtttgagaccagcctgtgcaacatagcaagaccycatccttacaaaaaaataaaaacattagctgggcatgatgatgtatacctgcagtctcagctactcgggaagctggtggtgggaggatcgcttgagcctgggaggttgaggctacagtgagccacaattgtaccactgcactccagcttgagtgacagagtgagaccctgtctcaaaaaaaattttattttttcacaatgcatgtttctttctgttgtttccacagaaacattcaggtagaggctacagatttacatgaaaaggaaagatcagtttcctagccttgtgtcaggagcccatgtgaggccagttcttggcttctccttggctggaaataggagggtacaaatagggtcacctactctcaaattctgcggttcaaattgtggttggagatgagatgttctatttctgcatctctcctggaccatcttagagcagtgcaaagtttactggatcttccagtgcattattggcctttggtgtgatgacgagagagcaggaaggaggtctccagctccttttctgagttcagatgttccctagcccaagaagactaatcatgcacctggtttcctgctctgaaaaataagaagtgattttggcagcctttgaatctggatggaaggtggttttttttttttttcagtaacaaaggtagttgtgtatgtatgtacagagatagattaaaacaattttttttcctagaagcattttacaaaagttaagtgtgcaagctatcctgtcgaactttgtccttttttttctagacactcctttacactgtggaatctgtgagtagtgccagccaggaggagagtggcaactttccaaaaaaaaaaaaaaaaaaagaggcccttttacccattggttaatagagggggagggtgcagctatttaggaacatctgaatcctgtcattctggagtctggaatccccttctcttccccctccaaggtcttcgtatagctcacctcacacccagtacacacacccgctcctgggatactgtatcctattcagccacctcctagccagtggaccacctcataactaatgtcaaggttatgtgtaaaatctgaatgtgcttagatcttgataggaaaattatctaaactttgaaaaattgctatgtctacaatttcagaactggttgtcgactcatgagacgacacttactgttgtcccgtgatttaattgtttttaccaactaacaatttggaaccaaggcttttaaaccatcccttctgattaacgtcagagaagaggggcattcctttgaaaagaattcctaaacagaatttttataaatggagtacaaaatagcacgaggaacagtgagaaacatcttcaggattcccatggcctaggcatggaataaatgcaaggttagggcttattttctgagaaataaacccttagtaggatgctagataaaacacaggacatccagctaaatttgaacttyagacaaacaagaaatacttttttgatataagtatgtctcaaatattgcatggggcatcctatgtttttatttgttaaatctggtcattttaactaggtttgcaatatattttcagcacaatttcaacagttcatatttgctgagtactttgggcatgatggttagagtcagaggtgactttaggagctgcaggccttgtgtgtgtccctttcaccactatccccacagccccaagtacaatctttggcatatagttgagctcaataaatatattttgaaaaaattaatcaaaatgataaaataagtatggactatgactaactgatgatgcttatgacgtaggtgggaatacaggctcctatattaaaaaagttattgtggctaatactatcttattttggattttaactggttaatttgcttaatagactagcccacttggttgaaggattcaaattctaaatatacgaaaggttatttccatttcaaaaagtgatgcagaaagacaaatagcatgttctctcactcatatgtggattctaaagatgaccgcatagaaatagagagtagaatagtggttaccagaggctggtaacratagaagggaagggaggatgaatacagttacataggaggaataagtcctggtgttccattgcacagtgaagtgcctatagtagctagaagagaggatgttgaatgttctcagcatgaagaaatgataagtgtttgaggtgatggaatgcttaccctgatttcatcattacacaaggtatacatgtatcgaaatatcaccttgtacttcatatatatgtacagttatgtctcaattaaaaatttaaaaaactcttaaaaagaaaaaagaatcaagagagaagaatacaaaaaatgatgattaagtggaaattaaaccatagttttatctggatttgatgtaattttttaaatgatttgatttagactgtgctattggacaatgccacctattttctttcatatacacttttattctaatgttctaatcaattaagtcctgtatatttaatattcatttctgtcagggttgaatttgatccaggagaaatggatgtgtactaactagtcaggtgtaactggaatcttactataaagtaaaaattattgtaggccttctaaggaatttataattcattaaaatacatataataacactaaaaagctaattaatatataatattctagttaaaaattaggcatatatgactatatgcaatagtgtggaaaacaattaggcatggaaattattgttagagtttattatttttcaaaagataatgataaaacacacctgtaaatttaatataattataaattcgtcaaatctcaggatggtaaaaccttaaatataccatttgtaactgacattatgtattctctttcttcttcagaggaaaaccctgaagaactatggaaatttcttttttattttatttatttatttatttatttatttatttattgagactaagtctcactctgtcacccaggctggagtgcagtggtgggatctctgctcacctcaagctccgccccccgggttcatgccgttctcctgcctcagcctccccagtagctgggactacaggcgcccgccaccacgcctggctaatttttttgtatttttagtagagacggggtttcactgtgttagccatggtctcgatctcctgacctcatgatcctcccgcctcggcctcccaaagtgctgggattacaggcgtgagccaccaaggccggcagaactatggaaatttctaagaaacaaaaacccaaacagtccttcttattcagacttctttgtaaaaccgaccaaaataactctctctttttcttaattgcttgaagtgatactcacattcagttccactagttgtctctaagcagtggtataaccagaataattggagtcccacctgaaagaaaagatggataaatttaactaccttaaaaaaaaaaactgtatggaaagcaactccataaacaagtcagaaacaacattattcacaaagttaaggaataaagaaccaggggtcagggccggggccagttgcggtggctcacgcctgtaatcccagcactttgggagtccaaggcgggtggattacctgaggtcgggagttggagatcagcctgaccaacatggagaaaccccgtccccactaaaaatacaaaattagccgggcatggtggcacatgcctgcaatcctagctactcgggaggctgaggcaggagaattgcttgaaactgggaggcagaggttgtggtgagccgagatcatgccactgcaccccagcctaggcaacacgagcaaaactccatctcaaaaaaaaaaaaaaacaaaaaaaacccacaaagaacttgtggcctgggggacaggcgcagtggcccaggcctgtaatcccagcactttgggaggccgaggcaggtggatcacctgaagtcaggagttcgagaccagcctaacatggtgaaaccccgtctctactaaatacaaaaaattagccaggcgtggtggcgcatgcctataatcccagctacttgggaggctgaggcaggagaatcgcttgaacctgggaggtggaggtttgcggtgagccgagatcgtgccattgcactccagcctgggcaacaagagcgaaaccttgtctcaaaaaaaaaaaaaaagaaaaaaaaaaagaactgggaagattacataatatcttcagggctcctgcaaattataagaaaagaccaataatggaatagaacaaggggtaaagagtatgaatgagagtccaaaaaagaaaaaggaaaaaatacaaacagtcgtagacataataaaaggtgtaaggtgtacaatatagcttataatagaaatttaaactaaaatcacattgaaataccattgttcattcatcagattggtagaaatccaaaagtcttgatatactctgtggcaatgctgttgggaactgaaactcccatccatcgctggtaggagtatagattggtgtaatattctataatggacaatttagttatatctattgatatgacagatgttcatactgattgacctagtaatccacgtctagcaattaatcccacagatatattttcacatgcaaaaaattaagtataaggttattaattattgcaatgtttgtaataataaaagactggaaatcatccaagtattcatcaaaaaagagctagttaaatatatattcatacaccggaacattatgcaagggtaaaatgaatgagaaaacyctctgtactgatgtggaaagatttgccaagacagatctgaaaaaggtgtgtaatagtgtggaaaggaggattaagcaaataaatgcctattttaaaatttatgcataaaaaactgacagagcatgtaaggaacgaatagaaatgaccatctacttttagaagtgaggaggagggaggctagagagatgggggcggaggcagaagtggcagcatggcttctgcatacctgcttgtgtatatatcttttcagtttttgagccatgtggatgtgacttatgcaataattaaataattaagaagaatatagcatgagctaggtccagaagccagagagaacagggatatctgggggaatttcaggggttagattgataggtgtgcagaatgtgaaggtggagtggtaagagatgagatgaaaagacccattttaattatcattaaaaacaactatttttctttttctaacatttattgagagcttaactaagagccagaccctgtgcttttatgtacatttcctcatttaatcctcataacagttcagtaaggctgcagctgttattacaatcattttataagtgaaggaacagagaggttaagtaatttacttaagggcatacagcagttggccactggtggaatcagtatgcacaacccatcatgaccctgtgttcatgctcttaacttttgtaccattctgcttgttcaagggaacatacatccaactgagggaggtggggtgaggggcaagagtttctatctttctacacagtgaattttattaattctgtagagctcatcttacagtactaccaagtatggctgcccccaaatctgtgactcagccaagattatttttaaatatttcccattcttatgacctatccaccactttggcacctatcctcttccaagactatctcagcatctggctcgctacctttgaccataacaaacatttgaataacaaaccaagtttatgaagtatcatgggcatgacaaattagtttaagaaacattcattcagtaaattttgaacccccatagtattccaggcatacagattcaaagataaacgtgagcaaagcagcctctctggtgttcccatctggtgaagaaggccgacatgtcagcaaaaatccatatttaacctacgttctcttatattggttagtgttacctagatttgcctaagcattaaaatcacttgagacacttaaaaaaaaaaaaaggcaacaacataaaaaccctagtttcttgggccctaccgccgaccacttgaatgagaatttcctggggatggtcctgggaatgtgtatttttaacaagtgcccatgagagtcttaaattaggtaagtttgggaaatgagatatcagtagaaacaggatactgtggggtcagaggaggaagttgctcagtctgtctgtaggtgggaagattagccaaagcctcacagcaatgtttaggccacaccttaatgagtgagtaagcacccaaggagaaaggactttccaagcaaggagaattttaaaaattagccaggtatggtcggtgcacacctgtagtcacagctacttggaaggctgaggtgggaagatcacttgagttcagtgagccatgaacatgccactgcactgcagcctgtgtgacagagtaagcaagaccctgtctctaaaaaaaataaaattaaagggaattttactctactggcaaagaagagaatggcttcatggaagagagggagtccagttcaaaggctgtcaggaagacttctgggagcaattagctaactaacagtgatggaatggcgtttagctgaaatttgcaagacttgatagattaatttttttaatgaaggagacaagcaataggatggctcctagcttacaaaatggggagaagtgtgggtcatcgctagtggtgaggaatatgggaaaaggagcaaagggtgatgataggaagatgaattccatcttgatcctgctgagtttcagtggctctggggggaatcatacctactaggcatttggatatctgaagatagagatttgggagcccgcagcatatggatggtagacaaagccttggaagcaggtacaaatcactgaggggtgtagggaggaagagtagaagagtgctgaaggcagagctatggatccctgaccctaaagagagatggaggaagagaggaatatggcaaggagtctatggaagagcgatgagaagacagaaaagctctgagagagaacattatcttggaagctgaagagagagttttccagaaaaagagtggtcaatgggaagaaatggaagagagatgctgttttagagattattggctgcttgttgtttctgcttctaatgccttggtttgccaaatccagtccagattctacatgaatctccagttaaatggtcaaccatataactgacaggttgtctgattttatacagcttaaattcctaagagaatctaatgggttcatcctgtgtgttgatttcacttgggtcaacctagtgcaataagccattttatagggagggtagcccgcgaggttgagtctgtagctgtggctgagcagatcactgagtgtgcaggggaaagaggataaacactgaagatcttgccaataatcatcataacaacccccaatgttgattaggcactgttttaaacaccttacacgtggtaattcatttaatctgtttgaatataatggtgagcatggaagtcatattacagtgaattgagtcctctactactaataatgacagtaagtctctagaaaggcgttaatctgactcttccaaaaatgccctttgctttgctctcccttaaaagggcagaatccttccctgggtccacttttgatgactgggtgggagactgtgccttctgatcaagtttcctgagttcttttaatggaatcatcagaatatcacacataaaatgaggccttgagccaggctggcatggccacactgaagtcctgtgattctgtttacctgagagcatgatgagtttattggtctttcttagccttaggaatctgcctttccagtgcatggtgtttagacagagtagcagctgaatgaattttgaatttaattgttccccagcagagagtgaacaacctttgcatatgccagctttttgtgtagacttttcagaatggtgatttcaggtcatttccaaccgaaggactctttcagttcataataacacatattttaattagctatctttggattgttcatatttgtggaggaagaagcagtggaataacctacttgagaatgtgctcagagcatgtggctcgtttgacatacaaaagcactgtattaaataagtgtccagttcggtcgtttatttagatttagttgataacttggatttcagcactaactgaaatgcattggttcacattagcttaatcaattctcatagaatatggagagctcaccagaactataattacaacagcacataattatttgatgctgatttcaaaggatattttacaaatgcatttgtgaatggtagttcgttcttttaaacgtttggactgctttggctttttctgtggtggggcctagaagaagacaggtcacagcaggtctcacttgaagaaatctttaacacagaacataaaagtgactgtaactaaagtttggaacatgtcattttactgagtactgacactagaggagtttgtttaaggatattcacatcagttaacaaatcaacgaaacgtttattaaacttctgttactcattcaacaaataygtaatgaatacctactataagtccaagtattccacatcatctcttttcatccttgcaaacattagcaggaactataatcccacaattttatgagatgtagagaggtcaggcttagcttgctcaaggttctagtggaggcagaatttgaactgcttccaaactgtccaacattaaaatctatattacttcctcttagctggatcttatcaggaaatcaaagctgtataagctatggccccttctgtgtggggttgacaatgacatctaaaacatcagacttaagtctataaatctagaaaacataaggcataagtctacaccacccaggcaaagtgccacaggatctcatagctacaggagtttaggaaagaagcatcaaggaaggcagccagcacccatggggtttgtgctgcttggagaacaggtggtatgtggatagttgagggcatggagagatgattccagtgggaagagctgaatgagaaaaggtgcaaaaccagaatgaccaagctgtgtccaggaaatcataaacagacctgctgctgagaasaaaagttctgttatctgagagtagaaaatatggctgaaaggtaaatggaaccggcttagcggagggccttaagttccaagctaaggattaggactttgttctgtggtttataggaagtgattacaagttttggatataaaagtaacatgatttaagggtgttttagaaaattaacctgattgtcaactggaaaaagaggtgatagagctggaaatcagtaaaggggctctgggccaggcagggaaatgatgtgatggctgctttacaaccttgaggaaactcagaaggagtagggttcatgggggactgtgttcaggaacaggtccaaaaagttaggccaggccaagggggatatttacgcacagcaatggagggcagggtagctagaaggaaagcatagtcacaaagagaggcaaaggccagggctggagaatcagttcatagcatcaggagggtctaaggagtgaaatgcaacgatgtcttagtccatgcaggctgctatcacaaaataccataccctggtggcttataaaaaacaaagttatttcttgcaggtctggaggctgagaagtccaagagcaaggaacttacagattcagtgtctggtgagggctgccttcttgctataagctcacatggaggaaaaacggccaggtggctctgtggggcctcttcataagagcactaattccattcatcagggctcctccctcatgatctaattacctgccaaaggcccaacccaatcctatcacattaggcattatgtttttcacaagcgaatataaagggcaaagggaacaaaaaataattagaccatagcagcctgtacataaaaaatgagcaggttagggggcaaaaggcaaggggaggacccgcaacaagttctgctacagaatgtgacacaaactgaggcacccgggtcaggaccaaggctgaacatcatttggcagccagcttactgcctactgtgggataagcctgaaggttgaagtggaagtcacaggaaccaagacatgaagggtctaagtcagaatgctgacagtggaaattgcaagaaagttcttatgtgatagagatcatgaagaaagactcaacaggatgtgcggatacataattagatcaatgatacataattagagaggaaggagagcagtaggtcctataagccctcgtcgtcattttaaaagcaagccatgttccaagggtaaatttggaaactagttatttgggctttggaaaagttttatcacaaagagcccttttccataaggagatgctttttaaaaatatcagtctcacaggtcaggagtattgctacacccaggatagccatgaaatctaaacttcccctggcctcactgtctttccacctgctatctccatccaaatctggcttcacgtgatggcttttgggtccagatgtgaagatctgtgagcatctatgggtgtggaaacccctctcctgaggtcctggggaatagctccacatgcatatacactcccaacttcagctatgaaattctctatcttgggtccattcgagggcaggatgcaatttcaggattatttggtccaaaaatatttgctcttttaccctgcaatattctctgtctaattgcttctgttccattgtcctgtttcaaaaaacatagctcttttgagtatttgcccttctgtggagtttcaaacctccttctttctcctcttttctatttcctgggctctctctatatggaaaattaaaggctatgtatgttataataggaggcttgaggacatacaaagggctgaatgaaaattaatctcacctccactttggagagacaaaagggactcagaagagaacactgctaggtctcactggctttctctcaaaacagaatctcacttgtgatatttttaaatgttgtccataaatatcatagatatgcctatacttgttgtatgcacacccagctgctctaccagtgtcttgtccattaatttttctgttttttctgctttatttcatgatatgcttatgaaaggatttctcatataactccaagcaattttaacccttaaattaaaagtaaaataataaagttagctattttaagaaatgtgatcacgaaggataaagaatccagcaatgcagaaactgaagtgattatgaaatgtttaggttttcgtgattttgtttgttgctaaatcttactaaaatgcacttttttaaacaattagactttttatttttttagaagttttggatttacagaaaagttgagaagatggtgcaaggagttcccatggaccctgacacctagtttactctattagtaactttcacattagtgtggtacaatgaatgaaccaaatatacattgtcgttaactgaagtccgtactttctttagatttccttaattttcacctaacatttttctgttcaaggatcctatcccatgttacatttagttttgtctccttaggttcctcttggcagtgacaatttctcagcctttccttggttttgatgaccttgacagttttgaggagtacaggtcagacactttgtagaatgcccttcttggagtttgtgtggtgttttctggtgattagaataggcaaaaaacgaacatggttatggcaaataggaagatcaggcaggctcagggctccagtcamcctagtgtgcgtcctggccgattggcaactcctagmaactgtctcagagcaaggggcaacgaggggtcggggcttccaccctggcacctgggttcactcgatcctgcattgtacccactgcggaarggtgaagttccaactcagccagacacagacccctgacctggagggcaccaaggagggtgccaaggagaggtggctcacctgtgctctgggagtgaggagctgtcgtcagggtgtgtccaaggttgattacatagaattgtaccagctggagactggagccagaggaagagctgcctcaagcaatttcactaagaggcggcagtccaaggaaaataaggcagattccagagcatatgaggagaaccaagatggaaagcacagaacatatgattatgattccaagtgaaagatgcagccaaagctctcctgtgtcataaacctgttccttcctgcaggatatctgaaaaagccagggctgggtggtttatcatccaatggaaactccacagtctcttctcttccagataatgccttgtttgtaaccactgcacagacctctggattgacatctaacatatgtggtagacagaggaccagaagtatacaagacctgtaacagcatgcacagtcccatgaggagaggggcttctttatttttcttggcaaacatctgaatgatgcttgcaaactgtctgaatttgccctctagggttttccaacaatttgcatgtttttcagatgttttgggaaaaaattaaatactgtaaaaagtcatgcggaatttttttaaaaagatgccgtaagtatgacctccatctgtttttttctttgtcatcgttgttgcaatgttttcatactattcaaattcttatctctttgacattagtctgtggtttatttcctactagtggcttcgaaaagtcaaatcaacttggttgtatgtatgttttccccttaaagtgttttctcgttcacagcattaacctatgcaacataaccttctgtagcaggaattgaagaaaatgataatttttggttttaaagaaattctactatagctttttttttggtctgatcacaattttaattcataaatttcagatttgggtaatttttgtgttgcccagtaactttgacaaatgatttaatttgctcttttcaggagtttctcaaatcatttctctcaattttcacaactgatattttgtcactgtctacctgatatggttatttcccttataactcaagagtagtttaacacaaagtataatcctatagtgttggaggcttccgagaggcattgtttgcatgataagtaaatgcatattgtgaaactgtgttcctgggattggatttagcatgatctattgttggctccctttattcacaatctctctttacacaaaatacttacgaacgatattttccttagtgttaaatcccttttaaaacatgttatctcatggaggtgcacatctgtagtcatagctactggggaagctgaggcaggacgattgcttgagcccaagagttcaagtccagcttgggcaacatagcaagacctcgtttctaaaaaataatcaaaaacaacaataaaacccctatgttatgaaattttaatttagtgacacttattcagttaagactttcctatctaccaataaccatagtattggaattgaaccttaaatgtccagtgggtggtgactgcatcaaagttgaatgaaacagccttcttgctgttcagctgtttagataacttatgaatattgttagggcagctttctctgagaggttgccatttgtcatatcaatttccaaaagctgttataccttcatggacatttattctccgaatgatatttaartgccaacacaaattaccacatgatcaagtgaaatggactatactttaaagattatcagtgtagagctcactgcatttcattatatattttaaagggattcattgccttaaatatttgctctcaagatgtcaaggttaacatrtatatttttttgcagtcaaagtttcmctctgttacccaggccggagtgcaatggtgcattcatggctcactgcagcctcctgggctygaggggtccttttacctcagcctctccagttgctgggattataggcatgagttgccatccctggctaatagtattttcttatttgttcacttgatttggttattgttctgttggttgtaacttgttttacaggactcacttgtgtccacacatctgtgatccctttgaaccttaagaatcaaaccattgtctgggagcggtggctcacgcctgtaatcctagcactttgggaggctgaggcgggccaatcacgaggtcaagagagtgagaccatcctggccaacatggtgaaaccccacctctactaaaaatacaaaaattagctgggcgtggtggtgtgcgcctgtaatcccagatactcgggaggctgaggcgggagaatcacttgaacccgggacgcagaggtttcagtgagtygagatcatgccactaaaaaaaaaaaaaaaagaatcaaactattttggcctctccattttctggttgagaaattctttatattttaaatatatatttatttccaaatttaatattgaaaactagaatatagagaagagaaggaaaatagttacctaaaatgacctaaccttcaagatgattattatcactattagcatttttccatgattttcagacttttttctatatagccttatacatataaatacatatattttaacgagattaatgttaactcactctgtaagctgttttcttacctattaatcatatggatgtgccataatctagttaattgatggacatttttattgtttctgatttcactattttagataatattgctatgaacatccttggataatgattcatttttctgtattataatgttgagatcatttgagaatcagagaaactggcagagaaaattatagtgagtcattttatgttcgcaacaaaacttgcataatttcaattccatgagagaatgtggaatgaactaaaatggaaaattttcttttaaagaatgagctttttgtctgggtgtagtggttcatgcctgtaatcccagcactttgggatgttgaggcaggagaatcacttgagtctaggagttctagaccagcccaggtaatgtggcagttgctctacattacaaaagaatacaaaaattggccagccacagtggcttgtgcctgtagtcccagctactgaggaggctgtgatgggaggatcgcttgagccggagacgtggaggcggcagtgagccaggatcacaccactgcactgcagcctgggtgacagagtgagaccctgtctcaaaaaaaaaaaaaaagaaaaaagaatgaattttatatttttgaaattttaaaacacgttagaaaaacaactatcagaaccatagatgtctacactaaaagtagaaaagttaattataactacataagaattctagaaatagtttcaaactaccaaaagatatccaaagtagaagggaaataaattataatatatttgagattgctggatgtaatgatggaaaagaaataaaatcgatccatgtaagcacataataaattataataatttcatattttaaaaattggtacagtttaattgtatcgaggtagctagaagtttgaagagtatttttggcccaggtatgtatgattaatgatcaaatggaagacaccaacaacaggaatatttctgtatattcataaaatactctttaatatgatataatagatataatgtgatatataataaagtacataccaaaaggggagcaagtgaacaaaaagtatatattattatataattagtaaaaatgttatgatacaaagcatagaaaaaagaagcaccaaaatatgtttttatttatataataattttctttcttttttcttttttctttctttcttcctttcttcctttctcttttttctttctttctttcttttttccttccttccttccttccttccttcctttctttctttctttctttctttctttctttctttctttctttctttctttctttctctttctttctctctctctctctctctctctctctctttctttcagacaaggtctcactccattgccaagactggagttcagtagtatgataagggctcactgcacccttgacctcctgggctcaagcaatctcctcccacctcagttccctgcatagctgggactataggcacgtgccaccacacccagctaatttttaaatttttttctagagatagtatctcactacgttccccaggctggttcctatctcctggactcaagcgattctctcaccttgacctcttaaagtgctgggattataggcatgagtcaccgcacccagcccaaaacatagttttaaaaagtggatgagatcattgtccagattgtagttaattaatatcaaagaggcaaacacacgaatggcctaagtaacttattacacagaaaaaggcatattcttaccaaaataagtacaaatcaacctgggggaaaaaacagtaaaaatacaaacacaaaaaagtcattgaatatttagaagtgggtatatcgtggtagcctggtaacttggttttgtcacttggaaaatgaactggcagtatacaatgagacctacaaaatagtttataagttttgatactcaataatttcactttgggttgtatattcaaaagaactaatcggaaaggaataaatatataattgtgaaacatttgaagctactcatgttaagtaatgaagatgaagtgagaatgatttttaaattgtttacattatagtgtagtatgaaaagccttattatatattatctccttcaatcctcagggaggaagctgtgacaaagagctcacataactgggactggaaactaggagtcctgtctatgcagaaataagacccagacttaaacctggctacatcctgtgtcttctggctgtgggacttcagcccccttcccaatatctctgagcagtagttttcagatctgtaaatggatcacaatgctcagtctctatggctcccaggttttgagcaataaatgagataatgcacgtggaagtggagctcctaccatgggcctgatagggcaatcactggggttgcaactttctgaaaatgggtctttaaatgaatcttcaaactgcacactgaggagcgggaagatttggaacacgtttaatcagcaagggagcaatgaaagcagagaccagtggcaatgagggccaagttaaaacagggcggagtggagttgtaaagagagaagtaaagtggatttgtttgcactgcctgggaaggagtagggtacagaggggattcaagggcacgtgcttgttttttttaattgagacattatgaacatctcagaacaaaagctttgggctttggtaagctccaccagacacctggtttagggctttttcattccccaagactcctcctcccttccatgacactcctccctgggacacatgcttggatttggctctggaaatgccccgccccaccatgaaaccatctagtcttttccccaggttacttctcttgtagtcacgcaaaatcaaggctgaggctccctgtcacgaccctcggcacttcacctgagttctaggagccactttggcagtcctctttctgtgccaccaatgggagtgaggggtgagcctggcagagacacacatgccaccctgggctttgtgacaaggcctggactctaatgggtcaaacccagggcaaaggccatcctccatctaggtaacgaagtgttcatgactctgtgacagccaggacaagggcagtaagtttgcagtagaatgacactgcaaattggtgaaccttagtgtagggtacgtcccagccgggctttaatacagagcagcaataatgacaacaacattgcgtgtgtgtgtgtgtgtgtgtgtgtgtgtgtgtgtgtgtgtgtaaaactggtgcagtcctatccattgtctgattcgatcatgagtgccacatcctccccagacttgggttagagtagacccagatccccagaacccttttaaacctgggtgatttagaattcaaactaccatcacttctccagactagattaaatgccacctggactgatcagatccaacatcctaccatgagtctggtattttctttgctattttatctagataattcttatttaatcctttcagcaatcctaggaaaaaaatattcttatccccattttacagagaaagataaggaggttcagagatgttaataacttgctccaggtcacagagcaaatcagccgtgaagcaggtttcaaatccaggtctgcttgactccaaaatcgatactcatgctactccgatgcatgctacagagagtttttctgggccagtagtgggaagaaggtagagatttttgcaaaattgtcttagggacccagtatagaagtatgccactaactttggggtttctggaccacttcctgataaggggcagagttagatgggatgccgaggatgtctgtgtgttctctatgtacacacagcaagacagacattttttcctttaacatgtgttttgctttctatagagagaatcctttttctgacagtcactttctttccaaagcttagaacatcataggctctttggcagagagtacagctttcaacaagaaaaagaaaagtttttggccactctgcccccttgcagttcaagtataattcaaaatatctgcttctatttgtttgccttttgcaaaacctcaagggtgattttgaaataaataggaataaaatatttgactgaaccaaaagagcccagtacctggccatccgaaagtatttatttatttgtttaaacattgctggagtaatagaaaatttaaatgcagttatcaaagaccaaaagttcagagattaaatactatgttagagtcattccttctaattaattttgaactgttttcgaaaaacgaagaacttgctggggagacaatgatcaagatcrtaacaaagttcccctagaagattaacagagcttggagtttactgtggatctctgcctgtgtggagaagaaacagtcaaactagaggaaacaaaactgtctctatagacaaattaaattttagtggatgttcatgtgcacaggtgggcagcagcaccttagtctagtatgttgggattgggatcagagtctttttccataaatgcagcagcattgagcaatataattccatctaaaatcttattgtatattttctcatctgcttacttttttttgtttgtttgtttgtttttgagacaaagtctcgctcttttgcccaggatggagtgcagtcacacagtcttggctcactgcaacctccgcttcctgggttcaagtgattctcctgcctcagcctctcaagtagctgggattacaggcatgcgccaccctgcacagctaatttttgtatttttagtagagacagggttttaccgtatcagctaggctgatctcaaactcctgacctcaagtgatccacccacctcagcttctcaaagtgctgggattacaggcgagaaccaccacacacagcctcgtttgcttacttttcaaaacagctctgtgtttgtgtgcgtgtacatggtaaaatttacaacgaaatacacatttagaatacattcagtgagttctaataaatgtatacacgtgagtgcctcaaacccttatcaagacataaagcattgccatcaccccagaagcaacggctgttctgaattagtgcattagttttctgtattttgggacttcatacaaatagaatcatatataatgtgtagtttttttggataaggcttctttgactcagcctaatgttttccattcattrtcatccatattccgtgtattaatagtccattccttttgattattgaatagtataaccattatataagtattctacactttgagttgggttattttctattttcctattgatggacacttggctgtttccagttttgagtcaaataaagttgctaagaacattctagtgcaagtctttttgtggacacattttatttctcttgaatagatatctatcaatggaattgctgagtcatggggaaggtaaatgtaaatgtcagggttttttttcccaggatgattgccccacttcatacctccaccatcaaaatatgagagcacatgtttgctgccattagatattatcagtgacctctcattttagttttaatttgcattcttctggatgactaatgacattaagcacttcatggttctttactggccttgtgtatgtcttcctttgtaaagtgactgttcaaatctttttccattttaaaatattgggttttctttcttttttccttatttttttttttgagatggagtctcgctctgtcgcccaggctggagcgtagtggcatgatctcgggtcactgcaacctccgcctcccgggttcaagcgattcttctgcctcagcctccygagtagctgggattacaggcaagtgccaccacgcccagctaatttttgtatttttagtagtgatggggtttcaccatattggccaggctactcttgaactcctgacctcatgatctgcccgcctcggcctcccagagtgctgggattacaggtgtgagccgccgcgtctggccaggttgtctttttattactgagttgccagtgtgctttacgtttcttcacatggtatatatatatatatatatatatatgtgtgtgtgtgtgtgtgtgtgtgtgtgtgtgtatatatataccctctccctcagagagtggagccccagttacctcatctttttgtctgtctttctccccagaatgatgccagggattcttctttgtttggtactatatttccagtgcttcagattgccactggcactgagtaggagctcaataaacatttgctgaaagaatcaatgaataatcaagtaaactgatttttgggtctgatattcagacacaatgttcttgaacttaatggcattaattaacaaggaaattgaaaaaaaggacatttaaatgctatccttgaggtatcacatatgcttggcaccaaggacacagaataccttcaggggactggacatggtggcttctgcctgtaatcctagtactttggaaggctgaggtgggagtatcacttgggcccaggagttggagatcagcctgggcaacaaggtgagaccctatctgtacaaaaaaaaaaaaaaaattaaccaggtatgatggtgtgcacctgtagtcccagctacttctagggctggggtgggaggatagctggatcctgggagttcaaggctgcagtgaggcctgattgaaccactgaactgcagtcggggtgacagagtaagtccctgtctcaaacaacaacaacaacaacaaagcccaaaacagaataccttcaggggatttgttcacccaggggagatactgctagactatctcatggagtggcctaatttgtccccatttatgagccctctagtgtaagccatcactgctgtctcatctaccgcattctgggactatgcccagccacttccaagtcttggattccgaccagatttgcttaatggatgagcagaacgtctagctttagagagttttaggtaacttcacccagctgatcccactgtgcctttaaccaccttcctcttggccccttctgacactgataatgcctgttccctaaccattggcccctctgcctggctctgtctcactagcaggcccatccccactctgtgctctgcctttcttaacacccctaaagggccacgcaggaaaggatgggacaagttgattatgacatccctttctagctctaaggaattcaataattctgatattcatccctaaagaaatttatcagcagctattaattgggctttcctaatttgacactgaaaggccggtagggtcccctaagtcttgaagccattttcctggtcccgaatccagcagattccagcctatctggtttggggggtgtctacagtgaatcatctgtattcacatttatagagaactttgccatttgcatgttcatatctgtcatcttatgtaaactgccaaacagttctagttgtagccctctttagtttctattttcccgaagtttctatttcccaaagcaaaaagaggtgagttttcatttcttttttttctttttttttttttttttttttttgagacagggtctcgctctgttgcccaggctggagtacagtggtgcaatcatggctcactgcagccttggcctcctgggttcaagtgatcctcccacctcagcctctccagtagctgggactacaggcatatgccaccatgcctggctaatatgtttttatttttcgtagagatgaggtctcactatgttgcccaggctgatctcaaactcctgagcttaagcaatcctcccgccttgacctcccaaagtgctgggattacaaaccactgctcctggcagagttttcaaaaatcctctagctcttgctaaaaaaagttggtgctttcttagctctggtgggtatgcaagtgtaatatttaaaaggctcatagatttttacagttcagaaacctggattctgtctgtcattagaaattcaattacacaccgcagacatctatgagtagttcctaaccttttaatttaaccattattatggattttttcccccttggatcacatgttattttcttttaagtccaccaaaaactgtatttattggctcactttaccttttttattcatcagacttgtacctcccagtcagagtttagaatcaggatcagatagtctcttacctcactaagctgattttattacagccaaaataaagacatttgatatttaattagcttccaaacctaataactagtacatttccatttctgctgggctttttgaaagattaaaaagttcatacattaacccttgagaaagtggaaacagtttagttcttgtgaagaagtagccctgtgtgttcagggacttcactcttgccgtgtctctgatgtctgaatgggagcaacggggatattactgactttaacccttttcactgcgatctgggcctttctctggctctatagggactggggatcaaccacccccaccctagtatttcctcagctactggagtatttgggttctcagttcaagcctataggacttggggagaacatgcattcactgaaacgatgacattcctctaaggtgcaaatgttaaaaggtcatgcaaccagaactattacataaaatcaaaaattttccagtttgaattatactctcaaaggaccatgatgagtattctaaaggcagtgtttgtttctaaattaatagaattaataaatgttattctgtttgccaattatagaagatacagttgttgaagactattaatgtaatatgcaattgcattataattgtattatttaacagattgtgttgcatgaatcaatgagatatgatgctgtaatttaaaaataattattttatggaagcaaaactgcttatgaataacattaagtgaatgcagaatgaataacttaggtatgtagactcacagctaagaaaaatatatatacatgtagctaatggctcagggtaatctgcagaaatgaaaaaaactatattagaatggacaaaggtgagtctctttcaaaatattttttatataagttgttacatgtwtcagtttcgcaattaaaagtttaagatggatttatattggctccagtgaagaatatgtgttttattaattaatactgtgcttggttttgtcttattttatagragaaccagcagaaatccaccaatgtagtctatcaggcccaccatgtgagcaggaataagagagggcaagtggttggaacaaggggtgggttccgaggatgtaccgtgtggctaacaggtatgtcatgttcatatatatatatatatatacaaattgcaaactgacatgtgacacaattttatggaaattagtgtaacgtattacatgcttgttttatcattagaargaggctgggagatgtagtagaaagcctgggtgttagtcctaaccctaccatcagtgagaaatagagtcaaggtcaactacagaaataagagtctgatcaagtcaactgtgaaagtctctagttgtcactttyctcctctttggcaggaaaggacgggacaagatgattatgacatcccctttcagtgctaagggattcaataattctcatgttcatccctaaacatatttactggcagttatgaatgaggctttcctaatttgacatcaagcatttggctgtccataaggttttggatatttagagatattcgttattgttgcctaatgttttgacattctaggagactatttcacttactatataaacaacaaacaaacataagaatctgtacaagaaggaaaactagcaatttccatttggctgaggattgcccttgtttacagaaataacttgctgctgctgaagtgactgaatgactctcccttttcttgtgtttttatagccacagaatgtcaaaactgagaattagtgacagaactggaattagaacctgactcccaatagctggccctaggctgttaccttgtactctgagtccaaggtagacaaaattatttctggactcaaaaggaaaaaccaagttcatttcatagacaacagttttcaaatggaatgagcccacctgcaaaactatgtttattcaggttataaaatgataatgttttctaacctggagctcattctaaacaatctggcaggtggggacctgccttgcatcttttcttgctgtcctaaatctttgcccttttctgtcccaactggcctcattcttgtactcttcaagtttttgccttgtgcctttggtttcctggtttcattcatgcctggactgtgcatcgaaacaactttctgcagcctccagtgcaaggacagacagtgagcaaggaacctgctgtgctctaatatgcaccatccttctgtcattactcctgaaatgtttacctcaactccccccaagagacgtaatttgagcagtaggtacagctgtattctagaagatcccctcctgttatatgtttcccttcatgcgaagatcactggtgaaaacaactttcgtgttgggctatacacacaaagtccattttctctaatgtgacaccccttgaaaagaaaaagagaattggtagaagagaaacatatctaaagggtatactttctccttctttactcttaaaatgaattatttcttcattagaggaagaaaagaatatatggcaaattttaaaaaatcaaggccgggcttggtagctcttgcctataatcccagcactttgggaggccaagacaggtggatcacctgacatcaggagttcaagaccagcctggccaacacagcgaaaccctgtctctctactaagaagacaaaaattagccaggcgtggtggtgcacgcctgtaatcccagctgctcgggaagctgaggcaggagaatcacttgaacataggaggcagaagttgcagggagctgagatccgccactgcactccagcctgggtgacagaatgagactccatctcaaaaaataaaaataaaaaattaaattaaattaaaaagtcatctttttctaatttattttttattcttatgttacaaaggtaggctgttgaccaggcagaccagaagaaacaaaatactttaaatccatagactcagattttagccccaactccacctccatgagctgtgtgactttggacaagccagttaggctctctaagcctcagttttcttatttgtacaatgggaataaagatagtacctgacttatggaggtgtcgatagaactaaatcaataaaagacaaatgtgctttgcacagtgcctggcacatagttaagttgtcagtaattgtaattagtgttacctcaatgtatgaaagtacgtgtgccaacaatctggttacatatacttactgtaatttagctctttgtttcctgagagctgaagcaaaatggaaggacattctgttatttctctcattttctgacatgagagaacacaccagagattcaggagtgccacttcccctaccccacaacctgacataaatactaagaagaatttatcacctatgtctttatttaaatgaaaaggaataacagaattacagacaataccttcaaaaatgatttgatgaagttagtgttgacacgttcttcatacagccatttcttctaatggtcctctgtcaaagccaaaggcatgactttaaaatataactaaaagtatggagactattcaccttttgcagatcaccttcccccccacccaaatcctccttcctctgtctgtccttcattcctgctttttctgccctttttcctctttcctcctgttgtcttctctgtatgaacctcttggcttttttcctctgtcatgccaaggtgctgtcggacagaggcttggcaccatgaaatattcttaggttcagagatctttaagacaaagatcctaaaatcctaaaggacccatttttttttttagagtgctagcctttagggtagttcagatttaaactgttaaataattttggcaggttgtgtttctttcccttcttatgttcctcctcatatggaaattacaaagtgtgttcctgatcattgtgctttgaaaccatggtggaagccacatggtaactcttttctcatataaagactctagagaatctttacacctaagagtgtgacatatggcagctctaaatacatctgctccctagctcaggccggcttcctgtctttatgttttgagagtcattttggaaacatctagaagccaaaggacagcctgcgggctctgtaagacggttgttcagtggcatccacgagggaggtggacttaccagtctccaggggctggctgtttccctccattccagctgattgctgactttgaaggggatatgagaccactgtcaccacatcttttgattttttcaagagaatacagaatctggatttgtatacacaacttcctttttgctttggagacaaggcctcgctctgttacacaggttggagtgtagtggtgccatcacggctcactgcatgcagccttgacttcccaggctcaaggggtcttcctacctcagcctcctgagtagctgggaccacaggagtgcaccaccacacccggctaattttttttgttttttgtagatgcagggcctcactatgttccccaggctagtttcgaactcctgggctcaagtgatcctcccaccttggcctcccaaaatgctgggattacaggcatgagccaccaccatgcccagcctgtatgacaactttctaatctttaaaacactctgcagcccaaacagaacacatcgaggaccacatgtagcccccaaatctccctatttatgaagcctgcttgctttgaaaagctataatcctaacacaggacaaatagttatttcaaaatttgagagaaatgtaagtacttgccttgtagtcaactacactgatttctttctttcttttttttttttttaagatttagttatatttaaaattactagattagttcacaatttgtcatcttaaactatccaggccgatgtcagtctgttttatctgttctgaacaggtctctctggtgctggaaaaacaacgataagttttgccctggaggagtaccttgtctcccatgccatcccttgttactccctggatggggacaatgtccgtcatggccttaacagaaatctcggattctctcctggggacagagaggaaaatatccgccggattgctgaggtggctaagctgtttgctgatgctggtctggtctgcattaccagctttatttctccattcgcaaaggtaaaaaaaaaaaaaaaaaaaaaaggcactacacacgattcccacacacagtgcaagtgctctccaactgctaggggaaggaatcggagagggagggcataagaatgtctcctttcaatttcccgactatttcttcccccaataacaggctctctcatttcctctatttaatattggttatataaaggagttccttcctttccagatgccagggcaccagtagacataaacccttccatgttcacaattataaggaacatttggtgagagtcgaagggaagagaaagttaaacaagagaaactctaaacctctgtaattttagttgtcggaaaaaggatctagttaaagaaaagagcagttcatggccaaagcttcgggttctatgtgtttaatgctgacatcactgagatggagtgtcactcttcttttaaatcaggaaatttctgggagccaaacatcagatgtagcttagaacacatcctttgaatgaaatgctcccatatggccagtgctttcctgctaagagggcctattttccatgattttctgtgaaagtccttgagagagctgtgtttaccagagtaaaatttctggactttctctcaagcactctgcaaagcacaaaccccagtgttatctcaaggctattgaaaaccaaagtacacagtgttttgtgatttagaatttcaccrtgaaacctctttttacattcttaatcatattgcttttcaggatcgtgagaatgcccgcaaaatacatgaatcagcagggctgccattctttgaaatatttgtagatgcacctctaaatatttgtgaaagcagagacgtaaaaggcctctataaaagggccagagctggggagattaaaggtaagagaattggctagtagmgtctaccagttacataggctgtcagtcctcagtccttattctgtcctcagaaatcttccttgagtttcaaactgttttccaaaattgcatataacatgcacaactttttatnagatcatgatatattcagtatgcccagaggcttattaaaaggtagggttttatttttaagaattgtcatctcagccatatgcaataacgttcagagaactagaatggatatttatatgtgagtgtgtgtgtgtagaggagtgtttcagagttcttccttattcttgtcttcctttttgattgtaatcatctatagagggcttcaacttagccagcrggattttgttgacaatttggggctttccatattgaaaatacagctatatattttcttacttatggctagaagtcaaggatggctgtttgaccttttctgttaaagtgtgaattttcagtttaatacattattccaacatgtgttttgccttattgattaaaaagattattctgtcaatacagatgcgatgattgtcacccatatgctttgcaggatttacaggtattgattctgattatgagaaacctgaaactcctgagcgtgtgcttaaaaccaatttgtccacagtgagtgactgtgtccaccaggtagtggaacttctgcaagagcaggtaggtgaaccggttgtctttttttatatgtttaataaaatcatgaaagacaatctatgcctctttactgaagcattctttttacagttttcaagtttttaccaatgctgtttcatttcagaacattgtaccctatactataatcaaagatatccacgaactctttgtgccggaaaacaaacttgaccacgtccgagctgaggctgaaactctcccttcattatcaattactaaggtaagtgggtgcagactggtcaaataattaggcttaatatcagtcattataatttatttacaattactcttaacaataagaaaagtataaataaggtgcacataatgtccataaataaaacactcctttttttccaagttatttttaacctcttctccaaagaaatctctcaccaagaattgccacaaggcagctgatcaatgccatgtatggaggtgactgggaaaataacttctgtatttgcattggacaattttacatagctgtcattgtaccagtaagtacatctggtagaaaaatatagccagaccaggatttttgtggataaaagaaagaaagaataaacagtgaattttcaactcagttgcacattttgggaatagatacaacctaaaaatgttcaaataagtcatctcaatacaaaatcttttcaccactatttcataggaaacttccaaacttaaatatttctggcccttagatcatgggttagcataacaggtggggacacttaaaacatagaaggttctgccctcatcctcctgttaactgaataagaaaggacttccctggggccagatgcctggaaaacagaacttatgaaaatgttcaactactttttgtgttttgcagctggatctccagtgggtccaggttttgagcgaaggctgggccactcccctcaaaggtttcatgcgggagaaggagtacttacaggttatgcactttgacaccctgctagatggtatgtttttgttgttrtttcttactctttgttgttaaggaaaaaaaaaaatctttcccagaagttttgcaggaacaggaagttagtctttrgtttgcaaatcttattgcaaaactrtttggatcatttacagtgtgctccattctattatgtttaagcttccatttttaggattttttggttgttctcaaaggttgttcctttaaaactaaggaactgaaaaatggtgtaaagccaagagaaagacaggtctgtttcatctccacttgctctttgctggtgctgatattcagaaggtagcacgcagaagtaccattgccacctgctagggacattcctagggcagccaagatgaggtcagcacatgttgctgacctccatggcaccctccaccctccaggttgctcatgtcaagcattattgcaacaactgctttctttggtgcatgctaaagtgtcaatgttcatgcccacacatgaaatatattaaaatggtttcatccactacactctaacaaaagagcattaaggcagctttctggccacgagctgaatggcttttagaaaaccaatctggtcaagctcagaarcatgtgttattgtgaagacttccggacccttctgtgatcatttccttcctagaactgcctgaacttatcaaataaacttatctatttcaagaccttcggggaatggctgctaagtggggaaggagtaggggtagagtcacgctgaatttgtaatgctgagcagggctccaagccttttaggaagaaaaatcaaataagatgctcttttttgggagaggtgttcatgtcctgtgtttgtgcctttgcctggggaatggggcatgaactcagaatcagaactcaaagactgatcagcatgggccctcttcccttattcttttgctgtgacagataacaccccacaacctgaatccttcacttctcagattaaataatattccccaaagacacttagtttacttctagcttgctttaacaacaaaaataataaygcatatccctataccacgtctctgttttcaaagcattttctcaggcattatttcatttgatcctcacaaaagccctagaaaacaggcagcaattattatcccactttacagatgaggaaactgcctcagattaagtgatttgctcataacattcataagtgaaagcccaagaccagagtccagaatcttaggaatcctggcccagtgctccttacataccagtctgctctcctgatgtcttttccaatagaatctacaagrcctgatggtctacaaggaaggctgacttktatcttggtgtcttgattttgacacatgctgaacaccgactgcctgaagtaaaggtcattggacttagcagctagccatgagcaagaggttgattttgagcatatgaacagagctgtggccaaaagacaagtgaactacattgaaagagggggcctcattacagacaacaaggtgctgttgaccttggacaagtgttcctctcataaagaaaaatactagggtggtggaagtggttgcagaggtcagtgttaatggaaatcagaggtccttagcctgagatctaggacttcagggtgggctaacaaaaaaycttagaggcaaaaatgtttgtgttttgataagggaaggaaggagcattttcctgggttgagaatttatagcttttgatagattctgttttttcctttaattattttttattttttagaaatagggtcttgctccatcacccaggctagagtgcagtggcatgatcatagctcactgaagccttgaactcctgaattcaagcaatccttccacctctgcctcctgggtagctgggactacaggcatgtaccaccatgcctggcagatttctaaatttgttttgtagagataaggtctcactatgttgcccagggataaggtctcacagtgttgcccaggctgatcttgaattcctttcctccagtcatcctcctgccttggccttgcaaagtgctattatagacaacaaattcttaaaagagtctgtgatccaaaaagatgaagaacagctaatgcagataatccatctggatgatttaggcaaaatctctagcctttcttttacactgtctcaatttcattttatgggggtttttcaacttgcaaaacctgttgattttcttttttcttttcttttttttcttttttcttttttttgagacagagtcttgctctgtcacccagrctggagtgcagtggcatgatctcagctcactgcaacctctgcctcccgggttcaagcgattctcctgagtagctaggactacaggtgcatgccaccatgcatggctaagttttgtatttttagtagagacagggtttcactatgttggccaggctggtcttgagctccttgacttcagataatctgcccgcctcagcctcccaaagtgctgagattacaggtgtgagccacggtaccctgccaacccattgattttctatttcttatttgatgctcactaccgtgaggtggatgaagcacttattattgctcccactttccatgtaatccagatgtctgtccccgcaaacccaccagcctggggatatgaatgaggttaccttcccattaatacttgaagcctactagttccaagcccctacctgctcatgcagaaagcccagttctttcaaaagcctacccaagtgtttttgggagtccccaaggggtgcgtttcctgtgttcctgagtcagggccccagccatgtgccacttgctgtgtgattctgtgggtctgtctgtactcagaagtgcagatcatgctgggtcactccagccaccaaagttttggtgccagtagggcttttgcagtttatggactcttcttcaagtgggaaaaattgtttccttcytctgtattaacctcaattgaagactgtctaggaggttgctttagttccacagtgttagagaattgagtgaggcaactcttgtaaggtgtatagatccctttatcctcatgtgrctccagtgtggctctgtcaggagggttcaagatcagatgttttgctatttccatatcctttccccttccaagctgcaggrcctgtgtctgaaactttctgtaagattcttcttttccctgtgggaattatctgctggttccaccatctacctctgcaaacagagtccactggacatacttatacaaccccagttatgatcaggattctgagctctgcacagcccacagaagcatcctaaatgcctgtgtaaattgataataaaaatagataatcagggatatgatgtgctgcccacccctaccactcgccgtatgttaagttactttgggtctaagtagaggcagaatatcacagtggatgagagtgtgagctgcgaagtcacactgtctaggtttgtatgtcagtgattagctatgaacctgggccaaattacttaaactctctgggcyttgttccttcatctgtataatggggatgttaataactgtacctacctacctcattggatgttgaaagtttaaaagaatgcctgattcaatagtcagtatttcatacatattagctattatgaacaaaccactctgcatacagttaaaagaatttgtcaggcatggtggctyatgaccgtagtcccagctactcagagcctaaggcgggaggatcacttgagcccaggagctagagtcccacctgggcaacatagggaaactttgtctctaaaaataaatacataaataaaagaacytggagtcttgaagagactaagtgactttatccctagtcacatcaatttggaagtagcacagatacgatgttcgtcagctagccaacagatatacactgagtgccccccatgtgccagggtttttctagcgtctggagatagaatggtaatgaaggcaggtgagcttgctgagaaatacagtacagtcattttctgagacctagtccagtaagtccttcccgccccccatcagtggttgtgaaactttcttttttattttctttttcttattttattttattttttgagacagagtctcgctctgttgcccaggctggagtgcagkggcgcgatctctgctcactgcaacctctgcctcctgggttcaagcaattcttctgcctcagcctaccaagtagctgagactacaggcgcttgccacgaagcccaggaaatttttgtatttttagtagagatggggtttcaccatattggccaggctggtcttgaactcctgacctcaagtgatccacctgcctcagcctcctaaagtgctaggattagagccatgagccgctgcacgcagccgaaactttcttttttaaaccagataattctttatttcatttcaaaaatcagaggcaatctacacaacaaaatggaactgcctcactcccccagtagaagggagtaggggcttgggctccctttcacctggagagcagcctggagggtatcaggaggaagccatttgaaacgcagcaacagaggctcctgacagtgcctcacctgatggcgtttggactgaggagacagagttaaattgtaaaaagtgatttatttctatgtcagaatgttgggcaagatatcatttatatagatatcatttaattgtaaccaattcatgaaggtttgagtcactgccattgaaaatttgaaatgatctccacagccacagacatgtgcccacttttgtcttccttcaaaccattgcaaatttcttgattacctacaatctgaaagcaacattgtttttattctgaccatgtctcctaaaaatattttgttggttttaattttctcaaaggtttatattttcccctaaatttaaaaataaaatagttctgtctactcagtccaaaagccaaaaaaaaaccccaaaacaaaaaccaaatcacttgttagagtatatgataattgtgtagtatgagtcactccatattattactcaagaatctacttttatatcagtgtatcatatcactttatttctcactagaagtatagttccagggttgtcacagaccctttgatcataaatgtcacatttaaatttaaaaatgcaacctcaagcttgtgttgactgatggcatccaagtaggatcaagacaggggagccttgtgagactccatcatttaatggctattcttccgcagctctgactttccaagggagggtgtgagagtactctgcatatatcaccagcacttattgagcaccaattgtgttctgacactggagtttgacatagattattacatttaatcaggataataccactgtgaagatattttgtccacttgagaaaatatgtattagaaaggttaaataacttatttgaagcctagacttaaatccaggttgtcctggatctaatgttggtgcttgttctgctgagcatattttcatgtcctctaaccatgtgagattctaggatgttctagggcagtttgcttctatacttgctcccaaagcctagtttggaaactattctacagtggttgtgagatcacatgtttgcaagagaaaacttcttggtgaagctggaggggacattaacatatgttataattattttaaaacagatatctcttcccagtggatggaaaaataaataaataaaaaattagaaaaccagataaacatctgaacaatgcttttggattgtattgaacaacattccatacaagttctgatttcaccagctttttgctattatatactctctatttttaaaaatagcatgacaaagctagtatatttgtatgttgtatatgtgaagtgtcataataggaatttgttctttgacattgttgctgtaagattcgtttggtggagagctgaaaatgtttcttaattgtgtttatatttccctaggcatggcccttcctggtatgtactttaactttccaagtagctaaattattataattatatatgttaaattaactggaaatggttaagaacataactaaaagaaaatctacattaaccagttggaatcgctattagttcatgatccaaccagctatagtagaataacactgtatttttctttagactggagtccaaacaacaggaaatttcccaaccagatgtagctattgtgtatgatgtagcatttggctgacaaaagtaaacttrtttctaaattatcattgtacattttgttcctgagtcttttacatttatgatcctcttccaatgactgttggtcctcatttagtttcacaaakctggaaattttttttcctacagtgtttataaaagattttaagttgatgaagaataaatcgatttaaactgaatgtacctggttggattgtgtatgattgtacttcatttgtttgcaatgtatgattatgcatgaacttaatttcaagccattatggttgcttgttatggaactgggagtaaatatacatttgctgtgactgtaaacttctgcattgtacaagaatgaaaaggtagaattctgaatatgtcatctatctttggtgttgctttcatcattgttgtttttcctttaaaaagcccagttaagcaataaaaagtaatttaggttttgcacagaaacagtcccaaacaaccatgaagcagatctataaggctaacacagaaggcttgaaaattattgaaagcaaaagaaaaatcattccattgaacaataagctatctcttggacttactgtggttaaagaaccacaatattctttttcaaaataagatataccacaataaaataatcaaggcagtgcccaccagagccaaatgaagcacatgaaggaaaaggctgaaaactcaagtcagggttgaaagtcatgggtgatgtttcagcacagttcaagtattacatcttagtaatagttggatacgtttatatattagaaaggttgataaagatgatagggaaactacagtaaatctgtgtatacacatgtagtgttgtagctacaggcttataagatcagttggcattattacttggcagaactcctttctataacatcccacagattcacttccttattgagacaacctgccagagtgttatttagtcatttcagattttcactcaaggccaagatgaaggtagattagaggctaaattggtcaggaatctagtggacaagaggaggtggctgcaacagtgaaacatcccttggatttcaagtcagaatacttgatggaaggcaacgttacagacgtgttgcaggcagcgctaggttctttcagcaccctgctccacattttgctttgcattttgctttatttcggccaagtcattctttataagcagaggcaaatatcatggtcttcctttcagcaatgtggtcagtaagcaatccacagaaagcatgatttctagtgacaacgacagcatttctgaaggggttattctttgttagcctctctcccttttcctcaactagastatgcagtggatttaatcatcttccatcagcaacctccattaacatagtgctttacagtttgccccctgcagcaacccatggagatacatgtcatttattagcccatttttccagtgaggaaactgagtttagaaaagttgaatgacacacatagtaaaagggagaactgctgcctttgaatttagtgttctctgcaaaggacttagctgctctaattgcccgagaacgttgaaacaaagagttatttgaatgacacaccattactttctgtatgtacacagtatctagtttgtggtttataaagggtctcaaagtatattgcaggattttatgatagaccggatttgtttattgccggcagttgctgtctatttccggtgacattctttaggttctagtaacctttggagagtgtttaaaaggtgcaaagtgatatgcctggaaagtttagtttcataactactagggggagtcttatgccccgaaggaatagaactctaatctttaactctgtcagaggccttctaaatgttgcattgaaaagttaggtttaaatggcttcattaatcatggcacattccctcaggtccataaataactgcatttgcttcctctggagttaaatgttttctttattcaccttcctttcattctcttctgaatcttgaacttgagaactctcacaaaattgtccctaatattattttgtgttatacgcttaaccatgagccctcattttctcatctgtgagtataattgagagaatagcctatttgtgagggcatcattgtaggaggaacaccgttttgtacatttttttacattatctagaatcatagagaaatgagatgtttttagaaagccaaattttatccctttaagccccagactgaaaaccaactacacattaactatcttatttagaaacatttcaaaatagtcttactaaaaaaaaaaaagtattcactcaaaaaaaaagagaatatgttcaatataaaggaacttttaaaaatgactctgtcattattagttttaccagttattaaactgggcactaatgtaatggtgccctgaagatggggagacctgtgggattgttggctcccacactaaagaacccccataactctgtatttcagtttcagtgttagaaccttgtatagtcagggttctccagagaaacagaacaaacaggatgcatatctgtgtgtctatctatatacagatatgcatctctctatatagacatagatataaaatatatgtaacatatttaaataaatttatatatatgcatgtacatatattaatttatacatatattaattatatatatacattattttaataaattatttattattatggagccttatctctctatgtattatacattgatatctatatataacatatagatattatatctgaattatataatatttctgatatatatctgaatagataacaatatatctgtatgttacatatggatatctatgtattatatataggtatacaataaatctctgtctatacacacacacacacacacacatacacacatagaaagagagagatttattttaaggaattggttcgtgtgattgtggaatctggcaagtccgaaaactgggaggctggggaccccgagaagacctgcggttcaagtccacaggcggtctgctggcataattctctccttttctggggagaagagtcttttgtctaattaggcctttgactgattggatgaggcccactcacattctggagggtactctactttactcaaagtctactgatttaaatgttaatyccatctaaaaagtacctctacagaaacatctagaataatgtttgactaaatatctgagtactgtggcctagytaagttgacatataacatcaaccatcacagtttctatgtgtattttttcagtagttttcctgtctcttcctttgtggtccagctgtcattggacatttcttgctgctgmagatgtagcttctctgaatrccacattcgatgccttctaatttgctgtgctgtatactgagaaatcagaacaccctgtttatttaaattcctcttaaagcaagagactcagcataatggtgagaggagctcacactccagagaaagtacatgtgcgttratgacttgatgtcatttttcactcctctgtgkttttggacagatgattctcaactgtggttgcgttagcaagacctgtgattcccagataagtgagattaccagtatcctaaaaaatatttaggaaagagggagcaggagggggaagaaaaggtgattttatgcygaaaccaccatgaataacatcaagaggactgctcgtttgggatcccatagattagtgggttttgttttgttttttgagacaggatcttgctctatcacccaggctggagtacagtggagtgatcagggctcattgcagcctcaaactcctgggctcaggtgaccctcttgcctcagcctcctgagtygctgggactacaagtgcatgccaacatgtccagctaatttaaaaaaaatatgtgtgtatacacacacacacacacacacacacacacacatattttttggtagagatgaggtcttgcyrtgttacccaggctggtcacaaactcttggcctgaagcaatcctcccatcttggcctcccaaaatgctgggattataggtgtaagccactgcacctggctgaaaatacattttttacaagtgcatgagatgggtacagaaaatagaatgaataagatctagtatttgatagcacaacaggatgactatagtcaataataatttaacggctgggcacggtggcttacgcctcttatcccagcattttgggaggctgaggttggcagatcatgaggtcaagagatcgagaccatcctggccaacatggtgaaaccccgtctctactaaaaatacaaaaattagctgggagtggtggcacatgcctgtaatcccagctactccggaggctgaggcaggacaatagcttgaacctgggaggcagaggttgcagtgagccaagatcgtgccagtgaactccagcctggcggcagagcaagactctgtctaaaaataaagtaaaataaartaaattaacagtgcatttaaaaataactaagaggataattggatttttgtaacacaaaggataaatgcttgaggtgatgggtacctcatttaccctgatgtgattattatgcattgtattcctgtatcaaaatatcttatgcaccccataagcatatacactatgtacccaagaaagttamaaatttaaaattaaagaaaaaggtgaatgaggtattacccagattgtggctgattagtattaaaaaagacaaacacacagctgtcataagtaacttatyatacaaaaaatgcatattctcawtcccatagattcatatcaattatctgatttttttctttgttttcaattcagtgtattggtatgcagatagagcctaaacaggtaatgaaataagagacttgcttaacgttcttacaagtttcatttccaagaaagactagagagttttgttttggtttgttttgctagcttaattttatttaattgggttttggaaaattttaaactccctactgcattgaggtcaggacttagatatgaaaagggaacccacaaagaggcgtttccaaagttagatcacttatggaggccacctccatgatttaaaactcaacccacttttcacatatgctccacttgctttgggaagcccttcaaggacttgtcattatagaatctagagaaactggtgcagctaacacaactacttggatttgggtcttaatgcttcttgaaggaaatgtttggaaggggcattgtgcacatttgattcatgcttcaaggatggcacaccttatatstagttttcgtgcatcacatggctctttccacagatggcgtgatcaacatgagcatccccattgtactgcccgtctctgcagaggataagacacggctggaagggtgcagcaagtttgtcctggcacatggtggacggagggtagctatcttacgagacgctgaattctatgaacacagaaaagaggaacgctgttcccgtgtttgggggacaacatgtacaaaacacccccatatcaaagtaagtcacaaaacctttggaaggactttcttgagctatttaaactgagaagaaaaataactctttttaattcctttgcaaaggacttagaaaaactgggattaggtggaagaatgtatttctaaggtagtgtttgcaggctttgcctcaggagatgtttttagaaaggtgcaaagaaatgtctttctgtttgaggtctggtctcaatgatctcttgagtcctcagattctgcagtggctggcatcctcagctaaatgggaccagataagaaatttagtctgacaacatgagtagagaaacaaaatcatagctgtagctatgcacaaaaccataatcagagcttgcagccctgyccatcttgaaaatgcgcaaggaacataagtatcttcataaagaatggacccaaccaaatgctggaacaagaactcagagttcatgctctgtggctagtgagggggtcaatgatactctcttagtaaatgatactctcttagtaaacaaaaatcagcacagatagtggcagagtttccagaggaaagatattttttcagtggatatttttaagattgaaaaaaatgtgttcatctgataggatcaggtagggtctatcatgcctaaagggaaaatagactaactcctcagattccttcacagcttctaattactgtcggtgatggggtggggtgggattttattaagttgctggctgtggttcatttcccacaaagaaaaatacatgaaattgaatggtaaaaccatccctcatccaagataagagcagtagggtggaaatgaaaaaagtcatatactactaatttgacttctcaaatctcccagcatgtccctttcagcatgttcacaggaagagagagcactgtcagacccaggagactctaaaaagcctgggattagacaaggcatgccctccctctgggcctcagtttctttattataaaaggagaggccaggctgggcgcggtggctcacgcctgtaatcccagtactttgggaggccgaggccagcagatcacctgaggtcgggagttcgagaacagcctggccaacatggtgaaaccccgtctctactaaaaatacagatattagctggacatggtggcgggcacctgtaatcccagctactcaggaggctaaagcacgagagttgcttgaacccaggaggcagcggttgcagtgagccaagctgccagtgtactctagactgggtgacagagcgagactctgtctgaaagaaaaaaaaaagagaggccagactcaaaataactgtaagatctcatccagcctcatgaccctgtcaaaagatatggcttcttttggtcttcatttttgttacaaaatgttccaagataggaaagaccttttaagtcccctgtttgtggcctctgaagaccttctctatctgaacacaaaaggtcaatggcaagcaaagcagctttttcatttatttatttttattttttaaaaatttttatttatgattttttgagatggagtcttgctctgtcataatcatataggtttgggattttatctttactcagtgactgaaagaatagcaacctttggttatggttatgtcagctcagatatttctaccctttgggaatgatattcgcatacacatgactagcactaaaaaaacctgaagagtttcttaagtgattacaggcatacctcattttactatgcttcactttatcgtgcttcacagattttgcttttcttttcttttttttttttaacaaattgaaggtttgtgtcaaccctgcactgagaaagtctgtgagtgccattttcccagcagcgtgtgctcattttgtgtctctgtgtcacattttggtgattcttatgatattttagatttcttcattattattatgacctgttatggtgatctacggttagtgatctttgatgttactattgtaattgttttgggacaccacgaattgcacccatatgatggcagacttaattgataaatgttgtgtgtgttctgccttctccactcactggccattcccgcatctctctccctctccttgggcctccctatttcctgagatccaacaatatttgaattaggccaattaataaccctgcaatggcctctaagtgttcaggtgaaaggaagactcacacatctctcactttaaatcaaaatgattgagcttagtgaggaaggcatgtagaaagctgaaattggacccaggtgcagtggctcacacttgtaatcccagcactttgggaggccagggtgggcggatcacttgaagtcaggagtccgagaccagcctgaccaacatggagraaccccatctctactaaaaatacaaaattagccgggcatggtggtgcatgcctgtaatcccagctacttgggagcttgaggcaggagaatcgcttgaacccaggaagtggaggttgcaytgagcygaggtagcgccattgcactccagcctgcaacaagagcgatactccgtctcaaaaaaaataagaaaaagaaatttgaattaggcctcctgggccagttagccaagttgtaaatgcaaaggaaaagttcttgaaggaaattacacacagtgagctaacaaatgataagaaaacaaagcagccttattgccaatgtaggggtcaagggaaaacttcccctttgccccctgaagttttgctgaaaaggcaactgacaaaaggcagattaatgagaaaaggcatccagatttattactgcacacggggaaaatcacagagtgattactccttaccccgatggggtagagaagcttatataccatcctgagattatagaaaaaatgaaggctcagaggatggccaaaaccaggttatggcaggaaatcaggttacgctggtaagacaggttatgggagggagggaagagaaggcctgtgtagcaaagatggtcttgttatatagatgaaatgaaattttagaggtaaatgtttctttcagacctttaaatgtgtcaaagtctcagttaatgtttcctagatccagcaagagaaggcccttagagaaagcctggctgtatcaatgtagattttctcttcaaatgcaaatgtaccccacaaaaggcagatttttagctatttttgtattttccagcccttttgaatagccatcttgaactatgtcaaagaaatatattttggggtaaaatattttggtttccttaacagatatggagaaggtttgagtggtcttgtccaaccagctacaacattgccttaagccaaaacacctaattcagagcaaagccctaactcccttcaattctatgaaggttgagagaggtgagaaagctgcagaagaaaagttggaagctagcagaggttggttcaaggggtttaaggaaaaaagccatctccataacataaaagtacaaggtgatgcagcaagtgctgatgtaggagctgcagcaagttacccagaagatctagctaagatcattgatgtaggtggctacactaacaacagattttcagtgtagaagaaacagccttctattggaagaagatgccacctaggattttcagagctaaagaagagaagtcaatgcctggcttcaaagcttcaaaggacaggctaactctcctgttaggagctagtatagctggtgactttaagttgaagccagtgctcattggccattctgaaaatcctagggtccttaaggattatgctgaatttattcttcctgtgctctataaatggaaaaacaaagcctggatgatagcacatctgtttacagcgtggtttactgaatattttaagcccactattgagaccgactgctcaaaaaaagattcatttcaaaatatcactgctaattgacagtgcacctagttacccaagaactctgaggaagatgtataaggagattaatttgttttcatgcataacaccatccattctgcagcccacggatcaaagagtaatttcaactttcaggtcttattgtttaagaaatacattttgtaagggtatagctgctctagatggtgattcctcagatgaatgtgggcaaagtaaactgaaaaccttctggaagggattcaccattctggatgccatcaagaacatttgcaattcgtgggaagaggttaaatatcaacactaatgggagtttggaagaagttgatttcatccttcatggatgactttgaggggttcaagacttcagtagaggaagtaactgcagacgtggtggaaatagcaagagaactagaattagaagtggagcctgaagaagtaactgaattgttgcaatctcatgatagaatttgaaaggatgaggagttgcttcctatgaatgagcaaataaatcgtttttttgagatagaatctactcctggtgaagattctcttgaaatggcaacaaagtattcagaatattatgtaagcttagttgataaagcagtggcrgcctgtgagaggattgactccaattttgaaggaagttctaccatgcgtaaaatgctatcaaacagcatctcatgctacagagaaatctttcatgaaagaaagagtcaattgatatgaccaacttcattgttgtcttattttaataaattgccacagccaccccagactttagcaaccatcaccctgatttgtcagcagctattaacacaagactctccaccaggagaatgattacaactctctgaaggctcagaggatcattaacatttttagcaaaaaggtatttttaaattaagataggctgggcgcggtggctcaccctgtaatcccaacactttgggaggccgattgtttcagcccaggagtttgagatcagccttggcaacatggcgaaaccctctccctgctaaaaatacaaaaaattagctgggcatagtggtgcacacctgtagtaccagctactcaggaggctgaggtgggaggatcacctgagcctgggaagtcgaggctgcagtgagctgtgattgtatcagtgcactccaacctgggctataggagtgagaccctttctcaaaaaaaaaaaaagtttagataatattacattttaaagacataatgccattgcacacttcatagactacagtatagtgtaaacataacttttaaaatgcactgggaaaccaaaaaatttgtgtgactccgtttattacaatattcactttattgcagtagtctggaactgaacctgcaatgtttctcaggtatgcctgtatttttttcatcatgccttacaatgcatgctggcagatggaactcagaattttagaatttcttagaagccaaggagaatggtggcatgacttgtgtctttgacaatattttcagtgattctatacctttaggttattagggggactcgataaacattcccagggagctaatggtgagaaatgagccttggataaccagagagagaaagccactcaccctgcagacattttgtgcaaaagtgagagagattgatgaagattgttgaagattgtcgcatgtaccaaacacacaagttttattggcaaaataattctttttgctgtgtccttttttagcactctgaaacccacaaaaacactttaacacaggtttttagaaccccacagcttccaaaagtaattacttctgcgggaatcctgggccttattctatttccatgtggcactgggagtgatatttgcaaggaaaatagagtcactaggaaatggtctgcctttgttacagagcttatctccaacgtcattcttgaccttccattcaaggcatccagccctctctttggcatcactaagtatagaaccgtgtgacatgcgctcaaatgaaatcatcaggaggagcaggtgaaacttgtaaaactaatgcttgctggggctttgttgcctttcgtccatggctcccagagatttgtcaagtagtaattatttttcacaatgctcttggtgaggaaagtaagaatcattactcctgttttgcactctacattttcttgtacaaaccaagagaacagaatatgacttctcaatgaaagatgggaatgagagtttatagcctttagctccacaatgaaaaccatatggttagttatatcaacagaatcacctgaggagctttacaaatcacccatgactggatcccatcctcacagattctcatttaattggctttgagtcagatctgattattgaggggtgggtagttaaagctccccgtgattctaatgggctgtgaaggttgagaactattgagttagataattgtttggagctattttctttagggccccacctgcatatatcctgcaagtacctcaaactcaacatgtttaacctccccccaagcctgttccccctactatgtctcctatcttagtgacagcttcaccatccaaatggtggcctgtgaccaaaacctggatgccattcttgcttctctcttctccccttgtccattcagtcaccacgtcctgccaaatgtagctttcagttattgcttgaattcattcactcctcttctattccatcttgggtcaggacatttcaattctttcctctctcttgtcttactcccccmtaatctcccactctttagctagagtgaattattcaacttttctttggaaacccctttattaagatacaatttaccgcaaagcctcttgccaccaccagccaacacactccctcgtccagtccttccagagctggtcattcgatcatgcgctctctgacttttgcacatactcatccttcaacctggcacactgtttcttccacctctgcctccggaccttattacctcctttcagaagtcagcactgactcctatgacacatgagcataactgagtgccccttctttgtcctcccagagtaatttgkacttgcccctttcatacctgtgacaggtgaagctgaaatgtcaatatgggggccactgatgagaggcagtgggtgcagtgatgagaagaatctggtttgcaggagtctgagatttgggtcttggctttggtaagaaagctctgtgcacttgaactctgccacttcccctctgtaaaactgccttctcttctgaaaatgaggacattaaatctacattacctccaggttccttaaagccccagattctgtgactatgactgatagcacagaaatgaatgtgtgtgtmyatatatatatatatatatatatatatatatatatatatatgtatgtattctcctcttgtaggcattagtttttcttctctttgattctgttctctgcaccctttcatcatgaccttatcttgctgaatccaccatttccttccttctttctggtttctttcccttctctctgctccctttttgcattctttttcaccttcccaccctcagctgctcctccctttccaattagtgcattccctcatctccagattgtttcttttgagtcttcctctccttggcctctttgagcctatttatcatagctttcttagtctttacgctagtggttgagcttatcctctcctttaygcattcttgtgtgtaattttgagcccaattccctatttgctacttcactgggctcctgaagcctgctccccattccttttggcgcatctagttctgcaaatcctctagctgtggcccccctgctgtctttggcaggaagcttggaagggggtggggacttctaggccacaaagccctgggaaattaagcagagcctctggatctcccttcctgacagctggacacagttctggcgataattggaccaccttagggatagagatgccccttgtccctccccatcccagaaatgccaaacacatagttttaacatctctcttcaaacagacaggtttttaggctggatggtggatgaattcggtttgatgcccccttcaccaatagatagagcaatatacggtggacccctagtgtccagaataaattactgcatcctcaggggtttggaggtcagttctcaaaattgtgctgtgtccaactctaagcaatgaggagaaagtagatgtataggtatggatatttgaaaatgttcttgttgaattatctgactgagcacagagtttagaaaagaggccatgaaaacacaaccraaaaccttgcataattgccttctgtctaccgcagggtttctcagcctcagcactgttgacatattggactagataattcttcactgagagggcagttctgtgcaatgtaggatatttagtagcatccctagcctctgttcaccagatgccaatagcacttcagtcatcacaatcaaaattatcttcagatattgtcaaatgtcaccaggagtgactaaatcagcctctgtttagagccactgctctatcccaatcccccactccctgaacctctctggaatgcaggtcatggtaaaccccaatatctggccataatggggactgtgaaccaggtccaccatcactatcttcgtgtcttcctactaggtgtttcaaatcagctttctctcactcactcttgcctccctcttctctgctaacatttcaggtaaccaagttgtatttggaaagtggtgaaaggtacttggggtttgattagggggaggattgtaaaaccattacatgtttgactgaggaatgagattggctgtaagtatttgtgtcagtgactaggagagacacagctctgtaattgattatacttcaataccagatggaaaatatttaaacttatagaaaaaaaacaaaggttgccatgtttttcttttctttctttctttttttttttttttttttttgagacagagtcttactctgttgcccaggctggagtgcagtggcgagaccccggctcactgcaacctccgcctcccaggttcaagtgattctcctgcctcaacctcctgagtagctgggattacaggtgcccgccaccaggcctggctattttttatatttttagtagagacagggtttcaccatattggccaggctggtcttgaactcctgacttcatgatccacccacctcagcctctcaaartactgggattacaggagtgagccaccatgcccgaccatgtttttctttttcattagtttcaccattcttcaaccctggcttacccctaacatttgtggggcccagagcaagaatacaaatggagagccatacatcatatttaaaagttacatgtgtaactaacaaactgctaaataaaatgtgtttgatccttctactttgacaactatgccttratcacaaactggaaagccaggttcaaatatagacttctgggttctgcatcagaatatggtagtgtgtggagagttggcccttggcctttcaccaactctcccttctccttctatgcttggcctcttcctatgctatgtgggtcctctggattgatttgtgggcaccccaggctgcatggctgagctctctccacaacctctgcagaccctccctgcttggcccgccctcagaagtagggctgctctgagtgtgtggtccaccctggaaagacaggttgggagatgaagctctcccaggcctagcagcaagctcagagttgattgggcaggaaattctagagttctgggtaccctgattatgatcaaaagagtaggtgatgactctgggtgggtcttcccaccaagggtctccttgcctttatgagatagacacaaccaaagggggccagagttgggccatctaatgtgtgggacactatgaagatggttcttctgcaggtctccaggtgctcttcacacccaccctttcctgaagtcacattttcagctgagactgggaatagaaaagtgattgcttctaacctcagtgaaataaatcctcagtgagttaaaaaacggtggttcctctaaaaaaaaaaaattarggtaaaaaacagaacataaaaattatcatcttaaccttcttgtaagtgtgcaactcagtaatgttaagcatattcacattgttgtgaaccaaatctccagaactttgtcatcttgcaaaatggaaactctacacccattaaacaactcccgcggtcaggcatggtggctcacgcttgtaatcccaacactttggaaggccgaagttggaggattgcttgagcccaggagttgagacctatctggttatcatagtgagaacctgtctctacaaaaaaaaaattttaaaattagccaggtgtggtggcatgcttgtagtcccagctacttgggaggttgaggtgggagaactgcataagccccggaggtagaggctgcagtgagctactgcatgccagcctggtgacagagtgagacctgcctcaaacaaaaacaaaaacaactcccctcttcttctttcctccagctcctggtaactaccatccttcctccagcccgtggtaactaccattgcactctctgtttctatgaattcgactagaattcatagaaatttagatacctcatataagtggaatcatgtaatatttgcttttttgtgactggcttatttcacttagcctaatgtcctcaaggttcagccatgttatagcatgtgacaggatttccttccttttaaaggatgaatgatcttcccttgtatgtgtataccacattttatttacccattcatccatctatgcacatttgggttgcttccacctcttggctatttgaatagtgctgctgtgaacatgaggatacaaatatttcttcaagactctttcatttcctttgaatatacacccataagtaggattgctggatcatatggtagttccatttttaattcactgaggaacctccatactgttttccatagtggttgcaccttttacaatcccactaacagtgtacaagggttccaatttttatttttctacatcctcaccaacaccaacacttgttttttttcttttttttttctgtgtgtgtgtgtgtgtgtctctgtcacccaggctgaagtgcagtgacgcaatcatggctcactgcagcctcaaccttcccaggctcaggtgatcctcccacctcagcctgctgagtagctgggactacaggcatgcaccaccatgccagattaatttttatattttatgaagagatggggttttaccatgttgcccaggctggtctcaaactctgggcttaagcaatccacccaacttggctcatgctgggattacaggcgtgagccactgtgcccagccattttctgttttttaatagtggccatcctaatggatgggagatgatatctcattgtagttttgatttgcatttctcataattaatgatgctgagcatcttacatgcttttggccatttgtagatcatctcaagttatgtctattcaagtcctttgcctatttcttaattgggttaatttttttgtcattgagttgtaggagtttttatatattctggatattaaccccttatcagaaaatatgattttcaaatattttctctttctataggttgctttttcactgttgtgttctttgatgcacatatgtttgaagtagttgcaattttttttgcttttgttgcccatgttttagatgtcatgtctaataaatcatttccaactccaatatcataaagctttttcccttatattttttgtaagagtttaatagttttatgtcttacttttaggtgtttcatccattttgagttaaattttgtatgtggtgtaagataagggtccaacttcattcctttgcatgtggatatccagttttcccaacattatttgttgaagagactgtcctttcccccattgagtggtcctggtacccttgtcaaagattatttttaaaaatagggttttagctaatagtctatgtttagccttagatgtgaatttggctacattttgctgcgctttggagatttccttttgttttaaaatcagatataattgaagaaggctgcttcttttgagaatttccatagaaattgtgcccaacaataattaactggaagaaaacaagttgtccgatttttcccccagggtctctaatttaggtcttcattggaaatagtctaagatacatcagactgtattaggaatgtactagcagcagttctcaagtatggcttacaaaactgagggtccccaagacctttctagagaatccccaagttcaaaactgtgttcataatactaagacattctttgcctttttctctgtgttgacatttgaattgctggtacaaaagcagtagtggttaaaactgctgtaactttagactcgagacaatgacaactatgtccatagtcactgcactattcatcatcatgcacttgcagtaaaagcaatgctagcttcacctaagagtgttcttgatgaagctgtaaaagcgattattaaatcttggcccttgagtccccgtctttttagtattccattacaaaagaggaagtacacattaaagtacttctgctacatataccaatgtacaatggttgtcttaaggaaaagtacttgcacagtggtttgtgctacaagcaatactagccactattttttttcatggatcaccatgtctacttgaaagcatgagtgataaactatggttattcagatatgactattcggcagatatttttcaaaatggacaaagggaacctgataattcaaggaaaacagctgaaagtattcaytgccaatgataaatctaaggtttcaagcaaaatatttttggaaaatttttattcaccaccataagcttggcagattcccagtacttagaaaactttttgatgagactagtagtgatattaacacatgtgtgatgagactagtagtgatattaacacatgtgtgtgtttaaaaatcctgtaatgaaatatgtcaacacttggaagacttacaaactcagtgaactagtagtttctaattggccaatatacaatattgcaaaatcattcatgggtaaatgattcatccaaagcacagtgaactaatagtttctaattggccaatatgtaatattgcaaaatcattcatgggtaaatgattcatccaaagcacaatggatttttaatgtaacagagtatgagaagtgcattaatatggctkcccattccacagtccaacttaaacctttaagaaactgacacttgttgagttttggtgtagtatcagataagaatatccataattgtgcaaaaaggctatccaaatcctcttctcttttccagctacctacctatagttggacttcctttttatacttcagccaaaacaatgtattactacagattaaatgtagacatagatatgagaatccagctgtcttctattaagtcagatattaaaaagattgcaaatatgtaaaacaataccatacttccctacatttggggaggaaaatgcttatttttcactaaaaatgttatatatgttaacaggcaataggtttattaatgttagctttagatggattgataaacatttttaaaggttctcagtttaaatttctaatatgaaaagtaatgatagctataacccacaaaaatgaaagctcatggtggggggtactcaataattttttaagagcataacgggttctagagaccaaaaagtttgagaaatactgtgccagaaatactaaagaactgaaggcagttctttaactgtaacccgagattggtctaaaaggagaaaacttttcagataaaatagaaatcacaattaatcattagcaatcataacaatgttctttctagatggtgatggaaagtggggactggctggttggtggagaccttcaggtgctggagaaaataagatggaatgatgggctggaccaataccgtctgacacctctggagctcaaacagaaatgtaaagaaatgaatgctggtatgtaaactgttcttagtgcattttatttatttatttattgagatggtgtcttgttctgtcacccaggctggagtgcaatggcacgatctcagytcactgcaacctctgcctcccaggttcaagtaattctcctgcctcagcctcctgagtagcttggattacaggtgcccaccacyacgcccagctaatttttgtatttttagtagagacagggtttcaacatgttggtcaggctggtctcaaactcctgacctcaggtgatccccctaccttggccycccaaagtgctgggattacagatgtgagccactgcacccggcccctagtrcatttattaatattcccttaccaccctctgattaaagaattaaggataccaggagtcagcattttcttttttaagagacaggtctcaccctgtcacccaggctggagtgcagtggcatgaccatagctcactgcagcctcaacctcctgggctcaagtaattctccaaccttaacctcacaagtagctgggactacaaggcacatgccaccatactctgctaatttttatatttttttgtagaaatgggtctcactatgttttccaggctggtcttgaactcctgggctcaagcaatctccccgcctcagcctcccaaagtgctgggattacaggcatgagccaccatcatgcctggcttcagcatttttatagttaaaaataacctgaaaacatcttctattggtatgtctataatatggaaacagttttataaagttgtactatatattagaaccatatattagaacactattcaacagtttaaaatattcactgatagagatagctgaagtgtatttatgaagtgaaaaagcaaattgcagaacaatatgtagagcataatcatgttctggaaaacaaaataaaatatcatcataattctaaaatccctaacctacttctgtgcatagtggcagaaaagtctctggcagcacatgccccaaactgcagattacagtggctacctcttggggatggagtttggactaagagatttttactctttattgtatacattttgaaaaagagggagaaaaagtaataataggattggtgatttttatattctattttgggcttttctgtatttctcaagtttttcattataatattgaaagtattcattttcaatactatagacataaaaattatttcattatcagaaaaaaaaattaaggctctcaggagtccaccactaagtggagtagttttggagatttctttaaagcgaaagcaaaatttttttatatctttagattgttgccccttgcacaggccccagaaaacatttgttacaattattcacctccctctaggcttcctggtacaagaggactaattaacactggccctgcctgagccttggtgtacaggaaaggtcctggcaacaaatcttttcattcctgagttaggctgtccctaagcagcttcctgcctctgcatctcatccctgtctcagctatctggtgttggttagtgctggattaacacctctaaagacccaggtgtattctccagctgattatcagaagccagtggataggctgggtgcagtggcttacgcctgtaatcccaacactttgggaggctgaggcaggcggatcacttgaggtcaggrgttcgagaccagcctggccaacatggtgaaaccctgagtctactaaaaatacaaaaattagccgggtgtggtggcacacgcctgtaatcccagctactcaggaggctgaggcaggagaatcgcttgaatcctggaggcggaggttgcagtgacctgagatcgctgactgcactccagcctgggcaacagagtgagactctttcaaaaaaaaaaaaaaaaagccagtggataatgaatgcacagaacaataaacatagctgtgtcctttctgttcttgtggagaaatgacaccatgtgtttctgtgaccttccttcttctgctttcctctcccagatgcggtgtttgcattccagttgcgcaatcctgtccacaatggccatgccctgttgatgcaggacactcgccgcaggctcctagagaggggctacaagcacccggtcctcctactacaccctctgggcggctggaccaaggatgacgatgtgcctctagactggcggatgaagcagcacgyggctgtgctcgaggaaggggtcctggatcccaagtmaaccattgttgccatctttccgtctcccatgttatatgctggccccacagaggtgagcaattcccagagctgggctttgagactcaggaattcagactcagactttacatagaagagtaaatgagtctctgggatcctttctgtttcctcatgagcagattctggaatgttctggtgtctcttctttatctagcttaattatgtttccacttagtatttgaaaagtgctagaaggccaggcgcagtggctgtcacctgtaatcccagcactttgggaggccgaggtgggcagatcacaaggtcaggagttcgaggccacctgaccaacatgatgaaaccctgtctctactaaaaatacaaaaattagctgggcatggtggcatgcccctgtaatcccagctactcgggaagctgaggcaggagaatcgcttgaacctgggaggtggaggttgcagtgagccgagatcatgccactgcactccagcctgggcaacagagcgagacttggtctcaaaaaaaaaaagaaagatgctagaaacatcaaatcaaacctattatacattgcctttgagaatatggaagttggcaagtgaatgaggtggctaatgaaacttaactgggtgatagggcaagttgtatgtaacctaatattcaatttcagaagttccagttactctccatgccctgtgagcttcattaggaaaggatatctttaaaagataaatgtcacccttttatcataacacagtgagcttatcaaacagagattttctttgtcccactgcaccaccagtgtagtggatttgaacgagctggctgcaagtatgatgaatagaaagggtctcaaccctttggaatgccccaaactgagtttaatgaattaattctcttcaatcagataaaagttccaggcccctagctctcctttccatcctttgtattgctatctgagctttaaagagggtaagtgttatgttgaactgaaatcagcatttgyrtgtgaaaggtaattagctcattaatggcagtcagataatgagatactrgagttggtaatttcctttaaactgcaatttattgtgaatagggaggcactggaaagtaaaatccacatagttctgtrgaatagtaagatttgagtgttcttgtccggctagcctgtttggagaagagatgaggaaatacaaccttgagttatgagggaggaatcttatctttagagctcctatcctacctaatataacaaagcatgaagagtgcacggagtcttagaacctcagtgattttcttgcaattcttagttgactcacattgctgaattacttttaaagtagaataaaggtgtctccataaaccatgacctacagatttgacccacaatgaccagcatgtcccttatggacattttctaggtccagtggcactgcaggtcccggatgattgcgggtgccaatttctacattgtggggagggaccctgcaggaatgccccatcctgaaaccaagaaggatctgtatgaacccactcatgggggcaaggtcttgagcatggcccctggcctcacctctgtggaaatcattccattccgagtggctgcctacaacaaagccaaaaaagccatggacttctatgatccagcaaggtaggttttcagaggaaaattcttttatcaacatctgtataaaagaaatgatgaggcagaatttgggccctttgaaaaactctccagtgcattgccacatgctcccaagtggactgagtcccttgagagtcaagacgtggtcttataaattttatgtcccctaaaattgtactacagtcttctgcatatagtagatggtccataaatatttctctttcaacatgcattcttgagcatgcacagagtgcctggcacactaagtgaaaggaagcaacatagaaagagattgcaatgaatatttatggtgcacttgctcctcatgctgagggttcacagaagtaggcagagaaacagaagacagactctgggctcaagacacttcccaggaacagtataggcrcatggcaaatactaaatggatagctgccattatttcccttctcttctgcaagttcctgaagatttagaggactgcccacttttgaagatgcagcattttacagaaagaacatgggtctcaaaaaccataacctactccaggaatccttaaggcagatatcatttacctacactgagttctttgttgccaccctgtaacaggcacaatgagtttgacttcatctcaggaactcgaatgaggaagctcgcccgggaaggagagaatcccccagatggcttcatggcccccaaagcatggaaggtcctgacagattattacaggtccctggagaagaactaagcctttggstccagagtttctttctgaagtgctctttgattaccttttctatttttatgattagatgctttgtattaaattgcttctcaatgatgcattttaatcttttataatgaagtaaaagttgtgtctataattaaaaaaawatatatatatatacacacacacatatacatacaaagtcaaactgaagaccaaatcttagcaggtaaaagcaatattcttatacatttcataataaaattagctctatgtattttctactgcacctgagcaggcaggtcccagatttcttaaggctttgtttgaccatgtgtctagttacttgctgaaaagtgaatatattttccagcatgtcttgacaacctgtactcttccaatgtcatttatcagttgtaaaatatatcagattgtgtcctcttctgtacaattgaccaaaaaaaaaaaatttttttttctcactctaaaagaggtgtggctcacatcaagattcttcctgatattttacctcatgctgtacaaagccttaatgttgtaatcatatcttacgtgttgaagacctgactggagaaacaaaatgtgcaataacgtgaattttatcttagagatctgtgcagcctatttctgtcacaaaagttatattgtctaataagagaagtcttaatggcctctgtgaataatgtaactccagttacacggtgacttttaatagcatacagtgatttgatgaaaggacgtcaaacaatgtggcgatgtcgtggaaagttatctttcccgctctttgctgtggtcattgtgtcttgcagaaaggatggccctgatgcagcagcagcgccagctgtaataaaaaataattcacactatcagactagcaaggcactagaactggaraagaccacagaaaacaaagaatccaaccctttcatcttacaggtgaacaaactgtgatgatgcacatgtatgtgttttgtaagctgtgagcaccgtaacaaaatgtaaatttgccattattaggaagtgctggtggcagtgaagaagcacccaggccacttgactcccagtctggtgccctgtctacaccagacaacacaggagctgggtcagattcccctcagctgcttaacaaagttcctcgaacagaaagtgcttacaaagctgccttctcggatactgaaaggtcgagttttctgaactgcactgattttattgcagttgaaaaaaaaaaaaagctattccaaagatttcaagctgttctgagacatcttctgatggctttacttcctgagaggcaatgtttttactttatgcataattcattgttgccaaggaataaagtgaagaaacagcaccttttaatatataggtctctctggaagagacctaaattagaaagagaaaactgtgacaattttcatattctcattcttaaaaaacactaatcttaactaacaaaagttcttttgagaataagttacacacaatggccacagcagtttgtctttaatagtatagtgcctatactcatgtaatcggttactcactactgcctttaaaaaaaaaaamcagcatatttattgaaaacatgagacaggattatagtgccttaaccgatatattttgtgacttaaaaaatacatttaaaactgctcttctgctctagtaccatgcttagtgcaaatgattatttctatgtacaactgatgcttgttcttattttaataaatttatcagagtgaaggctgagttttttctgcctgtaccattgggtgtgggttgaccacacaacttaagggctttgtgactttgtataattggagtgagacagcagcaactctcttgaacatcataactgagattatttacccttattcatgtcttttttattttttatttttttaaagacgaagtcttgctctgtcacccaggctggagcgctgtggcacgatctcggctcactgcaacctccacctcctggattcaagtgattcgcctgcctcagcctcctgagtggctgggattacaggcatgcaccagcacgcaaggctaatttttgtatttttagtagagatggggtttcaccatgttggccaggctgttcttgaactcctgaccttgtgatccacctgcctcggcctcccaaagtgctaggattacaagctcactgcaccctgccttttttcttgtttttcttttttttttttttttgcctgcagtggtgcaatcttggctcactgcaacctctgcctcctgggttcaagcaagagtagctgggattcattactgggtacatacccaaagaaatataaatcattctgctataatgacacatgtacacgtttattgcagcactgtttacaatagcaaagacatggaaccaacccaaatgcccatcaatgatagactggataaagaaaatgtagtacatatgcaccatggaatactatgcagccacaaaaaggaatgagatcatgtcctttccagggacgtggatgaagctggaagccatcaccttcaaaaaactaacataggaacagaaaaccaaacactgcatattctcactcgtaagtgggaggtgaacaataagaacacatggacacacagagaagaacatcacacaccggggcctgttgcggggtggtgaggggagggaacatagaggacagatcaataggtacagcaaaccacaatggcacacatatacctatgaaacaaacctgcatgtcctgcacatgtatccattttttttttagaagaatttttttttaagagtagctgggattacaggtgtgcgccaccacacctggctaatttttgttgtttttttctttcggcagagacggggtttcgccatgtggtctagtctggtcttgaactcctgagctcaagcaatctgcccgcctcagcctcccaaagtgctgggattacagatgtgagccaccatgcccagcctattcttgtcatattctaaattgtgctctagatgtgtaagatacatggtctcagccaagcacttaatgacatttttggtagttgctgggttgtccagcggcctccttagcccagaacttcatcgcaggtgtttgttttttgtttttttttttttttttgagatgaagctactttgttccctttacttcaaaggcacagatcttattctctaagtgcccctaaggagtttcaccagtagggctggaagcagttgggtttttctctcagcaacccctgtacctctaatgcagaaagggttacctgttcccaccaaaactttcagcagccttcaggcctgcagcttttttccgtgagtccctccttcccttctatcctgaaggcttcatgcatttttttgctgctgatcctcaccccaaatacaactgatgtaaatagccaattcaaagctgccatttgtagtccccttttttctccccatgttacttggtggctcctagtgccaattagtacggcaaagtggcgggatatgtctacgtaaacacatgaagatgtcagtgttgctgaaggagtatgccaaactgtttcaggatatttttcagaaaagactctgaaaggcatatgttatcatttagtcagatggtggcaaacccttattaaatgtatcaacacttttatcaggtcacaatattttcccaatcatcttccctgcaagaagaaacaaatctcgattacttgggaacagcaattcattttctccttatcctcctttttttctattatgtgactttcaggtctaccactgatctgcaacataactttccttataggcaggaaaccagcaaactgggtaggcaccaggtcagtcaattgttcttatgtctaaaggtttgatggaatgaggggaagccacaatatgccacctcagaatatacttctttggcatatttcaagttgattattctgagaactgcaggcaggaatagctctgaaaagctgtccatttctaaaggaaatttacatctatccaccttactaaacagaggatgcaagcagaggtttctctctgaagcccctttatctgcctaaagaaagataaagctctgacacctccctaaaacagagactaccacaggcagtcacctattcttctgatagctgttgcctaagagatttcatttgcacaagacagcctttgcttaccatgcaaagttgctcaccatccatctaggcagagtggggcaagccaagcagcattcatcaagtggaagtggagcttatgggatctgaagcagcagtccctaaaggcccgtccacacaaactacatacgtaagttgctcatacttccagcatgtccacttgttataatattgcccttcatttagtatatacccaacacccaacatatttcaatgtcagggcttcaagtaaccacctggtcatttgtcagattttgtttgtctaacagtctttcccacaatttcctttgaataaattacctctcctttcacatttagtcttgatgaatcagtaaacccagctgctttgcctcaaatcatttaagccgaagtagttcctgtagagtcctctcaaagctccaagactgccaggggtgatttctgacctaggtttgcacactcacgtccaggcatttaaatcttgaatgggcattttaagcagctggagttaatttaatccatgatgaataaaagcaagattattgagcaatttctgcttaaaaaaatcttcgggagctaagtttctatcctgagtctggttctttagcttccgtttgatcttatatccttcaaataaattctttattgcttaggttagctagagttggttgctacaaacagaatcctaactggtattctttgtaagtctatgactatggcctaacagatgaccctcatctcccttagacatgactgcaagtgattttgttttactggatatagccaatcccctatttgagttatcttggccattctttgaatttctggaaactgtgtattttcagaacagtgagatatacaccactgtgttctagtttcagttccaaatttgcatgtcagtaacttatttcaatgttttggctttagggttttttttttttttttttgtagagacagggtctcactatgtcacccagtctggagtgcaatggcacaatatcagttcactgcaattttcacctcctaggctcaagtgatcctccccagcagctgggactacaggtgcacttggctttagttttacaactgaattgtcatggtttacaaacctgtgtccctgatgcatcccacacccaatactaacattcactgttacctattttaaaagcacaaaagctagtatttgaaagtattctcatgcaggtttatgactgtaaatattagacgattacaaaaatataatcccacttcagtgttttagtaatgagacccttatcggccattaataaatagtataaattttacaccagggtaactgggatgttttctgtttcttctcacattgctaagtggttttaggtttgatatcatctgcacacagcatctgtgtcatatatgacaatcacattttagtcaattatgttagaagctcatatttaataaggttcaagttctcctcaatatgattttcattaacatcatgatttaggcagaatgttttcctatacatgtaaataaagagaactttagctttaaaaaaaagattagagaactctatctttgataactaaatctataacaaatttaataatgaaggctctgaaagatttctgtcagctctagatggaattattctatgacttcatttgaagcacccagttggtgctggagtttcagccatgcactatatatattcagcatatcagaattctgttcaatattctgattttaagagaagctaaaaagaaacataaaatatacatcatccaatttattttctttatccagaagaaatctgttaacattttcccaaaataacaattcaagtaaaaaattcctaccaacgagatgatgttgccaccatttttacacaagcacactcacggcttgagacatcctcatctagcattaaacctgtaagttacagctactaaataatgttaagctattatgatgcatacagaatagagtaccccaacccagctcttaatgaatgctgggtttacctgcaggtagggggttggctgagattaaaaggagaaacatagtaaaggagatactaaattgattcaaatacttcatttctaaactctacataaaaaggcctgagaatagcttgagacacatcagacttatcaaaagtcttccagcaatgatgcttttagagaaacatggcataaatgatcctttcagtctcaatccctggagtacaggcctagggattatggaactggtttaagcatggagaatgcttaaagaatgagcctggtcaacaggaaatgtacatcagtgtgcaaaagtgacaatattaatacgacagctaacatttgagcagtaattctgtgccaggcactatgctgagggccttacatgcattattttattatccaaccctttaagatgagtgccactgttgccccattttacagatgagaaactgggctcacagacacacagttaatggggagcctgagtttaaattcaggaagcctgattctagatccagtactctgaagtattacccaaaatgaattatcttagaatctagaattcaactatatgtgaaatgcatgtctaaaacagaaggatagatgttacataacactaaaagttatttaaaaatcaggaaaatagtttcctgaattactttatggtcttaacatgcctagatgagtcatagttgctgggattagtatacttctctaacttcatttgatgattaaaaccacgaagaaattgaataaccactcctactggatattgtgaatttaagagaagacaaaaagaaaggacatgtggaggtatacattactccttattttcgattaatatgtcaccagattaaaattaaattactgaaattcatattaaaacagaaatgactagatactaggatatgtgctatagaagtgtgaaaactccatagcaagataaagtctaaacacaagttttataaaccaaaaaaaatcccagaaaacttaaaattaccgaaaaagaccaaagattaagtggagaacaaccaataaagagggacccctttattacacatttataaaataatagaatatagttattaaaaatgggacactttttttcatttttggtatcttgtattcagtttttccatcctcttcacaatcttccataacttgctttttgttatccattgttcacctgaaacttccaccccaccattcaaagtacaactgaagaataaacgatctaacagattcttgtgagacacattatcagataaattaatccagtaacacatgaataaagatttagagtttttaaagaaatacagtaaaagcaaaaacatatgaagcataatttaatctgatgattcagaaggcacctcaagattgtgttgtgccgttttcctcatgctgcgtggttaggtgcctataacagaattctggttagtaaaattttgaaaaaaattcacatataattcacattaaacgactacagatagatacaatatgggcattttgatgtgtacatttgtacctgacttagggcacaatttataataatatactaagaaaactaaaattaattataaaatgagtatttttagcacacttagtaacagctatttgttttaa

SEQ ID NO: 95130 - DNA, 101128 bp, Homo sapiens
caaagagaaaaaagaatgatgtaaaatttcccattgtaaaaaatgcttgttcgtttttttaatgttttgatgggcaatggcaacaaattactatggtatttatgaatattggatacacttaagaattctactttaaatgttacataggccaggcatggtggctcacgcctgtactcccaacactttgggaggccgaggcgggtggatcacctgaggtcaggagttcgagaccagcctggccaacatggtgaaaacccgtctctactaaaaatacaggtgaaaccctgtctctactaaaaatacaaaaaaaaaaaaaattagcagggcgtggtggcgggtgtttgtaatcctagctactcgggagactgaggcaggagagaatcgcatgaacccgggaggtggaggttgcagtgagccaagattgcgccatcgtactccagcctgggcaacaagagcaaaaactctgtctccaaaaaaaaaaaaaaaaaagttacataactaggaaattacttcctttccacctacttaaacttagaataaaaaagttcaattctaactctaccatgtgtatagaggaaaagtttttccaaattgtttgtgggataagctaacaaaaaagtttaaagacccctactctagcaaaactttcatatattgaaagcagaaacatatagggaaattcatggaaatattatttaaaacagcaaaaaattagaatctaaatgttccatatagataaatcaaatgtgatattttcatatgataaaacattatacagcaggttaaacaaataaattagatcaacttatcaacatggaaattttgcaagctttatcagatactagttaaatctgattctcagaattacattgggctcatccttctttcatttcccattcctctcatgacagagaaacccatccaaaaagtacaataggtgtgacattgcccaaactttggccctgaagcagagaaccctgagtgggtatgtaacatcatcatatcgcagttctaatcatgaaggctccatagttatgtaaggtattttaatgactacacttgctgggagtggaagggagattaaacagctcaaataaccaattaggaggaaaaggattccctcattatctagtcttgcgtgacataatgacgtttctgtcaacaacagcccgcatataccaaggcagtcccatgattataatggagctgaaaaattcctatcgccttgtgaacctagccatcctaacgtcatggagtaatgcattactcacagtttgcggtgatgctggtgcaagcaaacttactgcactaccagtcatataaaagtatagcacattcaattatgtacactatgtaatacttgataatgataataaacaactgttaccactttatgtatttactataccatacttttaattgttattttagagtgtactccttctacttatttttttttagttaactgtaaaacagcctcaggcaggttcttcaggaggtattccagaaaacagcttcaatatcacagcagacgacagctccgtgtatgttactaactctgaagagcttccagtggacaaaatgtggatgtggaagacaccgatactgatgatcctcaccatgtgtaggcctgtgcttacatgggtgtttgtgtcttagtttttaacaaaataagtttaaaaaattttaagaaattaatttaaaaatagaaaaaagcttataggatataaagaaaatattgttgatatgtaatcataatttattattatttacaactttatgttatttaatagcttattattgaagaaattttttcataaattgtagcctagtgtgcagtgtttatgcagtttacagtagtgtacaataatgtcctaggctttcacagtgactcaccactcactcattgactcacccagagcaacttccagtcctgcaagctccattcatggtaaatgccttatacaggtataccatttatcttttataccatatttttactgtaccttttctatatttaggtatgtttagatacacaaatactgaccattatgttacacttgcctacagtactcagtatagtaacatgctgtacatgtttgtagcctagaagcaacaggctataccacatagcttaggtgtgtagtgggctacaccatctaggtttgtgcaagtacactttatcatgtttgcacaaagacaaaattgtctatggattcgtttatcagaacaaatccctgttatgtgacacatggctatatttggaacctctacttgcctggaaagaggaagtaaggtacatatttacttacatatgaatgatggataaaagaaatattagtgactttgcaaatatccaatggtgagataagcaaaaatgactcttagcaagaaattaattctatactaataaaatcagttgtggagttattttctgtaggaaagcaaaatccataacataatgccagtagtaacaattaaattgtttgcttattcatatgaattctattctactctgttttgggaaatctgcttaaacatttgagtattattttattgtattttctttttttaaaaattaaaggtcgctcactagtccggtttccattagcggccataaccaagggagaggaaccagctggcatgggaaggggccatcttcacaacattccatttatacacagaactaaacagacaggcacagagtcactgttgtggttagaagttgtagcatgggaaggtggaggaacaggtggagagtggggttgtttttaaaatatatatataggccttccccaactggggttcctgggagaacttggtctgcttcaacccaagaggaatcagaagatccaagcagtttgggaaggccagaactgtcagggatggagagaggaggaaaatccagggagttggggggctgtttggcaattggggtgaagggagtgccttccctctgctgggattcccccaggccctccagtctggcaggaagggggcagcctgcaatccctgagggcaggtctgggactagtagattctccaggaagggcgctggaggggatcacaaagtttgccctccaagaagacgacagtgctgacccctagctgcttcttgatgacgtctttggagctggcatagatcattttgctcttaatggatgcagactcagaggcccagaagataaacaccaggtccttcttcttgctgtccttggtggcgtcataaggggcgtagcggcagtccttactgtcagcatcttgacaaaagtggcatagggatcatcaatggtttggtccacattacttaccaggatcttcttggcctccgcaaggatgatgtacttcttgtactcactcaggcagaagagcagcaacttcttgcgcttcttcaccttttctagtgttgaagacttgcacactttcatgtcactgaacaccttgatgacatcatcaaagacagccacatgggagcccatgtttccagaagtgaaaaggagatggcaaggagagccgctgcagctgctgccaggatctgactagacatttgaatattttgagaatgaagtcttattttctcactgaccccattaaaaaatcagtaataacataaaatgaggctgtaataagaacaataatgataataactatatttattattactaacatttgttgataacacttaatggagtcattaaagggtatgtatggtcttatgaagccctctggcatgtttgcattttctccccaggtctctgcaaatatgtttctataaaggacagtgtggggtaagcactgtcacacaagtaataatgaatatttattgattgcatactactactaaatgacctacaggcatgatccacttaaatacctctcatatatctcttaaaatttgctgctacactgcttccctaccaaaagtactaaagctatccttctcctatagcagctgaggctttattataatttctgcaattttctaccttcaggaggagttttctccctaaggtttccagtattctgaaagtactttcctagcagactcctcccattgctcactagacatgcctagacaagttctaacctcaattgtgaatgcagcctttatgtgagtactctaccagaggagggagaaagggagaaaagaaatgttatcacaatgattgtattcattaaccttcataatatatatgtgaaaggaggatgtagtggaataagggttgtggccatgcacataacattaaactggattgccatctgttcataaagatttctaatttcttgctacatttatttttatttactttttattatttttttaagagatggggtctcactatgttgcccaggctggtcttgaactcctgggctcaagtgatcctcccatctcagcctcccaaagtgctgggattacaggtgtgagctactgcagtggcatcttgctacatttaatacttcacattactccattcttttctttggagcagactgaagcattcctttttttcttctttttctttttcttttttttttttttttgagacagagtctcactctattgcctaggatggagtgcagtggcacgatcacagctcactgcagcctcgacctcccaggctcaagtgattctcccaactctcagcctcccaagtagctggaactacaggcatgcgccacaaagcccacctaattttggtattttctgtaaagagagggttttgtcatgttgtgcaggctggtcttgaacttgggctccagtgatcctcctgtgtcagccttccaaggtgctgggattacaggcatgcacccckggcctctgaagcattccttgagtcagatatgcttggtgttgtttactcaacctgagtcaccttttgcttccctgttcaccattacctactgccttaccctgaaaggggaggtacttactatatatactcagatcataaattcctcaggaagctatcatgaggttaaaagtacagtttctggaaccagattgtttgttttcaaattttgctctgccacttaccagttgtgagatctttggcaagttacttaatctctatgtacccatgtcctcatccgtaaaatggggatgataacagtagccacctcattgggtttttaatttttttttttttttttttagatagagtctcactctgttgctcaggctggagtgtggtggcacgatctcggcacactgcaacatccacctaccaggttcaagtgattttcctgtctcagcctcttgagtagctaggattacaggcacctgccaccatgcttggttaatttttgtatttttagtagagatgaggtttcaccatgttggccagggtgatctcgaactcctgacctcaagtgatctgcctgcttcagcctcccaaagttgctgggattacaggtatgagccaccgcacccggcctatcagtgggtttttataaggactgagtgagggagtgtgtktgtgtgtgtgtgtgtgtgtgtgtgtgtgtgtgtgtgtgtaaaatcacttaggacaagcctggcacgcagaaagcactatgtaagtgttagctgttattattattgagtgcaggtactctatctaactcaattgtactctctttgctgccctctctgacacctggcatattgtttgatacatgataagctttcagtaaaggctgatgagcgatgaacagctattaacaaaagataggagataagaaaataaacattttcttagtcctttgagatgtcccaataaaacggtacttttgaaataactgtatatcttttattaattataattttatgtcatgccaatgttttggttaagagtctaagaaggctgcatttgcctctgaatcactctatggtcaaggccttgtattgtgagaacagcccaatcatattgacctggcacatgcttctctgaagtcacatgtccagcattgtgacatgagcaagaatgcaggcaacctcttgattccactcattcaaagttctctgtggggactaggttcagaagatgtcatctcccccatagactagcttcccagagaatgtcacctgcaaactagaatgatgctagtctcagcttaactgtgcaaagagaaaaccagaacgcgctccccaggaacaaggttcattcacagttgtcagaaggtacattaacacttagaatcaaaacttcatataggctctagtgtaaagcttgacaactcctaactacatcttagctttcactacagtggaagcagtcctgcttccactgaagtttcttagagattaaaaaaaaaaattactaggtaaatctttgtacctttgtacttctcatgctagcagtttttttacgtatcagagagatgctcagttaagtactcataagctccgtgactaaaagactacatactttttcaattataaacaaacatacaaatacaacttatcagctggatataatatagccctgagataaaaatatcatcatatattactttacattatcatgtcatgttatgttctttctacgctttggtatgggacattatgtatgttctttctacactttggtatgggacactatctggaaagaccttaatcactatttatattttatgttttccaaagggaacatcaacagaggaaatgtcaaacttaagaaatattctgttccctgaaggggtgaaaaaagggctatgaggcctagttaattacaaatcaaacatagtaatatacctgtttcctcagttgcagtagaaataaccaaaattccctcaaatgtgcactcctaattttgttcaagaaactaacgtttctctttcaaacaagttctgatgaaattatcattttcttttttctttttcagagatagggtctcactctgtcacctaggctggagtgcaatggcgcaatcatggctcactgcagcctcaacctcctgggctcaagtgatcctcccacctcagccttcaagtagctaggactacaggggcacaccacaacacccggctaattttttacttttatttttagagacagggtctcactatgttgcccaggctcatctcaaacctttggtttcaagcaatcttcccgccttgtcatcacgaagtgttgggattataggcatgagccactgcatccagcctgaaattatcattttctaatatttctcttttaattttctctaagatggaagtagccaaatcacaattaaggtttaatttcacagagtatcctgattaactctggaacaatgtaacattttagtaaaattatagtgtgggagagaaaaactacagtatttttattctagaattgaggtcagtaataatctttttattcctaaatgactcaaacagagttaattcatgtctctggccaccactggcagggctaaagcctggccatgaagtgaaggacaatatggaaaggtggaacaggaataggaaggcagcatacaaggaaaagatgagaggtgttgacagatttttaaagaggataaagatcagcagctttttacaatcccattacttctttaaatctactaattcatccaggttcacagatataaaaactgtgaggaagagaaaaagaagagggaatggatgagatggagaagattactgggggcggcgggggggaagaaagaaagaagcccatttggtggaaagcaatagagcataacatgaaattgccttaggtacaaagctcactgatctattctagagtcttcgtcccacttgagacaakagcctagttctagtccagttccactccaattataaggacttgtccttctcttgatggtcaagaattactcatgttctgtttactattagataaaaatttatttaaaactactatctgcagaagacaagcaaattgctttatcttccttctactcatttatattattcaatacgatcctcgtttcttatagtttaacaggatgtatgtgaaagaaatggactgttggctcctaaccataagttctctttgaggcaagcttctcagagataaaaataaaaataattggcccaaacaggacctaggtcacctagccttgagattatttacagagaaacatcaggcaaatttagtcaaggtgactgaagaccaaacaattaagcaataaattaattcaaaaaagacataccaaaatatatatatttgaagtgttacaactacatggcacaaaattattggatctctaaagctatccatctagtgttgggggatttgtttctatttctgtctagaaattcagctaagtataatttgttataaatcttgcagaaaacatgtacaggtagaattataaagaaaagtagtgactgaattgggaagaatgaggcaatatgtagtgccaagaattttttcatgaatatgttggcaattgtatttgtctgctcaaggtgccaaaacaaaataccatagactgaatggcgaaaacagcagaaatctactttctcacagtttgagaggctgggaagtcccgaatcaaggtgccagctgatttaactcctggtgaggcctctctttctggcttgcagacagctgccttcttgctatgtcctcacaaaaaggagagagagagagagagagagagaatatgaatgagctctttggtgtctcctcttacaagggcactaatcccatcatgatgccccactctcatgacctcatctaatcctaattacctctcaaaggcctcattgctaaataccattactttcagggttagagcttcaacttgtgcattttgaggatacaaaaacattcaatccataacagccatttaaaaacaatgttccattccagctctaggtaagatggagtaagcacactccaccttgtctttttttttttttttttttttttttttgagatagagtctcactctgtcacccaggttggactgcagtggcacaatctgaggctacaggtgtgcaccaccacgcccagctaattgttgtatttttagtcgagactgggtttcaacatgttggccaggctggtcttgaactcctgacctcaggtgatccgaccacctcggccttctaaactgttgggattaagggcgtgagccaccgcgcccagcccaccctgtctttttcattaaatatagttataaaacctagatagaatgcatgaaacagctacttggggacactgaaagataaaaagtaccaagtgaattggggaaaaagactagaatttaaagtactactgaacaagcagtgagttttctgtttttgttttttccctatcagaacctcagtctagaaataaggcagtctgaaactcagaatacgcacagacagacagagccccaggagaagccctctagttctggctcaaggagcaggaaaagcatctcctaatactcagagagtgtgggagaaatctgccaatttcttctcttttgttctccattctctagtgccccaggcwcctagaaatcctgccaaccaagcagtggtaatgactgcaatgtcagcaggtggtgacaagctccaatatctctgagggaggggaaccttcttccatggagaagttggggcctcaggagggtgggataaacaccagttgattttttcttctctgtccttccactgctgagccctggacatagtgtagccccagaaagtacataccacagcagggtaactaaagcactagatttctggctgtgggactgaaagaggaagtcccaggaataagaaagtactagagaccatgaagagggaggaactcagagaagtagtagttaagttgattataacctcctagactcaccttcaagttgcacaaggatggatctgatcacaaacagcatatgtaccaaaaagactttgagactgaactaaaggagagtctaccacacaagtccaccaccctaccactactgactggtagtacacatagaggatagatccaaatagcatggaaagcaaaatattctttttgaaaacagaattgacattgaaactacaactgacagaaggttggctggaacttttgacttgaaccaaaacagatctattacccaccaaaacaaaaatatcagtattctccatatgatttaaacaaaacccagagtcttataatatattaaatgtctgggatacaattcaaaactagtcagcatacaagaaccaggaaaatctcagctcacctaggaaaagacaatagaggacaatgccaggatgctatagatgctggaattagctgactatagctttaaaacagttattagaaaagtgtaccagaacgtaagattaaaaagttcctgaaagaaatgcaaaaaataataaaaaaatgaaattgaaattcagaactaaaaaatataataacaaaaataaagaactaattgtataggttcaattacagaatggagatgagagaggaaacagtcagtgaatttgaagatgaggcaacagaaattatccaatgtgaacaatggagagaaaaagtattgggggaaaaaagctgtgcctgagggactggtgggacaccaccaaaatatctaacatttatgatatcggagatccagaagaagaaaggaaagaatacaacgtagtaccaaatatttgaaagaataactaaaaatttcttaaatttggtaaaaaacataaacttacagattcaagaaactcagacaccaaacagggtataaccaaagaaactcatgcccaaacacatcataatcaaactgctaaaaactgaaacaagaaaaattcttgaaaactggtagaaaaaaatgatacattatttacaggggaaaaacagtgtgaatgactgcagatttctcatcagaaaycacggaggctagaatgaagtagaacaacttaaagggctaaaagtaaaaacctgtcaacccagaattctatatttagcacaaatatccttcatgattaaatttgaaataaacacattcttgggggaggaaaacaaagataatttgttgtcagcataccttggtctaaagaattactaatggaagttcttcagacagacggaaatgacatcataaggtaacctgaaacatcaagaataaaggaggagccaggcatggtggtagtcttagcgactcggaagctgaggtgggaggatcacttttagcccaggagtttgaggttacagtgggctatgattgtgccactgctctccagccttggtgacagagcaagaccccgactccaagaaaacaaaacaaaacaaaacaaaaacaaggaataaagaaggaaaaacagaaatggtaaatatctaggtaaataaacaattcacctcttaagttccttaaaatttgtttcatgtttgaaagcaaaactgataacattaatggggttttcagtgtatgtaaatgcaatacataagacaactgcaacataaagagggaaggtaataggatctaaatgattataacatttctatatcccccttgaagtgataaaatattgattctaagtaggttgtgtaaaattaaatatttatattttgatcccaatcattaaaaacttttttaacaaggacacatagtcaaaaactaacaaaaatatggaattttaaaaaatatacaaatgccccaaaagaaggtagaaaagagaaaacagatacatgaaagaaaataaaggaaacaaatagaaaacaaataaataaaatggtaggcctaaatctgaatatatcaattattacattaaatggaaaaacacctaaatatgcccactgaacaggttggtaaaatgtacgcaaaaacatgactgagctacgtatgtgttgtaaaaaagaactcaattcaaaatacatttatataggtatgttaaaaatagaaaaatatatgccatgtgaacactaaccaaaaggaagcgagaatagttatrttactatcagacaaagtagacttcagagcaaagaaaattactggagataaagaagggcattataaaatgtgtgaatcataacctgatagaattgaaaagagaaacagacaaatctacaattatatttggaaacatcaatactcctctctcagtgatggatggaagtagtaaacagaaaatcagcaaaaatatagaaaaattgaaccataccatcaacccaamcgtacctaataggtatttataaaatactccacccaacaatagcagaatacatactctttaaaatgtacatggcacagcacattcatcaaaacataatccagcctaaaaaaagaattgaaatcatataaaatatgctctctaatcataatagaataaacttagaaataaataaaagtaaaatctccaaacatttataaacattatacttctaagtaatccatgggtcaaagaggaagccaaaaggaaaaaatattttgaactgaatgaaaatgaaaacacaacatatgaaaatttgtggaataggattcagctaaagcaatccttagagggaaatttatatttataacatgaaatattgacattaaaaaagaagaaagttctcacgtcactgatctttaagaagctaaaaagttaataayaataaaataaacccaaatcaagcagaaggaagaaaatttttaaaagctaggagcagaaatgaatgaaattgaaaacagaaatcaatagagaaaaattaatgaaacaaaaaactggttctttaagaccaatgaaattcacaaatctcttgcaagattacgaagaaaagacacaatttaccatatcaggaatgaaagagaagatatcactacaaatgcaatggtattctaaaaataaggaaatactacgaacaactcaacacacataaatatgacaacctatgtgaaatagactaattcctcaaaaccaaaccatcaaaactcacataagcaaatttaaataacctgaagaatcctatacctgtaaagaaattaaattcatagtttaaaacctctcaaaaaattttccaagcccagatggttacactgtcaaattctatcaatcattttaaggtgaattaataccaattctacacaaattctttccagaaaatagaagaggagagaacatttaccaatttatttttataaaatcagcattattgataccaaagccagacaaagacaggacaagaaaaaaccatacaatatctgccttggaccttgacacaaaaatcttcaacaaaatattaacaaattgaatccatcagtatataaaaatattatacaccatgccaaaatgaggtttatcttgaaaatgcaaagctggatcaatattcaaaagatcaatcaatgtaatccaccatattactacagtaaagaggaaaagctacatgaccataccacttgatacagaaaaagcatttaacaggctgggtttggtggctcatgcttgtaatcccagcactttgggaggctaaggcaggcagatcacctgaggtcaggagttcgagagcagcctggcaaacatggtgaaaccctatctctacaaaaattagccgggtgtggtggcacatgmctgtagtcccagctactcagaaggatgaagcagaattgcttgaacctaggaggcggaggtggcagtgagctgagatcatgccactgcactccagcctgggctacagagcaagactctatcaaaaaaaaaaaaaaaaaaaaggaaagaaagaaagagagagagaaagaacatttgacagacttcaacatccattcagattaaaaaaaaaaaattctcagcagacgagggtagaaggggatttcacaacctcataaaggtcatgtacaaaaagccaacatctaatatattatgtggtgaaagactgaattctacccattaaggtcaggaacaaggtaagaatgtcttcactcaccattgctatttgacattatattggaatttcattcagtgtaataaggcaagaagataaaagacatacagatagggaaagaagaaataaaaatgtctctatttgcagatgacatgattgtttacataggaaaccaaataagtgatttaaaaaaaacctcctagaactgactttagtaaggtcagaggacaaaaggtaaacacacattcaaaattttacatccatataccagcaatgaacaactggaaactaatattttttaaacaataccatttacaatagctccaaaaatactgaaatactaaggtacgaatttaacaaaacatgaatagaatatgtatgctgaaaactacaaaacattaatgaaagcaatcaaagaagatctaactataaataatggagagatatactatgttcagaactggaagaataccaggtactcaggagtctgagggaggagaagtgcttgagcccaggagctctggrctgtagttcactatgcagcttgggtgttggcactaagtttggcatcaatatggtgacctcctaggggtggggtactccaggttgtctaaggaggggtggaccagcccaggtagaaaagggagcaggtcacaattcccatgctgatagtagcacaatcatgcctgtgaatagccactgcattctagcctgggtaacatagcaagactctcatctctggaaagaaagaaaactgaagactcaacccatgacactatagtttaattcaattccactaaatatctcaacagaactcacaaaacaaatttgtaaaatatagcaagctgatcttaaaattaatacaattttaaattgtattttaaattttatataaattatgatttaaaatttttaaatatagcaagtttattctaaaatatagaaatttaaaatcattagaaaagtcaaaataagtttgaaaaagaaaaataaggttgaagaatcaaactacctgattttaggttgtactataaagctagattaatcaacataatctagtattggtgaaagggtagacacttaagatcagtggaacagaataaacagcccagaaacagtcccacacaaacacggcccactgcagccatatttttttttttttctgagataggatctcactctgttgcccaggctggagtgcaatggtacagttatggcccactgcagcctcaaactcgtgggctcaagtgatcatcccacctcagcttcccaagtagctgggactacatgcatgggtcaccataccctgataattcttttttaattttttgtagagatgggggtcttgttatgttgcctggtgtgggggtgctgaagcaggaggatcacttgagcctaggaggtggaggctgcagtggtcattgtcactctactccagcctgggtgagagagcaagaccctgtcaaaaaaaaaaaaaaaaaaagccataacaatctatgtaacagaaaaatttgggaacagagcataatgagtacgaatacaggttctagaattagatagcccaggtacaatcctggctttaggacttactatttgaccttgaatgagttacttaacttctctgtgcctcagtttccttatctgagaataattatagtacttactacaggtttatgagaattacatgagttgatatatgcaaagcacctagaacagtagctggtatatattaaatactatataaagtgtttgttaaataaaatgcaccaggttcttaaccacttgtcagtcacagtaacttatgggtatgccatacgacattataactgattaaatagccaaattatatttgttrtatcatagggaatttaacatttattgataaatatgatacaagttaaattgtaaggccctgcacttgagtctctccctcaaaattgtgactggtacagcatggaggacccaaactcyagtgaagaataggctttatgaacaacaaattcagtaggtatcaaaagggtggttactagcaaaaggaagatagtttgatcctaaattgtgatgagaaatctatagtatctacactggtcacaccactcttgaagcatatattccattctagtttcacacttaatttagttacgtagacttaatctgtgcagcctcactggcaagaatgagaatcgtggataaaagttctaggggaaaatatttaggctcagtaaagggaagacgtaacactgaagggttctctgaacatgggatgacaactgaagcagttagtgaatcctatgtcaccagaatgtttaaataagttcaatgaccacttggtgagataattatgatgacaacaaacacagtcatttctaaaatgtttatggtgtctgtcctagttcctttacgtagcttatctccaatcctctccccaactctataatgtagacactatcccttttttatacatgagaaaaccaaggctcagagaggttaaataaatcacccgaaatgtgctgtcattaagtggtaaagctgtgatttgatccaggacatctaattccacagcaaacattctttctaatccaaactgcctttggtcaaagactcaataacattcagtattccttttaatcctgagagtctgtgatttattgaaattatatctttctaaatatagatatagatcttccctagccatttctatgcactggaacaggtgtctttctcaagaaaaaagaggcatcattcttaaatttgaagttggtttgttacttctatgagggaagtgttacaagccaacacactatttactrtgttaatagacaatggaattaacaataaattggattatgctgaataggtaaggagtttcttactcctgaatttactttctagagagtggtatttaaaaaagaggtaaaatgttattattcttgataaaagtagtaaatgaaaacacaaatagagataaatmtatgtccttactgctctactctccccttagctaattctcagttaaacatgattcattcagcaccataagacaggggggaaaaaaacatgattcataagaatctatgtgagtgtttcagaatttgttacagtaatctctcaccaactgagagtggggatgattacattcctaaaaggtgccatgttaggtaaaacctccattggcaaaattcaagaaaatatggaacttgtaagatagtaaagcaataaagttggtcataaagcagaaaagaatcttctccttcagctgttcatgagctcatattctgaaaaatcatgattggtgtgaaagataggatgtatttatattaaccacacttcctttcacagcttttgatctggcccttactatactgctatttcatgctgcttgcatttgctttcccactggtatatcacatttgcaagccttggcaacattcttaatggtcagctgatccttccacaaatgaagggcatgatttttctttaggcccagtgtcctgctgttactccccatatgtggagggttgggggtagaggcaacatttgacccttcctttcataaaatatttctctgcagtatgtgatgctgtttgatagcattttacccagagcagaacttctttcaagattgcagtaaattttctcaaacactgccactgctttatcagctaatattctaaatcctttgttatttcaacaatgttcacattatcttcaccaggtgtagattccatctcaaggaaccactttctttgctcattcataagaagcagctcatcaagttttatcaggggatggcagcaattcagtcacatcttcagactccacttctaattttagttctcttgctatttataccacatctgcagtgacttctccactcaagtcttgaactcctagaaatcatgtaggagggttggaccaacttcttccaaacacttgttaatgttaatattttgacctcccatgaattttgaatattctcaatggcatttagaatggtgaatcctggccgggcgaggtggctcatgcctgtaatcccagcactttgggaggctgaggtcggcagatcatgaggtcaggagatcaagaccatcctggccaacatggtgaaaccctgtctctactaaaatacaaaaaattagctgggcatcgtggcacgtgcctgtagtcccaactactcaggaggctgaggcaggagaattgcttgaacccgggaggaagaggttgcagtgagccaagatcacgccactacactccagcctgggagacagagtgagactccatctcataataaataaataaataaataaataaataaataaawtaaataaaataatgaatccctccagaagtttctcaatttactgtccccagattccccatcagcagaatcactatctatggtagctatagccttataaaatgtayttctctagtaataagacttgaaagttgaagttactctttgatccatggactgcagaatggatgatgtgttagtaggcatgtaaacaacattctgctgtacatctccatcagagctcttgagtgaccaggtgcattgtcaatgagcagttaacatcttgaaatgaatcatttatttctgaacagtaggtctcaatagtgaacttaaaatattcagaaaaccatgctgtaaaaagatgtgctgtcatcccagctttgttgttccatttataaagcacaggcagagtagatacagagtaactcttaagtccctaggattttcagaatgaccaatgagcattggtttcaacttaaagtcatcagttgcattagctcctaacaagagagtcagcctgtttttgaagctttaaagccaggcatcgacttgtcttcactagctataaaagtcccagatggcattttcttccaataaaaggctgttttgtctacattgaaaatctgtgtttagtgtagccaccttcatcaatgatcttagctagatcttctgggtaaattactgcagcttctccattagcacttgctgcttcaccttgcacttacatgttatgaagatagcttccttccttaaacctcatgaactaacctctgctagcttcaaatccttcttctacagcttccttgcctctcttaaccttcacagaattgaagagagggacttgctctgaattaggctgtaggaatgtggttggttagatcttctacccagaccatctaaaactttctccatgtcagccattaggatgtttctgctttcttatcatgcatttattcactggagtaacactttgaatttcctttaagaacttttctaggccagacacagttgctgatgcgtgtaattccaacattttgggaggccaatatgggaggatgcttgagaccaggagtttgaaaccagcctggggaataaaatgagaccccatctctgcaaaaaattaaaaaaaaaaaattagccaggctcagtggtgtgcgcctgtagtacaagctacttgggaggttgaggtgggatgattgcttgagcctgggaatttgaggccacagtgagctatgatcatgccactgccctcaagcctgggcaacagagtaagaccccgtctcttaaaaccaataaacgaacaaccaaaaaaaaccacttttcctttgcattcaccacttggctaattgtctgactcaagaggcctagcttttggtctatttcagctttcaacataccttttttcactaagcttaatcatttctagcttttgatttaaagtgagagatgtgtgactcttcctttcacttaaacatttaaaggccactgtagggttattaattggcctaatttcaatattgttgtgtctcagggaaaagcaagccctgaggagagggatagggacaggagaatgactggttggtagagcagtcagaacacaacatttattaatttcactgccttacatggctgtggtctgtggtgcccagaacaatcacaatagtaacatcaaagatccactgatcacagatcaccgtaacagatataataatttaaatgtttgaaatattgcaagaattaccaaaatgagacagagacacaaagtgagtacatgctgttggaaaaatggcactgacacactagctagatgcagggttgccacacaccttccatttgtaaaaatcataatatctgcaaagcacaataaagggaagcataataaaatgaggtatgcctgtattttcatttcagaggaggaaacccagaaaggctacctgacgtgtgacaggccacggagctggtacctctcattgagtactgtcataatttagaatttctcaaatactgcataaatactgaaacagaattttattaaattattaaatatttagcattatgacattatataaatagtatcatgatatttagtaacagtaaataatggtatattaaatactgaataaaacagccataatctgcatcctgcatgcttcaaactactttggcagagactatatttgttcttcacctacctggcactctatgcttgataaatttcctgtgttgggttcagaaacagattttgagaatgataattaaaatgaagtatcatggaccccatcttcctgtagaatgaggaggaaatgrggtaacactagagagacttttagttgtcttctctttttggcctatgagtgtgtgttcaggtgctgcaaatccttctgattgattcaactgaagaaatatgattagtcatcaaaaataagacaaaatatgatcactgtatttcatggctttagacatcattcatttaaactctttcacctgtttatttccaagagtcccaaggaaggggtgagagagggacagaagaggtttcttaaatactagcctgtgaggacactatgatgactatatatggaaagctagtttatgtaacataagtaggattaagtgatggagggactgtaatgtggaaggtggcacacggtccagccagaggttcaagaatatctggacagaattctaaacctgcttttagccagccaagaattattagcatttcttcagctttttacaaaacactatagaagaagaaaacatgattggggagttagcctctttgtctactctcctttactctccccttttctgatctctcattaacctgagaactcagaaggcacaaagaaatgggtaggggcatgcctctggcactgggccttacttggacattcaaaggtttcagaattgctgatatttcaactgaataagcagcaggctagaaagtagaaaggtttgtgaaatctatcaggtatactattttgaagttgaatgagactttcatccctgccaatttagtatacttagtttcctgtgcttctataaaacaagttataggctttgctttctttttcccctttgttgttgttgttgctgctgctgctgttttctggttccagaaacaatgacaataaaaggggaagatgggagatttttaacatcagcttgccagtgaactgctgctgggcccctctaggtgaaagaaggcctagtagatatttcatccttaaacacgtaaaatcagccagctttgccctggcctttggaagaagtgcattcagtgtctggacaggatatatcatttcttctgctcagtaaagctccctcaactttgggaatgtttctattaattacccatagtaaattaaacaaaaaaatgtgttgtacttggctgggcatggtggctcctrcctgtaatcccagtgctttgggaggccaagctgggaggattkcttaagccgaggagtttgaggctgcagtgagctatgatccagacactgcactccaacctgggcaacagagcgagaccctgtctctaaaagttaaaaaaaaaaagtgttgtgctcaaatgaattaaattttatatgtagaataacagctctgacgctgtggttgtccctgaggttaataggaaggttaggatttgtggctgggcacggtggctcatgcctgtaatcccagtactttgggaggccgaggtgggcggatcatgaggtcaggagatcgagaccatcctggctaacacggtgaaaccccgtctctactaaaaatacaaaaaattagccgggtgtggtggcgggcgcctgtagtctcagctactcgggaggctgaagcaggagaatggcgtgaacctaggaggtggaggttgcggtgagccgagattgcgccactgcactccagcctgggcgactgagcaagactccatctcaaaaaaaaaaaaaaaaaaaggttaagatttgcagagaaaagataagacatgcaaagtattgacttctcaaatctcaaggcttgttcagcgtctcactttcatctactaaattaatttttcttgtgcaaaatccactcagcagtctaagtaaggaaaagtaagcaaaaaatgaaggaatgaaatatagggcaaacctctaacttaaaatcaacagctgtaggaggacttgcatttttataagatgtttcaatctttagaaattcataaaagcaaagaatgtatactcaataaatgattgttacttgacagatgggaataacagccaatattaatgatggtctctgaactgagaaatatccataattttcatggatcgataaatacgttaaactttattatctttgggtcrtagggatgaaatcttacaggttttatataactatcataaatgttttatagactactgatcagtaagactcagccagaggggtgtattaagaatgggaatgtgagaaccaagaggtcagcaggacagagaggcacagcctcttcacaagtcagagaagataaacatttcagacaagatgccatggttgaaaactgaagaggtaaggtcctcatgcaaacacagaggagatatgaaaagatcattgtccttacagaatctaggaatgagagaatatcacctcatcgtataatgaaaataacatctgaggtattacaccagcatgtttactgagcacttgctaagtgccaggcattgagctcagcactgtacatgtattgtctcattgaattcttagtgcaagtccatggcatgtgtactgttactgttcccatattaaatataaggaaactgaggcttgagaacataagtaacttgtccaaattaacagagtcagtatacagtagatcttaaattcaaacccaggtctgtcaagttcacgttcttataccctatagataccaagactccccgattggactagtttctaatggacacatcaggatagggcaatcatataattatcatcagtaaaatggtttgaatcgtatgtcatacctttggaccacttgtctttyctccccccttcccttttttttcctctttaatcaggttaaatctatacctctcctatgtcctaggcatcctcttttctctctagtcaggttaaatcttgttaagcctctcctatgttctaggcatcctcttttttcaagatgataatatattataggagaataaagacttcaactataattctgtgagctgagtactatgccagtgctaascaaagtgaattacgggaactaacagaatggacacagagtttagtgtacttgtgcttagaagataaaagacctcaaattattcttgttcattttagtttcacatatgtttcaaggttatcagttattctggctattagagaaacgggtgggaggaggaaggttttatgcgatcttaatttttaaaatattaagtaccagtacctattattttctaaatactttcaagggcattttcctagaatcaggtaaatgagagaaggcaagtgacctacttacagcaaaaattgctctaggttataaaggatgggaagccaagtgcatcctgaaaaccacagcatctggtcttgttttatgcctcatctatcaatctgttgttacaggaattgagaattaacatttcaactattgtttcttctattttaactaatgcatttgtatctttgttattcttactcaatctttcccacctcctccccatttaagaaaccataggcaggggcattatgaaggtcccaatttaatcctagggggatcactctttcatctacgccttaaaacttctgctaatgaggctacagtagggttagacatctgaagcaattctggttttgttcaatcctgatttttcacagatagtatcatttgaacagtactgtattaaagctaaataaaatattgtaggttgtaaatttccaagttctagaaaacattttttggtagaagtttttaaaaagtacacttggcaatgctgcttgagaaaaaggttacgtagaaatgcagattgtggattagtattaccctgataacacaagaaaattatatataacttctttttatatacactcatttaaaattatgtgtaaagtttaaaaacataaaaccatggaaagtagatttacagcaatatgttctttgaactttgctgttgtctttttttttttttagttctcttctttttacagaatggagttatcaattcatctttctacttcttccaatcttttgaaattttaaatttccattattttttccttgattctatcttattctttcttatttttattttttagtttagcttttttttcattttttaaaaaagtttatgggtacatagtaggtgtgtgtatctatggattacatgatatatgctgatacaggcatacaatgtgttataatcacatcagggtaaatgaggtatccattacctcaagcatttatcatttctttgttacagacattccaattatactcttttagttatttaaaaatgcacaataaattactgttgactgtagtcaccttgctgtgttgtcaaatactagatcttattttttctatctaactgtatttttgtacccattaccattctcacttccctcctaccccccaccactattcttcccagcctctgataaccatcattctaccctctatctccatgagttcaactgttttaatttttagctcccacaaatgagtgagaacatgcaaagtttgtctttctgtgcctggcttatttcactcaacataatgtcctacagttctgtccatgttgttgcaaatgacaggatctcatttttttaaatggctgaatagtactccattgtgttctatattatctttctattggagcttcaagtacagcttcaggtatagcttcatattcttgctttacttttctttctccatccattctacttaatttaccttgtcaaaataatggttcatatgattcagaagacatgatttaaaaaattaaaaaataatgattgaaattatccttttatgatatttttaaaagaacaaaggtaaccaaktgaattatactggcataattactgttatataattttacctatttgttgaagttctattctttctaaatcattgtcaagtgaattacttctaatgagcaatgaatagagtcaggtttactgtgtttacttattcaaagatttcagatttgtttttccttccaaaggcgttctatcctgaatctcatcatgaggcttccttgccttgatttcttgatgtattccagctgggttaatggttcagctgaccagataggccttttaggctaaggtagtagagatttttgcaaaaatacatctacagtcttcattcactagggcagaatttctcaaaatagagtccaaaactacctatatcccaatcagctcagatgtttgtttactgatttactgataggcttaaacaacagaaatttatttctcccagttctggagggtgggaaatccaatatactggcatatactctgtctggtgagggtatccttcctggcttgcagacagacaccttcctgcatcctcacatggcggagagcccagatgcttactgtaaaatgcagatttctaggccaaaacctacagtagttgaacgggagtctctgaagactgggagccaggaatctgcattttgccaagttgtccaagttaatctatatacagtgaaatttgagaacacctaatttttttttttgagatggaatctcactctgttgtccaggctggagtgcagtggcatgatcttggctcactgcaacctctgcctcctggattcaagtgattctcctgcctcagcctcccaagtaactgggattacaggtgcccgccaccacacccagctaatttttgtayttttttttagtagaaacaaggtttcaccatgttggccaggctggtcttgaactcctcacctcaggtgatccacctgcctcggcctcccaaagtgctgggattacaagcgtgagccactgcgcccagccaagaacacctaatttaaggaatcctttcttcccaccaggtgtctagtgcattaaccttgattgcagagcaaactagctacactccrtttaataacaaaagtggaaaattcagcaccttggaggagaactgccataactattttaagagttactgatacagaaaacacacacacacaaaacccaaaaactttctagaataaagtaataattctttttaatatcttgattctaacaaagagcaaaggcccagaaagtctacagtctgctctaatttcctgattaatattatatatattgaattatttattgagcccctactgtgggccaaatatggtattttgtgttgccagggattatataaagctatcctggaatgaaaagcatatgttcactctgctgtattctggaagaatctcattgatttgatgattgctgaaaatgaatgtacttgatgtcttaggcccagacatggaaggtttcttacggatttgctaaatgaaaatattaggtccaaaacatataggtgtaggcatttggtttccagtggctgaaccactggaaagggagtgaggtgtagcacttttcgagcttgtagactctttatggtcagcctcgtgactttattcaacagtttcccttcctgtgcaatcatccctcaaatattaggcagatgaattgagactagatgtaaccatactgggaactccatttcattgtaggattcatttaggatgtctctagtagagtgactcatgatttgcctgagactttgtcagccagttttatatcccagcaaaccttttagtctcatgcaaactgaaactgggtaggctggtcaccctggtccttagaagagggcaggtgaggctcttagttgaaccaatttcactcagtaaatgaatgaaaatccattactatcttgaatttctcagctcattttccttaccagtggatataattaccctattggggcacaaaacctgtttcttgcctttagtgaccctcccccttttagccctgccaaaccatgtgtccatgagcctcccaagcaatgattcagcttgggatcatccaaggacccagtggagagtctcttgaaagtctgctgagcactgatagcctctgttttttgttgttgttgttgttgtttgtttttaatgaacattgtcctcgtctcataatctttccgttcttctcaaaggtctatctctctaaatagtctagtaatcccaaacctagcttcacatccattttttttttaaattaggaatgtaggcatgcacgtatataaagccttaaatactaaacaggcacgggtgtattcaattccattctgattcctgtccatgaacttaaycatagttttcaacattcatgcatccctttcatcccatcctttaaagccttgtgattttggcatttcatggtcttactttcaactagattttaaagtttagctggtattaaattaccatctcaaagagaaaacgtaaagtacaaggtatgaattagacagacctatgttccaatgaaattgttgcctttatttcccaagtatatgaacttagaaaagtttctctaaggtttaagctttaaaatttgctcatttgtaaaaacggagaaaatgatagctattttagaggattttgggggagatatttaggttatgcatgtaaagcacatagaagcttattgccccaccccagcagacattaactaggtattatcttcaccacattattacaagtttgtaactagtaacattcgttaacaatcaggctgcaaaattgttattattattgagacaggggcttgctctgtcgcccaggctggagtggagtggcttgatcactgcagccgtgatctcccacgctcaagcgattctcccacctcagcctcccaagtagctgggactacagacatgcgccaccaaatccagctaatttttaggtggtttttttttttttttttttttttttttttttygtagagacgatttctcattatgttgtccaggctggtctcgaattcctgacctcaagtgatcctctcgcttcggcctcccaaagtgttgggattacaggcgtaagccaccgcgctggccaagctgcagaattctttagccatcaaagatgatgcctcaagtagaaaggcacaagctgccttcctgaggaacacagggagaactctcattacatcatagtctcaccgactctgtctgaaggaagtgatgcttctcgtatctcaggagtgtctaatgtcatctggcccaccggcagtttgtgtattcaggaggctctggctttcaggtttgctcccttgggacctcttgtgtcacgtcgctcgttctggaaaggaaaaggggtgaaagaaaaagggaaatcaccaaaatgcaaaatctgttaccagatgccctattccgtcctaactaccgagtctggtggcgtgggctgctaaatcttttcgcggaaagattgtcaggcgccaccccgaggtgtttgtcagcacagagatgggggagaagggtgagctcacccgagaattgaaaggcaggtggtgagggatgaggggtgaggagtggagggtggccataagcttctgcgttttggctaaagtacagacacaaagccgcggcgtgagggtttgcacagagtggtgggaaggagagaatgtatttgctgggtacgcagagcatttctgcactctcargaaggctgcccgatttgtcaggkttgcgccccgagcccgcgagaagggcagggactttttgtgataagcgccttcccaaaggtagtgtctgttaaacgcagagccttagcgagtgctgctcgcagacacgccggcttcgcagaaagtctcagtctagcaggtagcttaagcagacatcaggtgcgcgaatttgctctccctcactgtttctaagcctgggagcacgccccctccgcgccggcgaccgcgggtcgcgcatgctccgtgggagggagtgcgccgcgcctcccgccggaagcgttctctcccaggttgcgtttccttcctgtgtgaggccggctgagggcacttgctcttgctgtttctgcccctgggtgagtagctggttcccgtggggcctcatgggatggttgtcgtatccttctgaggtcctttaaggaccgtctcggacctgggaacccccggaggaaaggtcaccccggtcttctcccacgccctacctcagtgccgcccccaagcgccccgcagcccttagtatctagaggattaacctccaagggcgtcccgggcctcgccttggcgtccggcccggcctgggcccttagggtctgcttagctcttccccaagactcgtgccattcccgagggaatctttgtcggcatcctggtcactgtgggggtttgaggtcgtcccggaagacttcagaaccaggcgaacctagacgaaggcggctggaatgaaccaggtctgattgtcgcacaggcgcggccaccaccttgtgcaaaatcgaaggtggttcttcagggccgggcacgctttcacaaaagatggtgatgttaataataacctgccctctttgtgaagattggcaggccttcattgtcataggctgtattcgtagggcctttatgcctgcaaaactgggacttttgagtttgagaaacgatttgtgaaatactgcaatgaattaggagagaaatactacagtgaatgctatgctatgaatgctatacatgtcaataaattgctcatagatgaggtagtacgatttcacggttttccactcggaaatggagaacttaaaatgaaacgacctgataccatatttgcctaacaaataactctaggttatagtgttttaggatgtttcttagttgcatacagcactatcatcgtatatgtacatatttgtgtattcattttgttgaacctaatgtttatacaggattgaaatacgctccctgctgttgtatgcgcatgcagcttttattgtatgttcgctggtgatggtattgctgctgtaacagccttacattttaggtatatcaataccaaatgaatgatacatgagtgtacaataaagtatatatagttacagtctacaaaacaagtttcagtttcattgaaggattttgaagtaatttaaaaaggtagactactattttacaagtggccttagtagacctaagtctttattacattaaaaatttcagaattgggaaggatataaacgggttttgtgtgttgaccttttatgggattaaaagttgttactatcttsatgactgggatgtgttcataacagccctaatttgttcatgtagttcaatgaatatccagtagatgacttggttggtagttttatcactaccaactctaaaacgaaaacgttttactggaatgccaccgcttttcacagattaggttaataaaacccttatcttgtctaaattattttcctctgtgagtataccccacgtagtgatataacacgtttcaactgcattttcaactttgtggaataaagactagaaaagtcagttttttacttcctatgagaagtgaaatattgtgtaacccgttttttttggaatccatgctgatggaagatagcacactttggtttgttccatgaagagagatttcagttaggtgccttctcctttttggcttcttttgctttctttataattaatataatagccggacagtgtgttctttgaatgaagtggtgatatcttaacaattattgtatatccaatatatagtgggcgtcatatatagatgttcagtaaatgcaaattgaatgaattaaatcatttaccatccctaggccaaagtttcttcctccaaaatgaaggctttcaattatttagttgttaagtttaaattaaatctaattattgtgaagtgaatggctcctagtggagaaatgtggaaccttttggaaatccttcagaagtgactgttgcaatgattgaatgggagatttccttcagttacaatttatctgttgaacataatttttgaatagcctctgttttgtgtgtggcaattataaacgtctgttttgtgtgtgacagttataaaggtagataagatatacatcttgtttataaggatttaaactctagtcgagtagatatctcaaaagcaagacttttttaagatagtgtaatagggcgaaatgaataatacgaagattcatgtgatttgaaaggctttatggagcaaataaagttgatttttgaagttaggatagaatttgactaatcctaggtgaatgagggtaaatggcccatgcaggatactagacagatacgctgaagggaaaatatatgtgggattttcagatggtagtgactccagctatttatagagtccctttgaaaagaggtgaaagagaaaatgcttacaattgactctggagctagattctagattagaatagttttgaatgcttgggaaacgtataaaggaaatactttggggtcttttgattagagagaaggagtatatatccttgagtggaggtgaggggtataaaaggaaataaaaaatttttggagctattctagagggaggaaggtgaagaggctctttaatttagtagtagtgagaggagaattttagagctggaaggaccatggatattaatctttgcagtacctaacttttatctgctgagccatacaaattctgttttttttcatgtttatgtaagtacaaatatatattctctttttcttatatatcccatagcattcagcacactcctgtgctgagagtataatggcagtatttgaagctaagatcctatctcccaaaatgtgatagtcatatcatccctaacaagcttattcttccgggtagttattgccattgacagaggagtgtatgtcttctgtaagcctagctttgattgatgtagctgttcagggatatatgcaaaaataggcacatttatctcattttttttctctttagcttgggtgagtgctgtattcttgtagtagttgtctcagttcaagatttttccaagttctattgcttcctacttagcccggttgttgggaacaatagtgtggctcaaaaaagttaataccacttattactgaggaaatggcatgtttaaatttaagcaggccttgaaaacctttaaaagtatgtatgaggaaaaagtgagtcagttcacaatttgaatttcactcaaaaattacctggtatatgatacagttaatagaagaaattcttaccgtcacattagtattgttgggctgcctttcttcagttggattagtgttatagttgatactttcctagactctgaaatagttctttaaagctgttttgagtaaataccttaagatatttactgtatttttcaaataaaatgattaattctactaccaaataaatcttaatttctagtctacttctagtttgcaagaggagctttaaawgtatttgtttacttaacatttaaaaatccatttctccttaaaatgaaacactttttttaaggtaggtaatattttaatttgactagaagttagtttttctttcttagtttaagctactttgttagtcttacaattttaataagtatagttattacctagtgacatttctgtttgtttttttaaggttaacattcaagatggtacatgctgaagccttttctcgtcctttgagtcggaatgaagttgttggtttaattttccgtttgacaatatttggtgcagtgacatactttactatcaaatggatggtagatgcaattgatccaaccagaaagcaaaaagtagaagctcagaaacaggtatgattgaaatgtttgaagatcatttttcttgtggctaacaagtattttcccctcaaactaaaaatttggtagagttcacaaattaatgagaaattctataagacccacatgaaaatgtattggtactcatagttttattactcttacaaagtactagtttattatgacattatttcaagtcattttttactatataaacaacttatcagaagaaaaatgaataaacaataaaatattgtgaacatcttcattagaatatttttgtcagctttggaggtaggatctagataaaagtttttaggctaacccaaaatatttatcttcagtaatgatatgccttttgctgtgtatgacatctgaaatgtggataatactgaaacgctctcagtcttaaacttataagctacactaaaatctaattaatgaattgctgtaaaagttgttgattattaatataagctgtagtttttaactttttatctgctgcctcttgtgttcatttccttttaaaggtgattggtttctgtttgtcatcaaaacataaaaaccttaaaggagtcttacagattttttgtgctgttaggtggcttttcccttctggctctttttttttaaacaataattaataactaaaatatttatgtcttattgaatatcttatggtataataacataatttatcttaaaataattaaataggatattcatggatttttagatctgtcttgtgagttgtgacagatttattcaataaacatttattgagtccctatcaactacttggtaccaaagaaaaaagatgaataaatcttgttctttcaaaatgctataggctattgtgggaaatagggatgtaaataaatgactgttttacaatgttagcccttaaatcagtaaaaagtgaaaaccacaattttataaacactgcaataagtatatatctgaaaggcactttggagaattctgaactttttccttgaattttattataaaatagttgactgaagttctagatgatattatcagcctatttgtaagtctctgggaagtctgaccagggtagatttaaaaaaaaaaaaaaagaaaaactagtttgagtatatccatatgtcaacctaagtgttgggtttttttctcccacctgaatcatgaaagtcagtttaagtatgatgtcaaaatattataagttacatcgtttcagcattttaaaaagcagaggtgtgacttttaaagataattttgtctttttttccccttggcttctaagaactcctgaatacacatatagaagacatacagaaagctaaatatagatgctaagtactacaagccttcattgaaaattatgtgtatagtattattctaaatattaggtatatgaaacattagatattatgtccttcatagtgcccatgatagggagaaaagacttgttcatgataatataaattataatagtaagtagcatatcccagttgcttattgagtagtgtagacagaaactgtggctcttagagaaaatagtagtcaccagtgattgtggtagttgaagatggcttcatgaaagagcttggcctctagggtaggcaaggacagttttaaatagaatgcattactttttccttctttggtcctttttgttttgttgggtggactgaggctgataaaaaatacacagcattttagaatccatcatcaactgaaaaggagggatactttttgcttctagcattatcccattccacagtaatttaccagtgtttaaaacactcaggatgaaatgggatttgcttggccaacggctatagcttcttggttacccctcctcttctcttccctacatctctgacsagctgttaaacatgctgttgactggccatgtggtggctcacgcctataatcccagcactttgggaggccgagacaggcagatcacttgaggtcaggagttggagatcagcctggccaacatggtgaaaccccatctctaataaaaatacaaaacattagccggacgtagtggtgcacacccagctactcgggaggttgagaattgcttgaacccgggaggcagaggttgcagtgagccaagatcacacccctgcactccagcctgggcaacagagagagactccatctcaaaaataaataaataaataaatatgctgttgaccaattgaagacttctgtaggcttaactcattaaatatatttgaatgggtgggtgatatacaatgttttaaggataattcaccttatagtagtatgcagaaggaataggagtcaagaggtactagaagcaagatctgttggtgatagactgcaacagtcctggcaaagacttagaataagagggtgacaaaaggaatgacttgagtgaaatagactaacacaaatgaatgcaggaaggactttgtgatgatgtgggaaaagaaaaaggacatcttaaaatcttaaaaacgaaccaaagatttgtctggatacstcaaagacttataatatcttttatagaggtttggaaactggtaggtagggcaaatttatgagaagatgacatttgatctggccatgttgggtttgtgttggtggtaggaattcaggaggaaatgttcatatagcaattgaagttgcaggtctgaatctcagaaaaaaggtcaatccagaggtatatttccttatcgatggttataagtagttgaagtcgttagaacagtgagtaggccatatggttattcctgtatgtgtagatatcatttgtagaacttttcccaaattattccccatctcccctcaccaccatcaagatttatacatatatttgttgagaaattctaatgtaattgtcactgtaataaatggtaatgactatactaagagtgatgaagtctccaaaagagrtggtgtaatgcagcataattggtaagctgaagcgtaagccttgatacatttcctttatttagggtatagaaagatgatgtgcagccagtgaagaatgaataggtcagtatgggtaacaagactgactcctgctgaaaacagctaaagaagcttgataattttttaaaaatcttgttttatttatttatttatttatttatttatttatttatttatttttgagttggagtcttgctgtgttgcacaggctggagtgcagtggtacaatctcagctcgctgtaccctgcttcttccgggttcaagtgattctcctgcctcagcctccggagtagctgggattacagaagtgtgcaaccacatgtggctaatttttgtatttttagtagagacggggtttcaccatgttgaccaggctggtcttgaactcctgacctcaagtgatctgcccgctttggcctcccaaagtgctgagattacaggtgtgggccactgtgtctggcctaaaaatcttaaaggcattcatgagctatcaacaaagtaaagaatgcaggttaaaaacttaaggcaaaaatttcagaaagctaaggtgagcttgattgccagcctttaccttgagagaatttgctgaattctgtttttatgatttcagaggggctcagtatacaaaacatagggccaatctaaagtaggtagtttcatagatgatactcctataaatctagaaccccaaaaggctatctgtagtatttcaactaaagataaagacacagtgttttaaagatgaatagtttaaagagagaaatttaagccatatgctgggtgaagtaacacatctaaaatatagattcagaaaggttgaaagtaaaaagatggaaatgtatataccacacaaatataagaagaaaactggctgggcaaaaagaaattgtaaggcaaagatattggagaaaatgtttgctacataaatgatgaaagattcaattcaccaataaatataacatttctatttgtgtgtaactattgatgtagcctgaaaatacataaagcaaaaatatgatakaactacagggaaaaatggacatctccatcaacatggtgagagacttttaacacctaataattgttcagattttttaaaaattaaggatatagaagatttaaataaaaaatggacatgtatagtatattgtgccaaaataaatgcaaaatacatatctgaagcacatatgatttgtgaaaataaaccgaatactagataataaagcaaatctcaagtttcataatattggtagcgtatttattaacatttcctggctatagtgcagtacagtagagatcattagaaaaataagtttggaaagtatgaaatattttaaaatgactcctgggtaaaagaaagcacataataatgaaatgaatggaaataataacataagttaatgaaatagaaagtgaatatacagtagagaaaaatcaataaaacccaaaattgtttttttgaaaagacataaaatcaagacttttcaaaccgacaagaaaaaagttaccaataaaatactacctggaacaaaaaaggcctaatattgctgtagatattaaaaacaagggccgggcacggtggcttacacctgtaatcctagcactttgagagtctgaggcaggtagatcacctgaggtcaggagtttgagaccagcctggccaacattgtgaaaccctgtctctactaaaaatacaaaattagccgggcgtggtggcaygttcctgtagtcgcagatactcaggaggagaatcgcttgaatccaggaggcgggggttacaatgagccgagattgcgccattgcactccagcctgggcaacaagagagaaactccatctcaaaataaataaataaataaaattaataaataaaaaaaattaggactgttcataactatagtgggcccttgaacaacaaacaacgtgtttaaactgcataggtccactcataagcagattttttttttttaatgaaagttcaattgagtgtgcccgtctctcctgccactccttccaccttcacctcttttacctctgccaacctgagacagaaagaccaacctctcttcctcacgctactcaacatgaagatgatgaggatgaagttaatatatttccctttatgattttttaaataacatgctttctctaggttactttattgcaagaatacagtatacaaactatgttattaactgtttctgttagtgataaggtcaacagtaggctattttagtagttcagtttgaggggagtcaaaagttctctatggatttttgagtgtgttggggtcagtatcccaatccctgtattgtgtaagggtcaactgttacgtcgataaatttgagaacttaggtatgggtaaacccttagaaaaatatgcatttctaaaactgacttaagaagaaatagaatacatggttagttccataactatgaaataagttaatagtgaaaatatctttttataaagaaaacttcaggcccatagaactttatagcaaattctgccagtatttaaggaacaaattaataataaccaatttatgcaaattcttctagaatataggaaacgagggaacacttccaaacctttttgtgaggctagcataactacagttctaaaacctatagtagtctgtaatttctctctctcccttctaaattggtataagaatcttaaatgtcagcaagttaaattcagcaatatagaaaaaatataatgcgaccagttggatttatcccaggagtttaagcctggcttcatttaagggatgggaaatcaatataatatgcaacattaacagattaaagaataaaacctgtatgattctcccaataaatgcagaaaaggccttaagcattcattcatggttttagaaaagcttttaataaaatgggaacagaagatagtgttctttttgttttgttttgttttttgtgttttcttttagacggagccttgctctgttgcccaggctggagtgcagtggcatgattttggctcactgcaacctctgcctcccggcttcaggcgatctttaacttgataaaatgcatttactaaaacaaatgtattttatagtgaagaattggaaacattctctttatgattaggagcaagcctgttgtctttcattacttttcattactttttttttttttttggcttttctttgtttactttgtttacttctttgtttacttttacttctgtttaacattttactgagttactagccactgcctaagtcaaaaaggtggggattggaaaagaagaaactaaatagtcattattaatggataatatgataatctacatagaaagccaaagaatgtttacaagctatcaggattcatgagagtttgatgggtttgctggatttaaaatcagtatacgaaaatcagctgtttctgtatacccatcatgttttaaaatgtcatttaaaaaaagcattatatagtagcatcaaaaatataaaacaacggacaaacataagacatacaacacattcatagagaaaattataaaactattgaaagtttagttaaattcaacatcagtacaaaaatactggcagattttcgttttgttgtattttttcctgaaattcatgtggaagaacaaaagtctataaatagggaaggcaatcctaaaacacaaagttttatttaactactttgggtcttgagttttcttatctgtaaaagaaataataatagcacttaccttgttgggttgctattgaaattaaatatataatgtaaaatataacagtgctgcataagtgtttcctattatttttataacttaaaagatttgtactgaggacatatatagaatgcatctgaatcagtaagaaaaaataatagaaaaatgggcaaagaaacttaaatagacacattaaaaaagaaaaatctccagtggtcaataaacatatgaaaagatgcacaaactgattagaaatcaaggaaatgcaaattaaagtcaaattgatataccttttcacccctgccaggttgtaaagttttaagtctgtcaataacgtgctggagagaatgtggaacagtaggaacaaaagtattgctgttgggaatataaattagtataactattttggaagatagtttggcattatctagtaaagttgaaaatgtgcatagtcagtgatccacaagtttcattctgggcatatagcgaagaaccaggagatacatacaagagtgctcatagcagccctgcttgtaatggaaaaaagcaggaaccaatctgaatatttgtataaatgttggtatatgcacatataggagaggaaaaacacttttccttctaccgttctgaattctcatttgggcctctataacaaaagatagataaacaagagaaaaacaaacaagtttattaacatgtatcaagcatgcaaccaataggagtaccagagatgagtaactcaaaagtttggttagaacttgagtgtatatagtatcttggcaaagaaacaaatttttaaagaagcgatcagacaaaagaaaaggagtctctaggggcagcaaactgtgggaaactaatggtagatgaagactagttggtaaagtttgttatgcagattcctctggctaagtgtctaaagttgtctcctttgattaactttcgtccttcctcgtaaagagaagaggagggagacctttgtgaatttattgtttttaggcaagtaggagtagggcagatagcttttcttgtatctgtttttttctaaatttccctcaactcaaaataattcttatgccagagtggcatactttggtctgcacatgccagagcataatattcgcggagaaaagtgaatgaaatacagatgctcaacaactctaagaaatagtgagatgaaaatgtcacagaagagtacatatagtgtgatcccatgtagacattctgaaacatgtaaaactaaaccttagggaatcaaacatatggttaagttaaagaaaagcaagagatgatttcaatttaggattgtgatttttttttctgggagacgagaagatctgtatttggagagggcctcaccgaaggacttgaaagataataataatgttcttgttcttaaacctggattggtattgattatattgtgtttctttatacctcatctaaacagtctaagatattattttatctacctagttattagtaaaagcactgtaagaacttaaaaaaaaaaatgaccagaggagtgagaataaaaccaagatgatgtttagggtactggtgatagtcttttctacatgaatacatctgaagtayacagagtactgcagacagtcatagtggttcactgtggcagtgattgtcaactgaaacactatgttctgcaaagaaataatcagaatttggggaagtttgtggggtggcaaatataattttttaaaacctcagagattatttggttatccctcttctcacttctttcccactgtctggggaatcacttgcataaagtcaccatagccaaagaaggagaaggttgcaaaagagaattgattttaaacgtgttatrgaatggtcaaggagaagaagaggtcatgaggaatatgatctaagaaagtgatcagtaaatttagtgaaattaagcttggagagagtaatttccatttggtggaggcagcaagtataatttgaggtaaaagaacatggtcattctagagttgggggaaaagaaaaaaaaaagggagaaggttagtggaggaggaggaggtagagaggggctgcctaaaaggatatttaatagatggaggaaggtcccagaagaatcaggaggggttggggtcagtagttatgggaacatttttagggtagagttgttttatgtttagtagcatgaaggggagagattgtgactaaaagtgagtgagtggaggaggttgggggcctatttaggtaaatatgtgatcagtatttaatgagattaaatcattgtggattttgaaatattagggcatgtttgaagaaagcatgcatttattgggaactcaattgttttgttactattctcaagcattactcagcaacttggtggcagatagagtgaatggtagtgttaaattggcattggggatggagctgactggtataacaagaagtgyaaggatttctcaggagcacatcattraagtaatgactgtgtgattcaggccatttagaaagttaagtattaccagatgggagataatttagttggagaatagaaaagaattaaggaattagaatacacattaaaggcaaggatcaggtgtgaatgtgggaggaggaaggtgtgacttttgtggtcagaatgaaagaggattgaatctaaaagcttagatgtagaacactttgagtataccagataatcagtgggccccatgtgattttaaaggcaatacggttttgagatgagaggtagaagatgacatagttgcatcaaatcagaaacagtatcctggaagtataccgttatgttggattaaacaatgtatttgtaaatttctagacttgaagccaggaaaaccttcagtttgtgaaaggcaggagatttaattggtaatgagagaggagatggtttcaacatggtgttgtacagggactgggatttttctgggcacatactgctgcttggatcatatttagatgtagtagaagagttttgataagctatgtttttgatgaaagggtgggttaagttagttgagatgtgtagtttaatagatttaaagtgcaggatgaatatgtgttaactgtcttgggaatttataaatacagtattttgtttagcatattaattagactacataggctgggcatggtggctcatacctgtaatcccagcactttgggaagctgaggcaggtggatcacctgaggtcaggaggtcaagaccagcctggtcaacatggcaaaaccccgtctctactaaaaatacaaaaattaggtggacatggtaatgggtgcctgtagtcccatctacttgggaggctaaggcaggagaatcgcttgaaccctagtggcgaaggttgcagtgagccgagatctcaccattgcattccagcctgggtgacagagtaagaccctgtctcaaaataataataattagactatataattttcttgaaattgtggtttagtagtcatcaagggccaggaaagatttcatacacgagttatacacagaaagtgacttactatgacattaattatttaacttaacgtcttcctattgttagtcctatcattacactgtagacttgaaaactatttctgttattttgagagaagtaagagctgaagttttctgtgaaggagtgtactgaaaaaaactttaaaaacttggaactctcaactgccaggaattttaagagcagctatcacagaatgccaacttggaagagctaacatttgttaaccccagaaagctgttgtgaactccattgccagtcaagtggcttttaaacccaaggtttactggagctgagtcttataagactgagaagctgaagtaaataaaattgagataggagtcagtaaggaacaagcagttagtrttgcctaggtaggtaagggagtagatacaagtgatgaggaaagaaaagcaataggagctgggaatcagaggagaaaaaactctgcagtattgttttctacacaagcatagtagaagagcaccatagtactgcgaaccgcaaatatctgagacaggtctcagttaatttacaaagtttattttgccaaggttgagaacatgcacccatgacacagcctcaggaggtcctgatgacatgtgcccagggtgttcagagcagtttggttttatacattttagggatacatgagacgtcagtcagcatatgtaaaatgaacattggttcggtccagctggaagcaaaggtgaggcaacctgaagcagggaggagacttccaggtcataagtagataagagaccaatggttgcattcttttgagtttctgattagcctctccaaaagaggcaagcagatacgcgtttatctcagcagaggggtgactttgaatagaatggaaggcagatttgccctaagcaattcccagcttgacttttccctttagtgatttggggtctccaagatttattttcctttcatatttcctccctttttaaaaatcttttggagaaagcatatttagaagaaaatgagtctctggtctcaagtttcgtctgatctctcatggctaggatggtttattccttgacggataggtcctgagttattaggaaagctcaattttagctggttgtgaagtctcatgtcttgtgaagagaaaacggggaggaagggagaaaaacaacaaaaaacaaaaaacaaatcctggaaaatttatataggccacattacctgaagtccatatgtcagtaggcaggtattaaagtggcttatgtatgtaactaagttgctgttcttttcttctgaagtttaagtgtctagcttcagttcttagggcattaagaaagcacagcttagttttcagtgactccaaattaggaaaaatgggggaaaaaagaagggaaataaattgaaaacattattttgaagacttgtagccaagaaaagtttgaattctgtctaaactatagaaaataataaaaattgaaaaatattaggcaggactagaatctaacaayaggtatactatagtttttgaaacataatttctctgtctccagtttctcattttcactaaagacaaattatggtaggactgatttgctttcttctaattggccagattgtttgtatatagtgcagcaagaataattattttgttacataggctttttttttttttcgtgacatagtcttgctctgtcacccaggctggagtgcggtggcgggatctcgggggtgatctgcctgccctggcctcccaaagtgctgggattacaggcatgagccactgcgccctgcctacataggcttttaaattggctttgatagaactttgttccatagaaataatctcaggtaagacttttttaaagccaagcccagccatggatttgtaccatcaaatacctgtgaattgggtgaattcctctcctcttgattccaagataaacttggggctcctgggcctgtcagaaagtgacattctttacttaacaacaggtcagaaaccctgtacagggactgtgtagataaggtgtgaagccagttttcccaaggggctttcattggctctgtaagtcaagtttgattccttaaaggaaagcacaccattccagtcaaagccttggtaaaataactagtttctccaattgtgtcctgttacaaatgaaaacagattcttattgcacttacgcaaataactgtattgccataagttaagaatactcacaaatagtttccaaattctagagaaatcaggtagagagaaacaaatatgctccaaattttgttcataggagtctactgaattgttagaagctgtcaatagtgcaaaagaaaagtttctttgaaaaaaacaaaacaaaggatcagcaacattttaagcaaaaagtcaaaaagataacttcagtcttctgttaattcagtccatgcagttaattcctgttctgtttgatattcatggatgttccagctctctgtgagtcctgaaagtttttcttctattttgatgtcacaatctccaatcagaaacattcattcaagagcacctgttagagttttatagctgattataaaaccaccttctaaagaggaccaaaagaaggtaacaattgtccatggatgacaaaagttttagggtagccatagtcaaagacatagttgacaagggaatttattayctctgtggcacacaataattataattattattgataatgtacattaagtcatatcagaattataggagtttctcataattttaggacacatactaataacatctctacaaatacagaccaagaaaaccaaataccatttcttatatgacaatgtttcctgtgtaattttttttactaaataagccaaattatgtcattttttgaactttatagggaacytaatgtcttaaagaattaattaggtcaaaaaaaagacataatttatcatttgattttggaaagtttgycaaatatcaaaggtttaaaaaacttcatactacaggtcattgtaaaataagtcattcatttcaccaaagtgataactcagaaaaaggtgaaaaccttcattctttgagagaggagacttaattctccaaacgataaggcctaataaaaacagcatgaarccaattcaatttatttttaaaagtttataaacagtctccaaaattttaatcttgrccataagatataacttccttaagcctttcacagcatttataacctttattaaggagtcagttaatgcttcaacaaaaccttgttaatctgacacaggggcccatatgttggttttgcattagtgtgcctttgatatgaatgattaatttatagagaagctgaacttattttctctctcaaaattgggccttccaatttcacatgcccgcctcttctatgatagtccctgggccttgaggagttgaatacctttaatttctggccttgtgttttagaaacgcagtttattttgattggcattttctacggagcctgaagatgaggctttaattgctgtcagtgtttatgatttagtaggacttggtgtcctttttagacccagaagtcaaagccatgtaactcaatggcacaggtactttgaacatatagaaagatacatgaatgttaataaccttaattaaaaatttttttttttaatttcagcttttttccccaagcaaaccaaactgaatcataatrgcatagaattgtttcaataaaccataaaatatgttagaccagttactaaaaggcaacagaaaagacctgcactgccagaatattatgttggaagaaaacatttcctttggatattcatgaaaacattgttagcatcaggccataacaaacagaactygaggaaaaaaacttaatatgagctgaaaatgagttgaaagagagtgttacaatttcacaccctttaaaaggagagagaaaactaaaaacagtgagatgcaataaaagttgaagtttgggttagaaaaaaattaaaatctcttataatttattaaacgtgaatcaataacttaagaaaatgtcattgttttaaccagtgatttagtgtgtgtgtatatatatatagacataattttttttacatcaagtccaatcatctctagaaagaccattttaatttccctttaattatataaaagtttctttgttctttttttttttaaataaatcctcttattgtgtcttagaccattcatgacatgcttggactctgtggtttgtcctgaccatcctctttcttaagcagtcattttattgtaggactaaatttaccatataagagtctttctcattatttctttttaagctttcttaccaaaacaaccctctttatttttacaactttctttacatgtctcttacttcctggttccttttaccttcttttatacatgacctaaataagcattgaattagacaaaaattgttcacctttttaaaaaggacacacttttwaaaaaaaaatatttttctacaatatattttattgaaatatttattattttagtataactttagattctaaattatgatgagtttgtctacaattatcccattgcatttacctaattactttaattgtttacctagactatttatgaaaactgtaatggtcatcatttaaagttacagaaccaccattgcaaaatcataactgagacagtgaaaaagatctgacctaactcaccccatcttgcttctaacctccaagctgtcctcattcattcctgggcataggctgaactaacttcgggaggaacttggtttatagtttagctttgaaacaaaggcaataacagccttttcccaaaacaaaccttactgactatggtctagactgcctaaagccacaagattagaagttatgataatcttactaacttcaagatgtagctattttcattaaaccaatatcaatgtcttatttattaacaattacgcaagcaaagatcattctgtttggggctggatttatggtttttaatccctatgccaaattttgacaccttaatagtattttgcagggataagtatgaaattgcttgattaataaatgcaaacaaaaatatattttggcaattcttaagatatttctaatattattttgccagtaattttaaagctagcttatttattaaagattttattaaattatgtaaacttgaaaaagcatttgacgagtcttctcttttttcctgatgaagtatttgattccaagcacttttattttcttaagccaattagttagagctcttttatatattttcagtagtgaaacattgtgtacacaacacataaatacatagacatattaggcatgctgatagaagtacatattatagattcataaaaattttattttcctaccatagacttcaaattcttaataacctttttcactaccctaggcagttgtcagctaaatagcctttaatttgcatgttaaaggaaacaactcaggtgaaaatcagatagccaaatttacaccataaagtatggaaagaaaacgtctagtgtgctaagagggaaattaaaatggatttaattgccaattaaacataaagctatggaaattataaaggcattttaaatacacacacacacacacacacacacacacacacacacacacacacacacacacacacacaccccctatagcttttactttggaactttagccatgagataaatacaaattcactggcttgcaaaaaaaaaacacaaaaaacctgttagatccaaacagtggtttttatcttagtagaaaaataacagcagattcaaagcagccagaaatgaaagacacagaaagagaacgtagcaactctgtagtttgtaggtcgaccttagggttctttttctttaatgtaaatgtgcacaaagaccatgttacttccgttttacataaactctggcaagtagtggtgccataaaacctacggagtgcttgaaaggggatcattctcctcattcttagaacgtttcccactttttcttaaaaggaggaactgagctgtggcctagggtttttatgtgtggatggatgtgtgctgcttgtgggcaggactccacagtgtgtcaccactgagttgtttctgccctcttacatgtcttggtttctctctccagaggtccatgacctctgagagggctcaaaacatgggatgatcaggacttatgtgtgtttcctggacaagcctttttaaaaattaatttttgttggggattttcttgtaaggccactgcacgtcgagggaggttaaccccctgtacactcccattaggcccccggtcacccaggggcaccttttggctggggggagcaaaacaccctttctctttggagctgagaaaactcaatctgtcatttacctgcaaaaacaacagttcagttcctcacacaaatgtgcgcagaaaagccaaacagagattaattttggtagaaaaggcgatagagaagaccctttagaatgcatctctgaagtagaatcaggatccttaacaacttcgtaggagaaaaaacagccaagaccacttcctgtaaactgtgctcagccacccctaacttgtagctctcattcaccattacacacaccaaggtcaaatcctctcgtggtacaagataatctctggtacccccaagccaaacaagtcaggtcatggaataatatggaaacagaggtttagacttaagaagactctgcccatgactcttgaaactccacaaggaaaacagaacactctaaaaggggtgagtggtgtctttgttctgaattcttttaatgggttcaagtcattagaaaccttctctagattttttggtactacagatggcaaagggggaaggaggtatagggtggaagaaaagtaaatgaaagaacatttgtttttttaagacagtaagcaaacacagaaaccaagcgcatggatttttgtttttgttttttttttctttcctcttttgcagctgcgaggaattttagccaaattagagaggttttgttacccataatttggaattctcagatttgaccaagtcaagtagagtttgtcaaatctgatgggagaaagaccagaacaaacaaacaacaaaaaacccaacaatatgatcactgactgygctaatggtaaggagaaattaagaccagctagttgttaaactttagccaagacaaaaccccaattcagctacttacccagggataggtctcaggctgaagactgctctctacatcctagaagcaggaaaaaagtcaaactcatcttccctgctaggagtgagctcaaactctgtaaaggagttaccttctgtccatcgctatgtaagcaggaaatcttgctttccttgttggaagcaagtgaaactccaaaaaaagggagttgtattgcaaaataaactttaggtctccaccaaattttgggagatcaggtgttatctggaggggatactcacagacatcagcaaatagtactatcggtttgagccataaagttagctcatgctggtgtcaagctccgataggatatttgtcaaaggtcagggtcacctccactcagaatcccttcatggtcaccaaaatgtgaaccccacatatctgagacaggtctcagttaatttagaaagtttattttgccaaggttgagtacacgggaccatgacacagctgcaggaggtcytgagacatgtgcccaaagtggtcagagaacagtttggttttatacattttagggagacacgaaacatcagtcaacatatgtaagatgaacattgggttctgtccggaactggaaacaaaggcaggacaacttgaagcagggagggggcttccaggtcataggtagataagaggcaaatgattgcattcttttgaatttcttactagcttctctaaaggaggcagtaagatatacatttatcccagtgagccagaggggtgactttgaatagaatgggaggcaggtttgccctaagcagttcccagcttcacttttccctttagcttagtgatttggggcccccaagatttattttccttttacagtacaaagccatcttacccaagaactttcagaatacataatggtaaaatgagaggaaagaggtataagtacactaaccctaaaagaggatcactgtttccacatgtgtagaagatgtttttccagagttttaatgtaagtttgtaataaatgattatatctattatataaagatacttacatactcagaatccttgttagttcccttttaaatgcatttttaaaaagctttatatcagtgattcgtctgcatacacttaaattggaacacttcagctrtgaccttggtaaaaagatcagaggttgtccttgtttctaacttaagtttaattcgttcatctctgatttttcactcttgttaatgacatgtccaactttctaaactgattcttccaaaaggacaattttatgaatctttagaacctgaatgaaatgagtgttagctcataagtattttctttgctgctgcttgtccccatttctgccttccctactccaggcaaaaatattagtttaatatttcctattccacttcttaatctttttgaaaaaataatactttgcatggagaaaaaagtgaaatagcatgaaagggtaaaaaatagtgtgaaagggtagaaaatcatttggaacagtcaaaaaaatatgggtatacagtaaaaagtaagttttcctccttcttttggcccccacacactccccatccaattcattttccctccacagaaacaacaaccacttggagagacctactttaaaaaaaaaaaaaaaaacaagcaaaccatggtgatcagaaaatataactttcattaagctgtaaacaagaaagtatgcataaacataagccatttttacagtagtccaatcataattttgtttttctgcttatctagtggctcacttaaaagtgtcaaaactaggcaattgtataacttcttcctgggacacagtttgtttggtggcagttttggtgtgttttttggtgtgttccatttatttgccagccatgttctgctctcccaaatgaagagtattagtgtttcagcaaaatatgggattcgaaattagacaaatcagtatttgagctctgttaatgtcacttcctagctgtataatcctgacatttcttttaatttctctgacctgtaaattcctcatctaaataataaggataataatagttacttctcaggttaattttaagggttgattataaattacctagcacagtgctagatatggtaggtgctcaataaaaccattagttccttttcccttttcttttaatgatatattgtgaatacaatctgaagagattgttaaagtgggactgctgttgcaggaaagagatcttaggtaaacttgaaaagataaaattttctgtctctatgtaaactaaacattattcatttgtcattttttatttaggaagttccagatagaaataaaggctattctttaaatcaagaggcaattttaaaagctttatttaggcatagagtaaaattttcagggcaactagctaatagggaataaaacagggtttctcatatcaggcattgttgacattttgggccaataatkatttgggatggggaaagggaggctgtcctgtgccttgtagaatgttcagtggcatctctacctctactgactagatgctggtatcaccctacccccaagtgtgacaaccagaagtatttccagactttgccaaatgtcccctgggaaaaccactgtcttcgagcgttgcttaaaaagaacacatgtgggagggtttcacatttactgtagcataatgaaaatgaagagtaaatgttattcagatgctaaaataggataccttttttaactgacatgtaaacgacttatggcagtaaaagagaaggtatttacaagtgacaaagggatctacaaaagattatctattgattcagtgactttacaggggcaagataaacaggagatgtatcctgtttgattatgtgatgtggttcatagcactttttaaaaattcttatgagacaagatttgtctcttgtccaggctggaatgcagtggcatgattatggctcactgcagtcttgatctccaaggctcaagtaatcctcctccctcagcctccagagtatctaggactacaggcgtgtactaccacatacagctaagttttgattttttgtagagatggcgtctgtgttgcccaggctggtctcgaactcctgggttcaagcaatcctcccaactcagccttccaaagtgctgggagcccccattcctggcccccatagtactttttttttttaaagctattaaacacatttatcctaacctcctagctattctataactaaaatgctgtgtgatgtgaatttccttttagagcagtcataaccctggatagacagcaagattctatataatcaaaagcattttaggaaaatgtaataaccaaaacttaggtaaacatgatttaccagagtcccttcatttctaaaatgttcacttaattgaaatttgaatttgttatgtatagatttttaaagactctttcatggttataaactccagtcttaaaattgaagaaatcagggcaaatatgtgtggtagtcaagtatggactctagtgttggactccttgaattcatatcttgtttcttctcttggctaacttttaaccaaaggcaaattacttaatcatgctaaacttcagtttctttttctgtgattgggaaaatattatgactatctcatagtattggctcttaggattcaataagttaatccttttactgtattttggcataatatttggcacactcagtaaatgtttttcattatctttattttaattgaaagctttgttgtattgctagaactcataggtttaatgctggttgttagagttatttttattataactctggttgcctagtcccaagaattgtcttctacctaaaagggacagcataacagagcaatttaaaatgggatatgtgtggccatctattgtagatacctggattaatttgaaggaagttggacatctgtttcagatactcagtttaaagaaacttcacttatacatttcttgccctccttaactcctctgtctttcctcttgagatttcacctttgccagtcatgatagtcctgttaggaatgagaaactaagctgtatcctagagtctcattgaaacaatgggagcccctcttggaagtgtaagatctcttcagtcacataccctattttctcatttcctgaaaggtggttaaatttccctgatttcagtggattagagcctcaaatcgttacctgagggctcacaatggagaaggctaagatcaaggggcctagaatatccttggaaatttcttgtatatctatctgttcattgctctttagacttcacatatatctatttcgaagtgccagtatctaaatatcaaatcaaagcaggttgtttgttcttttcattctaggcagaaaaactaatgaagcaaattggagtgaaaaatgtgaagctctcagaatatgaaatgagtattgctgctcatcttgtagaccctcttaatatgcatgtatgtatctttaatcttatttaagatttttttagaggtgggggtgggttctagcattttgtgtcaggggtcttaaagatcacggccgggttctttgattctctaggctgaatcataagactcggcatatrgttgtattcctgtatatgatttattacactgaaaagatacaaagcaaaatcagcaaagggaagggggcatgggatgaagtctgaaggaagccaggcgcaagattccaagtggagtcacacagtgcttaattagtgcatcaagttgtgacaacacatgtgcagtgttgtcaccaggaaagctcacgggagactcagtccccaacatatttattgggggctggttatatagctttcctcttcccttaaatgtaccaaaattctagactcccagaaggaaaatggatgtttcaccataaaccatattgtttgcacaaacagtttaggcacagtgagctgttcttgtcaagaaattgtggcactcttctgaaatctaagttcccacatgccagccaagggccaatcttgcaaatatgcctttctaaggacaacagtctcaggcctactttgttaactcttttctgtacgcatttgtttagtaaaacttttatgtatttgcctttgtggtgtataaagcgtactgctttaagtcatgtggatttttgttttatagagtttaaacctaaattttcataatatggtatgataacacaggatactaaatcccaggttttccattaatggccttggcaaatgatttcctctttgagtctcagttccctcatgtataatctagagataataatacctactttacctacttcataaggattattttgaggatgagattgatgtaatgtataagatcctatatcaatattttgtaacaataagtatacatttataaattctataaatagaaaatatttgcctaatacattaatgttatattgctataaataagtagaatgaagtagtcccatctccatatctagaaaataaaagtctgcaatgtcttaatatctgtgtatacagagacatacacacaccctagaattaagcctgcatttgaatttggtttatagatttacaatggtaccttcttggaaccctgcctatattaatttctgaataaatctgtactaacagacttagttttttgttgctgttacagtgaaagttattttttttttcagatctggctgctggtttgcaccttccctttttatcatttttttttacattttgaaggaaatgaatctattgtaaagtattgcttctgattggccccaactccagstcctttcaggacaagtgccagtcctttcaggacaagttgaatcaggtttttcttgtctattttgaaaatacgtatgccctgtttttatttataaagatacttccttaagttttaacatagttgtaatttttttttttttttttgagacagagtctcactctgtcacctaggatggagtgcagtggcatgatcttggctcmctgtaacctccgcctcccaggttctggcaattctcctgcctcagcctcccaagtagctgggactacaggcacacaccactacacctggttaatttttttttttttttttttttttgtaattttagtagagacggggttttaccatgttggccaggctggtcccgaactcctgacctcaagtgatccgctcaccttggcctcccaaagtgctggattacaggcgtgagcgaccacgcctggtccataggtttacttttgatggataaaattcagaagctatgttttgtaagaccttatttctaaaattaatttctgtgatgcttgacaacatcctgtataaaataggtacattcctgatgagctctttcccatcagccagtgctaaattatgtctcagctggttctcagtattcttgcagcagagtattttctccttacaagtggaatgaatttagcttattagacccttgcagatttttgagtacctgacttacagatttttaatagtagatagttgactattaaattcctttttccagtttcatagcagtttatttcattactgcttggaaaagtctttacttatgttaatatatgattttaacttatttatgtataatcatcagattaacatttgtaattttgggagcgttctttttactttagtgagtgtacatttgtagtaaaattcatgttgaccttaacttttgccaggttacttggagtgatatagcaggtttagatgatgtcattacggatctgaaagacacagtcatcttacctatcaaaaagaaacatttgtttgagaattccaggcttctgcagcctccaaaaggtatggtaaaggtatatattsgcctaaagcattaaaatcctagaaaacattgaaactttctgccattgtagaactagtttttgtgaaatcagattctcaagaggatgctgagatctatgtgaacagtttcttaaaataattgctcattcttcagcttctgaaattgagataaactttttcctgtatttacatgttaaaatacttgttaaaataatctccttcaatttcttttctcttacttccaagtaaattaaaatttggaaaatcaagattaaagaaagattcaaagtcataatacaagttttttgttttgttttgttttgttttcaagccaagacatttttttcttgtttcacagctccaacgatcttatttttagaatgtaatgattctttttcaggaaatatttatctgcagatgaactagaaattaaatatttaactttgatggagatgtttgcttattcaaaatcactttgaaagtcttggaactcaagaattgaatatgctcataactgcatcattaagtgtaattcttgttcattcaaatctttctttttttttcttttctctcttttcttttctttttgagatggggtctcactgtgtcacccaagttgaaatgcagtggcatgatcttggctcactgcaacttccgcctcccaggctcaagtgatcctcccacctgagcctcctgagtagctgggaccacaggcatgtgccaccacgcctggctctttttttatatttttggtaatgatggtgtttcaccatgttgctcaggctggtcttgaactcctgagttcaagttcttcacctgcgttggcctcctagagtgctgggattacaggcatgagccattgtgcccagctagtgcacatatttctgtcatgcttaaggcttgttaaaggtgattcagatggagtgtaaataatytacagtgagagatatatgtgtgtgttactatggcgttcagatccaaatttcacgagatagcttattttcatctagcagaaactcttatctaatgcattgccaaaactatatgggtttgatatgttgttagtcaagacttaaattattagtcacattgatttttcaaaaaagtggatctttaaaaatatcaaaatagcattatgtatgtttaaattataatgcttataatctttctaaatttgcagctatatcaataaagtgcattaatttacatatcaaaggtaactgaagcctgtacctgtgcatttttatgaactacataatttttgtttctggtaagtggaggatgacagttaacagcaaaaatgacatgttcttttattattaaaacaacaaagctattaggtatttctttttgttttctgaaataacaacactgcttatagtttttcctaacaaaacactcagtttattgtgatttcccccctgccgcaaaaaaaactttgaatgattatttgagcccagatcaaaaatgtatggctatagttggattagttaagtctttactaccctcttccaggttatttgtagtctgaacaaaaaatgacttttctgcatttttagttctcaattggacaatgctagtgaatttaggaaagtaaaataccttttatatgctgttggagaaagcttctttttttatcagtgttatcttagaccaggtaattgggtgatttctccagttggacttggtttaaagacccatttagcagagtggataccaaattatgcaaggaatacttcaaaagttatatgtaaatttgcttcttatttgaaagcattgtccaatttaaaagttacatgaatattttctgattatataaagttttgctatttgaactttttcacctttatgtctggacaatttttaatcaagaataacagttttgaagatcattaatttactttttgaccctcaatataaattggatattggtgtatagaagcagagtgtaaaatcagatgcatccttgtttgttccattttgggactggaactaggttacctaggttagagttattgacaattttatgttatccttagacagtttattgctatctgagctgaaagtgatcactgcttcacacagactacaaaaagataattggagagtgactgcagtatccatgcagtgcatgaggtcatatgtaactattgtgtatagatacaaagttgaagctaatgcacaccatgatgccgctaattggtgacagggaaatgggggcacacataagatattgacggttatatttaaaaagtgatttttttccctcaaacgtctaaaaatttacaacagttaaaattccaacaaaatccatctgaataccatatggcttcctctgtaaactttctgaattctgtattgttattttggtatataaattttattacatttgtgaatgttatacttcatgttttggtgcattctttaaattgtgagtaacctaaggaaaaaaataattttaaaaatagattttctgttataaagacccatattcttctcaagtactttatatttaagtagatttaatttatatagatgtgtatttttgcaccatttggacaaattttatgttaaagccaataaacagttgtccaaaaaagaaaaatagtcactaataaggtggaatatttgtcacaaatgaggattatctcaaatttagatttgtgtatcccaatactttttttgttcttatccttttttttggagacagagtcttactgtcaccaggctggagtgtgtaaccatagcccactgctgcagcctcctgggctcaaatgatcctcctgcctctgggtcctgagtagctggaactgcaaggcatgtaccaccatgcctgcctaatgttttaattttttgtagagacagggtctcactttgtggcccaggttggtcttgaattcctgggctcgttatcctcctgcctcagcatcccaaagtgttgagattacaggtgtgaaccactgtgcccatcctcttcctaaatcttttatttgcatatagcacttactaagtaaagccrttaccaaaaacatccgtcttaaaaaggagtttaaatttttaagcctctataaagcttaagataataaacacagtttttatttgttgaagttggttataaaagtatcagattaagctcaaagaactaatttaaaggttgcaaagctaataataaaagctaaatgcctcacattcattgcagtactcatttgtcacccatcgtaattattatcactgtggagaccattttaggaaagtatatagaaaaggtgccactctaaataacgttatctctagactcactgataatttgtcagacaagccaatctgaattttagtgtaacttttttttttttttgagacggagtctcgccctgttgcccacccyggagtgcaatggcgcratctcggctcactgcaacctctgcctcccgggtttaagagattcttctaactcagcctcccsagtagctgggattacaggcgtgcaccaccatgcctggctaattttttatattttggtagagtcggggtttcaccgtattagccaggatggtctcgatctcctcacctcgtgatctgcccrcctcgccctcccaaagtgctgggattacaggcgtgagccacaggaatggggataaagcagtttactgaataactataaggctaacacacttatgtaactactacccaggtcaagaagggaatattgacagcttgtgtaccttctctgttacagcctgtccccagaaagttaggatagccacaagctttctttgcatattgaatctttaggcactccagacactcataactgctcagttaataacactaattgtaatccttgaagaggaaaaacttaatcctgctaaaaagtaacaaaaccgatctactagaagggaaatattccaagtgatagatgaataatttgaatcaaacacaacactctaaaatctctgaatatgtttatgaagtggtagagtagctacaaagtcaacaaaatatggaggcttttgcataaatactttgttctaaaaaccttgaaatttagtttttaagaaagtaccaagtgtaacaatataaaaacccagagatttaagtaacatgtgtataaaagttttataatggatatgcattctatattaaattatgtgatcaaaatgatgaaattaataattccaagtatctgcaaacaggtggttttagattactattctttattgtttcatatgagccatccaaaagaaaaatgtcagtagaagattcaaattataactgacttaaccaaattttaagcacctaagtgaacttaattaaaatttgcagaatgcttgaaaatacaattaacatgtattggtaaagcttatggatttaaatttaaaagtcagctttagaaaagtttagtttcatatgattaaacttagattagttgctgttagaacttgaatcttcaagaattataaagaccagtagaaaattctatgtatgcttgaggaagagcttgaacattattttgaagtgtttgatgtgaaaaataaaattgctagagttatggaatcaggtgcagatttctttttttttttaaattgagatatttttgggaattttcatacaaaattatttttcctctcattttgaattttatttttattatatataagaaaattttggactcctccagatcccttccagttcaccctagcatgccatctatatagatggcattttaaaaaatactgtttcataggaaaagttgagctttgaattaaacaaatattttgagaggtctgcctattacagtttttgttagggctgtctgtagatggtttattttaataaccatcttagtactaagtttaggtgccagatcatgtagtactgagtttagtaatttggtaaaattataattttagtattatatatttagtattattatatatttaatattattaaatttagaaaatgctatctcattttagttgagaaacagttggtggtggttcccaaaatgttcaagatcccaacctctagatcccttgtattaaaagtgttaccttaaattgtatttagcagcaaaatgctgttaatggagaccataggttaataatatagttttattctttggaaattaaaacaggagtgactgataatttctgtttcttttaggaaaagattgtttggaaaaaggcacatgtcctttggctaaaacttaatctgtgagcaacagcaaaacagtgtttgccacaatctgttttgaagttgtttaccttctgtaggctaatatcaaagcactatggtgcattgtttgcttgtgaaggtggagggccttagatgattttgtttttcaactgttgataaagtggtatgaatttggatgtcaaggtgagcatttaaactgaaccttttcatgaagggagagggcacaggatgctgtaatccccaaatacatgctcttaactgacactgagcttagaacatggcatcttcctttcttctatcttacctactataaacaagattaaataaaagcagaattgaatattgggaaagttttttgtggaaggaattactattctattgattatcatataaattgaagcaaatatccccttaaaggtaataaataacatattcatttccaggtgttcttctctatgggcctccaggctgtggtaaaacgttgattgccaaggccacagccaaagaagcaggctgtcgatttattaaccttcagccttcgacactgaccgataagtggtatggagaatctcagaaattggctgctgctgtcttctcccttgccataaagctacaaccatccatcatctttatagatgaaataggtatgctatgttttctatatgagtatttttaaaggccatttttagagatatttagataaccagatttagtttttaacatttattaggccatgttaataaaacaaagaacataaccaacatcataatatgctatgtataatttctgtgttgtagaatgaaccatagactatatactcccctacttgatagataggtttttctgtcttttctctgttacaaacagtatgcagtagatatccatgtacatgttttctcatgtatatatgtttgcccgggaaagatacctagaagttgaatcatttggttgtgtgatatatctatcttcaacctcactaggattaccagttctttagttattatacctatttatgttttcctgcttggtagtaaacttgggcatcttttagcatgttgattagccatttgggttttcttatttgtgaattgtcaatatttctttggagttatttgtagttttcttttgttgatgtttattatgattacacctattttctagtctatcttttttctgatagttttttttttacagtttattatttggctatagtcagtatttttcctttgtggtttatacgttttgtatctggtttacaaataccttcactatccccataaatgttctctttttaaaaattatatataacatgagataggaatctaatttcattcttttccaaaaagacagcaaactagactatcctttgctgtatgtcatgacttttatattaatggactcttgctatattatggatcaatatttttgttctgttcctggtacgatgtatatataaatatatatagttatactaatacagtattattagtattggatatatatttatatagctttattactgtagttttgaattatattttattattgttaaatttagtatgataggctatgtaaatatgtagagagaaaaatagatacaaatatgtagtatagctttgttttggttacttgtttgctttatgtatcttttctcatcaatttactccagttattttggtgttttggtgtgcatcttgaacagaggaatatatagctagtttattttgtttttgtttttttttaagacagcatctcactctgttacccaggctggaatgcagtggcgtgatcatggctcactgcagcctcaacctccccaggctcaagtgaaccttccacctcagcctcctgagtagctgggaccacaggtgtgtgctaccacacaccactaatttttgtagagtcagggtttctccatgttgcccaggatggtctaaaactcttggggccaagcaatctgccctgccttggcctcccaaagcattgcgattacaggtgtgtccaccacacctggcctattagctatattgtctaaaaattttaatctaagcttctctttaactgggaagtgtgattagtttgattttgttatgatagctgagataattcagatttctttttttttttttcacgctctgtcayggctggattgcagtggcacaaccatgactcactgcaaccttgacctccccggctcaagcgatcctcctgcytcaacctttcaagtagctgagaatacaggcgtgtaccaccatgccctgctaatgttttaatttttttgtagagacgaagtctcactatgttgcctaggttggtccccaactcctggggtccaatgatcctcctgcctcagcctcctaaagtgctgggattataacgcctagctgatttacttctgctatattattttttgcttttaatttaccagtctagtagacttttttgctttattccctttttcttgctacaggtttagaagttatacgttcttttactttagtgaaacgtttagaatatcaacttaaaagtcaagggtaatctctaccttccttccaaataattcacagagaacttagaactcttaggtaataataatatctcatctcttacatgttattgttaaacattttatttttcttctaccttcgatattaattgctattttatactggcattgcttgtttagtgccacgtttgctaggttttttgctcaccattgcttgtttgatcttgtcttttctggatttaactttgtttttactgaagtctttcaaagttctttcagcaaaggttgtacaaagagtagattcttyctgtgtgtgaacatgtgttaattctactttctctcttaaatgatacagaatcacattcagcgtcttaaagctacaattccactgcattctaatctttttaatcttgttgcttttgagaattctccttattgccctatatttgtaagtaatctatcctttctctctagttgctgttagattttcatgtcattctgctatttaagtatggtttttttctaggtctgcatttattttcatttagcctgctaagccacttatctgaggatgtgtgactttcattaattctggaggatttctcagccattgtatatatttgcatgttgcaatgttcccattaaaaaaaaaacaattctcaggccaggtgtggtggctcacatctgtaatcccagcacttggagaggccaaggcaggaggtttccttgagtccagtaatttgagaccagcctggacaacatgtaagaccccatatctacaaaaaaaaatacaaaaattagccgggtgtggtaacgcatgcctctagtcccagctacttgggaggctgaggtgagaggatcacttgagcccaggagattgaggatattcagtgagcataggtcatgccactgcactgcagcctgggcaacagagcaagaccccatcttcaaaaaaaaaaattcttcatctcttccattttgagtcatttctacagtttgtcatttagttctgtacagtatttcatcaattctaagacatactgttttgttttttacattttaacatcttcgaaattaggatagcatgttacaattgagttggcagcattttaagtttcttgttggtacacaaaataatggtacaacttaaaaataattcaatttttgagtagattataaaggcaattctttccttggctatatttaatctttcaactattgggtttgttttttgttgattatatttgaactttagaagttctgtttggttctttataaaatgtttccctttttttactgtagcttgttattttagaatttcaatcccttttatatctttagaattttaaacatactatttttgtgtagtttttgaattgctcttttctgaaattctaattttactttatgttgacttttttttaatagtggtttgtttccttgtgtcatttgtaacattagatggctttaggcttgtttttatatgagaattcttttttgcctaagaagatccagagtactttttctgtcctcagcttagaacttcaggggtctgatcgttcaaaaccaattttagataatttctcagtttgtgtgttcccagactgaatggtggtacaaatttagacttcatacctgaaagagactccccatggtcctagttttttgtgtaaggaggacatttttacccctcagagcccaggcaaagatggacaagtttccttgtacagtgacgagcaaaattttttttcttgtctacactttctgtgagtgttaatccttccaagcatcttggcttcagcctgtatgtagatgttaacaacaaagcagaaccttttgatgctgtatatgtctatatgcatacctgctgtgtatacaaacacaacagacggtagcataatcacatcaaggttttccaactcttatgttcagttccacttttttctgaactctgggattttttttctttgtttcttgcaacctcatatcttcattaaccttttctaaaatacattaatagtctttatttttaataatggttttaagtttgcagaattgagcagaaatcatatagagagttcccatatgccccccagatatatagtttctcctagtattaatactagcatgagacatttaataatgaaccagtattgatacattgttattaaccaaagtccatagtttaaggttcattctttgtgttgcacagttctttgggctttgacaaagcataatgttttttatttatcattacagtctcatacacaatagtatcaaatatttgtccttcccttttcctcccaaactgctagcatccgctgatctttttttactgtctctatagttttaccttttctgtaatgttacagttggaatcatacattatgtaatcttttcagactggcttctttcccttagcaatatgcatttaagtttcctccacatcttttcatgatttgatagcttatttttattgctaaataatattctattatgtagatgtaccacagttagtttttccattcgtctattaaaatgacaccttgttttgggcaattaggagtaatgctgctgacagcatcatgtgtaggttttcctgtggacacaggttgcatctcaactgggtgaaatacctaagagtaccacagcttgatcacatggtaaaacagtgtttagttttgtaagacactagcaaactgtcttccaaagtggctgtaccattttgcatttccaccagcaataactgaggttcctattggtatacatcttctctagcatttggttttattaattttggggatttttagctattgtaatagatatataggtatctaatagtttcccatttttaaaatttgcattttcrtaatgacatgatgtggaacattgtttcatgtgcttatttgtcatctgtgtatctttgttgaggtgtctgttcaaatgttttkcccattttgaaacaattgtaatattttttattgtttgattttttaattttttattgatacataataattgtacatatgtatgaggcacctatgcaatgagcaaatcaggctaattggaatatccatcacctcaaagatttatcatttatttgtgttgggaacaacaattaggttattatcttattgttgaactttaagagttctttttatattttgggtacaagtcctttaccaggtatgtgtttgcaaatattttttgccagtctgtggcttgtcatttcatttccttagcagtatctttcacatagcacgaattttattttatttattttgttttattttattttatatattttttgagacagagtttcactcttgttgcccaggctggagtgcagtggcacgacctcagctctctgcaacctctgtctcctggattcaagtgattctcctgcctcagcctcccaagtagctgggattataggcattcgccaccatgcccagccaattttgtatttttagtagagatgaggtttcaccatgttggtcaggctggtctctcaaactcctgacctcaagtgatccacccacctcggcctcccaaagtgccaccatgcccagccaggaattttaagtccaacttacacatttatttttgatggatcatgcttttggtgttagacataaaaattaatcaagtccaaggtcacctagattttcttctatattatttcctagaagttttatagttttgtgttttacatgtatatttgtgatccattttgtgttaatttttgtgaaaattacagtctgtgttggtccgtttttttgccgatgaatgtccaattgctccagcaccatttgtcagatgtgcatttacttttataaaaaaaaagtctatccaattttttgtttgtgtttgcagatacagattgaacatctgtaatccaaaaatccaagatacaaagtactccaaaattcgaaagtttttgagcaacaacatgatgccacaagtggaaaactttcatgcctgacctcatataacagattgtggtcaaacctcagtcaaaactttgtttcatgcacaaaattatgtaaaatactgtattaaattaccttcattctatgtgtataaggtatatatcaaacatagatgaatttcatatccggacttgggttctatccccaagatatcatatcattatgtatatgcaaatattccaaaatctgaaatttgaaacacttctggtcctcagcatcttggataagggagggatactcaacctgtgtcattttctattttttgatcattccgagtccttatatttatagtatgtttcttctaagcaagcatatagttgtttaaaaaaaatttttttttgaatagaggaggggttttgccatgttgcccagcctggtctcgaacccctggcttgagtgatctgcctgccttgagttttttttttttttttttttttaatttattctaatatcttagtcatgtatttggagactttaatccactcacaatttaatgatggatgtaattatttatacatatctagcattttttcatattattttaagtaaccatcttgccaaaaccacttagtgaagattaggaagattaagtaggcagttgaattttaaaatttatctttaaaaattaggcagttttaaaatgactggtttttccaccttcagaatagatgggttagtttgaattatagtccaatgataggacagattttacagaattaaactttaaataaatctaggatatatgtttgccattgcaggactctcatrtgtcatggtaatgtgtttttgctgaaattactttttataaaaaatacttttttgaagtgtggacatagcacattacaagatatttttgtgccacttgcatgtatgatcgacaaagtttgtgttgtagtttcaatgctaaaatgtaatagttattcagaaataaaagtgatttatagggatataagacaaaacatttgaaatggggattgtactagaaaatcctagatttatttttactgtttttttttttaaattattaggatgtagcacctttcagtcttatattctaaaataaaattgttttcccctttttttaaaaaagcatttcatgttcattgtagataatttggaagacagaaaataatttaaaagagaaagttaaacttgtccttaaatccatccctgagctataatacaacgtaattagcattttggtatatttccataaaacctttttttaccttgtataacatatgtatgtacattccagcatatatgttttaaatcattttctgtcctacatttttcggcttaatagtgttttgctcatttttccatgtcgtttttatttattaacaggaaactgcatgagaaaaaagtatgcaacataactaagagcacatagggttcaggtgacctagaaagttagaggcaaaacacacaggctttcatctgagattccacataactcttccagcctctcagtactagatccttcatttttcttacatatgttgtcatgaatgtatttttagagaagaaacaaaaattatgaatgattgtgttttaatttgcctaataatttaccaagtttattgtatcagaatgtctaaaacacatagcccaatttttttgtaatctttcataaagttttcagctttaaaacactttttttcttttcatttttcttaattgacataataattgcacatatttatggggtacagagtgacatttcaatgatcactatagtatatagtgatcagaccagggtaattagaatacccatcatctaaaacgttttatcatttcagtatgttaggaacatttgaaattacataaagagtaaataaaataaggctaggcatggtggctcatgcctgtaatcccagcactttgagaggccaaggcaggagaatcacttgaggccaggagttcaagaccagccttgacaacatagtcaacctgtctctacagaaaataaaaaaaaaattagctccgcatggtggcacatacctgtggtcctagctactcgagaggctgaggcaggaggatcacttaagcctgggagttcgaggttgcaatgtgctgtaattgcgccattgcaccccagcctgggcaacagagtgagaccctgtctcaaaaaaaagggtaaataattaattcttaatttctaaggttaaggaccttttacttctagactcctttctacgaaaccgttcaagttctgaccatgaagctacagccatgatgaaagctcagtttatgagtctctgggatggattggatactgatcacagctgccaggtatttgaataaaatctgccctcaacttgtgttggtttttttgttcttaatagaaaatttgctgggctacttactatgcttttgtacaaacttttttttcataattatttacacttatgactaagtgataaggatccaaaagaatatggtttgtataaactttatccaatttgaggacttcgtgtttaccaaaacattagtagattgcctaaatgcctgaaacagacacagcagaagagaaaacaccagagtaaagcctgtccttggaattttcagaacctacagtgctaaggagaggaagtgactagtgtccgtgggtattgtgtacatttttttaaaaaactgttctttctgttttcctcggttcttacttttgactttcaccataattccttatactgtcaattcttagtcacttccctgattttcatttgacagagttcattagtagctgaaactgacaacactttctcacttcctgtcacctatgcctatctttaggatcccaattttatacgagacagacttgtatcctaggcttttcctcttcctcctgtatggctgtgaaaccatagcttgttccctgttatgtgaccaaagagaaagagagctttatttttcagttttcctcttcaggttcccagttttcatttagtttttggcctctgaatattctgtgctttcttgtcagcttagtggtttaaaagaaagttaaaaagaagttaatctggcatgtttgttttttcagccagattgctggaaataaacatcctagaaccattttcccttttttttttttttttttaatgaatcacttacttatatctcatggaaaagttaacagtgttcttttgttgttttaactttagtattttctctttttttttttttttttttttgagatggagtcttgctctgtcgcccaggctggagtacagtggtgtgatgtcggctcactgcaacctccgccttccgggttcaagcgattctcctgcttcagcctcccaagtagctggggttacagacgtgcactaccatgcccagctaatttttgtatttttagtggagactgggtttcactatgttggccaggctagtcttgaactcctgacctcaactgatccacccacctcaccctcctgaagtgctgggattataggcatgaaccactgcgcccagccaactttagtatttcctattttgtaatctgtttttgcctttttaaaaaaagtattatatttagaattatttaaaattcagttattatttcttcaattattgttctccatgttttatctccttctggaatgcaagttggatatatgtaggaccttatttctatttcatgttttgttttgttttgttgagacagggtctcactctgttgcccaggttggaatgcagtggcgtgaacatggctctcactgcaacctcaacctcctgggctcaagcgattctcctgccttagcaccccaagtctctgggactacaggtgcacgccaccacacctggctaattttggtgttttttttgtagagacagagtttcattatcttgctcaggctggtcttgaactcctgagctcaagcagtctgcccgctttggcctcccaagtttggctggcattacaggttaagccactgtgcctggcctatttcatgtcttttttaacgtctctttcatattttctgtctttctgtgctatgtcctggataatttcttttcctttcttctggttcatttgaagctcttctactatctgactctttcattgagcttattatttcaagtattatatttttcagttttagaaattcttagattgtttttcamatctaccaggtcagttttgataggctcttgcttattactcatgtttctaattggattagaaaatcagaaccctggcatcaacaagctgtgtagccttggccaaattttataatcactctgtatctgtatagagggaataatatctataaaaagggaggaatattacctacctcagaactgttatgaggaattaacctgagttaagtacataggctttacctccagccttagcttaattcgtttacttctttgcaaaattgtagattaatttatttgagtcttttaaatattttctttttgtggccagagggtttaaggatcccttaagcccaccgcattagcataagtcaaaagtctgaacaacatcattctcaagaagaaaattaagccacatgtcctccttctacattatgtttgtgaaagtgtagttttattatgaggaaaacagcctttagcttttgttgaatggttcaagaaaaaacataacatagataaatttaggtaacattaatagaaacatttttcattaataattggttttgataaatctatgcggtttatcaatgggactcatgtacaggttgccaaaaactaattattctccctgagaaataatacttaaagcacttagacaattggatagttagcccatgtaagagaaaatatcttaatattatgtaccctgtcagagcatagtgttcaactattttcagcaggggatatagaggcaattggatgaagtcttctccagagccacttcatctatagctccacagtatgattctggtacagcataacttaaaacagagttttcagaaccaaaattccttattgcactaatagcaattactgttttcattatgatgagttttgatttgagagagcaaatgctgctgcctttttattaaactgcggtcactttttaacctttattgtattttgggggcgggggttaaagttgatattattaattttgagtaatagttttagacatattctactttcatatgaaccagttagctcttctctagaattgtcttttctatgattatgaagagagcccagtaccctagctagctttcttgtaatatggtcaccaaggaaatagaaatagagaacggctcaatgaaaccggtcactgtttctggaaaccttggtgactgatgacatattcttcctcttgagagacatgagacataaaagatagtgtttttagggtattcattgatgaagttaaagttttgggatgtaaatttaggtctgattattttaaatgtgaaatgataaaaaaattatgttttgttttaaagagttttttttaaacttttattttaaattcaggggtatatgtgcaggtttgttacatagataaatttgtgtcttggggagttcgttgtacagattatttcatacccaggtattaagcctagtatccattagttatttttcctgatcctctccctcctccagatgaagctggaggccatgattcttggcaaatgaaggcaggaacagaaaataaagatttttttaaaagtttgaacaactaacacataaaaggagcattgattttgtttcttaagtagtaaaaaattactgtcacttcctgttttatattttagctcatttgtattgaattaatatatatgaaaaggttctctgcttttgctgcttaaaattactccttagaatttgcttctttatgtgaaactacacgtgatttcaatcacttttgctttttcatcatgagtatctgttatacatactcaataggccatgttttactagttttatttggattccttggttctattttttagtattccatcctctatactggcttttaaattttgttttgctttgtcctatgtttcttcaaatgctggccatttccctttttcccccccaaatattgacttaaccacagtgtcttttgtgatgttttttccttatactcattcattatcttatgcttttagttcattcacccacttttaagatttgtttgttttaaatttggaagaaattttttcttttttattaattttattgagttgtaaaaagtcaataaagaggctgggtgtggtgtttcacatctgtaatcccagcactttgggaggctgagtggggaggatcgcttgagcccagaggtttcagaccagcataggcaacatagtgagaccttgtctctactaaagacggaaaaatcagctaggcacagtggcatgtgcctgtagtcccagctactttctgtcttcaaaaaaagaaagaaagaaagaaagaaaataaagaaaaataaatatgagcattaatattttgattttaggaccacttaacacaaatacaaacttgcattatgttgtgttgtggaactaacatttttcaaatttgtgtttatattttcttcctctaggtggcaaactctcacagttaattgaaagtaattgggctctgaggctcctgaatgtcattcagtgtagagtagaagtaggatataagatttggattatttcagaaatgtaaaacctcttagggagaaataaggtaatgttagagaaatgtgtttccatggaataccaataaatttcactttggatagcagatgtgtattgttactgggttatactgaagtatcaacagtaaaggtaatattgatgtccttcagaaattaacttgttttatatatctttgtttttattcatgtttatttttaaagttctttttttttttttaatctctacatcctttataaataagtgacatagactcagaggttggcagggctgccagcatttttaaaaagagttcttcccagcattttgatgtttgcttatactctgttatctttgtttaaagttggattacttgagactttatttcgcattgagaagctatcacctgcagtgctgatagtaccatgagatgatgatgtgaaatatagagaaaaagtacacagtatctattacagttaccagaatcttcagacttattaaggggaaatgattctctccataatattattatttaaggacttgaattatccccttatactcccaaactgtatacccaagctataacataatgggttttagtcattcaacatgtattcattaagcaccatattttgcaaaatacaatagttttttaaaagcaaattttaataatttttcagtggctatttgcaactgaacattacatactttaatttctagaaagacatgaagtgaaatgcattagttttccagttttgctaatatttgatttatttaggattaacttcaatttatacctgtaaatagttgaataatagtgatttaaaatcagatttcttacaaaggatttagttaaaataccacttaatttttaaaactaagccctagtaataacattctcagaggagtataattggtagatttaataccttctgtcttctttatacacttaggtcatagtaatgggagctaccaatcgtcctcaggaccttgactcggctataatgagaagaatgcctacaagatttcatatcaaccagcctgtaggtggtcttgattgatattatgaagagttaaatactcacctttttataggtcttcacctttaattttaagaagggaatattttgtcatataggggtgcttatgacagggaaggaatggggcagaaaccctgacagtagcttctttgtcctttccactctctttatttctatcctaagattagtgttacttgcttctcttcaaagtatatatatatagttatctcaagtttgcctggctattttagtgatttactttaggatataggaagtcatctatacaggaagatacataagaaaatctaaattatagttttggtttagcatagaatagaattggagaaatttggcttgaagaattgttctattcagaaggcctgccatgaacaacaacagggatttatttgattgagtattggcagatgtagtcagtgcttccctgataggattaatgattccagtagatatcatagtttaccttaagaatgcaaacgcttagatggtgttaaaccagttctgccttctttctagcattttttgttagttaaaaagtacccctctagtagatgattatgacttaccagtacactataattttggcacagatcttcaaatcttgaattctgtctgccttcagactgcaaaggaaagaaaaaacaggttttactagtagaaaatatgttccatacaatcagcatgttacatgtgttgccatttagaggaacttactctaattccatttataatctggctaaaaatcatttgtcccatttatattctgtaatttatcagattggtttttggtagtaaacatgatctctgaaagattgatggttatggactctataaaattactctgatcaactctttactatagctacaactgtaataaagtggttaagtgtgtgcacatccttagaaaatttacccaatgaatcaatgaaaagatttttaaacttaatttaggagactataaaatttatttagtatgactgattttttttttttctttgagacagagtcttgcctgtcagccaggctggagtgcagtgacgcgatcttggctcactgcaatctctgcttcccaggttaaagcgagcccgcctcagcctcccaataagttgggattacaggcgcccaccaccatgccctgctaatttttgtattattagtagagacggggtttcaccatgttggccaggctggtctcgaactcctgacctcagatgatatgcctgcctcagcctccaaaagtgggattacaggcatgagtcactgcacccagcctagtatgactaatatttattgagcattaatatgtgtcacagacctgctaggatctggtggatgggacatgggcctggtccttgaagaattctgttttggagaggcagacacagaaataaataatgtaaaatatgctttatgaaggtatgtttaaagagctatgagagcctgagatgttgatgaaaactaatattctgtcagggaagtccatggaatttacagaatccagctggaccttgaaggatgataggaatttgacaggcaaatgagacaaggaagggctttcctgccagaatgaacaaagtcaagaatttgtggaagcactgtttaatggtgagttctgagggtagtttggtgagcgcagcaccaaggaatatagatggagaggaggctgaaaaggtagactgcttctgggtttaggtgaactttatatgctttgcacaagagttttgattttgtaagcaagacatcagaacacttttttaaaaatttgtttacctaattggttctgaagataatttatagaatctctatcactaatccaatagttagtacaatggacaattaagggttttttaaattttattctttttttaaagacagagtcttgctctgtcagccgtacaattataaattatagcccactgcagccttgactcttgggctcaaacagtctttccacctgagcctcctgagtagttaggactataggcatgcaccaccacgtttggctaatttttgaatttttttacagacgggtctcactatgttgcccaggctagtctcaactcctggcctcaagggaccctcctacctttgcctcccaaagtgttaggattactggcatgagccactgtggctggccagctatggtttttgatgtacagtacaatagaacataggatacagtagcatggaaagtagccacaattaaagttgtaaatttaatatgtygtgtgagtaatcaaaatgggttgtaacaggttttatcaagtttattataaatttgtatagtgttaacatagaaatggaaatttgtaacctccattttattccattttagtgaatacgctttataggttagttttttttcttatgtaatatgatgtaaagtgtatggttaatcttaaaacttttctccaagtgaaatgtttaacagagtatttgttggtgatcacatgacatatcaaattaaccttcctacttgacacacttaaattacagaaagagcagagtttggtttgtttttcaagtaatttgatttggtagtcattgtaaccagctctgctttgtcgatgtttgtgggaatagggataaattcagccatgatagttttaagaagcatctatattgactatatagctgagggattctataaaaggagctaaatgtagtttgtatttattgtatggtgtaaaaataggaattgtcactgggggaaaagcatacagacatgtaaacaaatatatcatcagcactaaattaaaattcactaatataaattagtggtcaaagaaggagaaggaaatggaggaactgagaagttactgttgccatctctttgaattactgataataaattttatggtgagttttcatgagtttcctgcatgaagggaaaaaaaatgaagattgctgaactatagagggaagacattatagtcatagatattcatttactcattaaagattaaaggtgtgttatttcccaaacattgtactaggcactggggatgagagtaagaagatacagttcagtaggagaaccagagataattactctagagccttgaatctagttgctttgacctcttcaaagtttctgtcatctccttataagtattgagagagactttagaagggacaaaatattaggaacactacttgatctttttaaaaaaataaaaaataaaaatgctaactggaaattatcctgcttttaggctttaaaacagagagaagcaatcctgaaactcatcttgaaaaatgaaaatgtaagtagaaaataaaaattttttccccgtcctataaatctgatgttcataaagttattttagagaaaaatgaggaaggaatctgagaatgatataccccaaggatctccagcccctgcagccacagacyggtactggtctatggcctgttaggaactgggccgcacagcaggaggtgagctgtgggctagagctccacttcctgtcacatcagcagcgkcactggattctcataggattgcaaaccctattgtgaactgtgcatgcgaggggggttgctcgcttcttatgagagtctaatgataaatgtaatgcacttgaatcatccccaaactatgcccccctcctccacttctccaggtctgtggaaaaattgtcttccacaaaattggtccctgatgccaaaaaggctgaggcactgatacacctttgaacttgacctgaatcctcttggttgcttatgtaactcagtaactatggtatatgtgagttaaagatacttttcttatgtttttagagccatgtgtttttgtatctgtgcattaaaatgctctgatatttttcagactattgtctgattttatgtaagatacatttgtttttctacagaagttttttgtcgttgttttttacttaattgcatttttttaacctttcctgtggtgctgaaaattgcaatattttttgaagttgaaatttaaatttaagaagttgtggtaatcaaaattttcaatagcttttgtgtttaaggtttttttggtcacatgtttcaaaaattaaagtatgtatatttaataatacayggagaaaaatcttctcttttttcctgtatatatttttttcttttctttcttttttttttgaagcagagtgtcactctgtagtccaggctggattgcagtggcacgatctcggctcactgcaacctctgcctcccaggttcaagtgattctcatgtctcagcctcctgagtagctgggattacaggcgtgtgccaccacactcggctaatttttgtatttttaccatgtattttttgcattttaccatatatttttaccatggtttcaccatgttggccmggctggtctcaaactcctggcctcatatgttatttctccttttatttacttattttttatataaactatcaataacacatacacactgttctgtgcattgctttttttacgtatcgttgagatctttccatattagcatctagtttccttattctgttgtctctctttgtttttacactacataggattccactgtatggacattctggaatttagtgaatcaatgccacattgaaggacatttggattgattctggtctttcactattataaaaattctacatttaataaccttgtgtgtatgtcatttcatacttatacaggaatattagtaaagtaaattatccaggagcggaattgctagatcaaaggttagagtgtttataattttggtagctattgccacattgttacggtttactcatattcctgtgataaagagtgcctcttttcctatagtcttgccaacagaatgttatggaacttcrtgccaacatgatagatagaaaatggttatctctctgtttttttgtttttgttttttttcttttttgtgacatgatctctctctgttgcctagcctgaagtgcagtggtgtgatcagggctcactgcagccttaaactcctgggcccaagtaatcttcccgcctcaccctcccaagcagattacaggcatgtaccagcaagcctggctaattctgtttatttatttagttatttattttgttgagatggtatcttgctgtgttgcccaggctggtgttgaactcctgggttcaagcaatccccccgccttggcctcccaaggctggaattataggcatgaaccaccacagctggtcaaaaatggttatctcattaaagttttaatttgcattctttagggatggaatgaatattgtatgtttaagaagcatttgaatttttttctgtgaactgtatattcatatattttgcccatttttctattgcagtgctccttttcataataaatctgtaggaactctttgtattatggagatttgccctttgtatgatttgaaaatatttttttccaagttgtcttctgattttattggagttttcttcccccccacccaccccccctatggcttctggattttgaatataaatttaaaggcctttcctactcccaagtttataaagtaattttccacactttccaaactcttgctacctgttttcccaaaactcgataactgcatataattgaataacgtggtattcctctttatcccaaacttgatatctaaactcactgttacaactcactgtataaactaataaatcaaatagattctgatagtgaatgaaccttagtagagatactacttttatcaaaatacttgtatttttatggcttccctccttccttgaactaccagaaaccccatggctaattcttctccagccatgccctacttccacacttcctattttttcccattatatctcacccataaatgttttagttgtatctctaaaagaaaaggattctttttttttaacctagcctcattgccatgttatacctattaaataattgacagtaagtcattattttcattatctagtctatgtacaagtctctgattattgttttctaaatgcctttttttaaaccatgtatttgactcaagatcgtatgaatttcctaatttgcaattctttgatactttttatgtctcttttaatttataggttataggttcttcccttatcttgcttcccccccacacacccaaccttttaaaattatttactggagaaactaggttgggtttgtcctaagttgtccacagtctgggttttgccgattgcagaggagtagttgttgctctaatattggtagttggatcaagagactggatgaggttcagggtggtggggaggagacacaggacaggacagcacagcttcataagtagaattatgttcttccatcaggagaaacataatatctcagtggcttgtacgttttacatttaaatctttatcatatttggaatttagatagatgatatgcagtatgaatccaactttggttttgtttttctagatggatacctagttgtccaacacctttttgtttgtttgtttgttttttgtgacggagtcttgctttgtcacccaagctggagtacagtggcgtgatctctgctcactgcaacctctgccttccaggttcaagtgattcttgtgcctcagcttcccgagtagctgggattacaggcacgtgccaccatgcctggccaattttttgtattttttcatagagacagggtttcatcatattgtccaggctgctctcgaagtactgagctcaagtgatccacgtgcatcggtctcccatagcagtgggatttcaggcatgagccactgygctcggcccatttttttttttatagccactacagatgccacttttaccaaattctcatatgtattgtctctgtttctggactttaaattcaggtcttggtctttcgtgtctttatgcactaggattaatactgttttaattattgaggctttgtaagttttaatatctggtagaactatatatcccttgttgtccccgaaccccaaggttattttaattctttttctctgcataaattttagaatcaatttgtcttacatrggaaaaaaacaagcattaatatttttggtggattctcatttaagataatctttttgatgttgaatctttctgcccaaaggcatatatgtctttctgggttgtttacctttgtgtctttcagttgtgtcctaatgatttatttattttttaaagagatcrgatatcttatcaagcagagttccatgtaacttacaaaaaaaaaagagaggagagatagagtctcactctgtttacccaggctgacgtgttgtttttttagggtctcactgtattacccaggctaaagtgctgtgatatgatcatagtgcactgcaaccttgatctcctgggctcaagtgatcctcccacctcagtctcccaagtagttaggactgcaggcatgcttcaccacgcacagctagttgttttttgttttttaaaaatcttcttgtagagaaagggtctcgctctgttatccaggcaggttttgaactcctgacctcgaggtatcctcctgccctggactcccaaagtgctaggattataggcatgaaccaccattcttgacctattgccttaaaacatatcaaaataacatatagtgtatgcaaaagcttaaagaacctagcaaattacaaagattaggatcagtggttatgaatcattttggggggagcatgtcatagagccctttaagaatgagataaaagtagtcttttctaagaaagctacgtatgtacatgaaatatgtacagtttcagagaaattcctaaaattctccatgttttttaggtaaggaactttggtcctagataagaaatcagtaaattatattttgcctttttttttttttttttttttttttttgacagagtctcgctctgtcgcccaggctggagtgcagtggcatgatcttggctcactgcaactttcacctcctgggttcaagcgattctcctgcctcagccacctaagtagctgggattataggcgcgcgccaccacacccggcttatatatatatatatttttttttttttagtagagacggggtttcaccatgttgatcaggctggtctcggactcctgacctcatgatccgcccgcctcagcctcctaaagtgctgggattacaggcatgagccaccgtgcccggttgacttttaattgaatttttgataactgctttcaaaaaaacattgtgtaatcctggcactttgggaggccaaggcaggcagatcacctgaggtcaggagttcgaaaccagcctggccaacatggtgaaaccctgtctctactaaaaatacaaaaaaaattagctggacatggtggctggcaaccgtaatccyggctacttgggaggctgaggcaggaaaatcacttgaaccccggaggcagaggttgcagtgagccgagatcgcgccactgtactccagcctgggtgactagagtaagactctgtctcaaaaaaaaaaaaagtgtagttgtagtattgtttagataaaacacaattggtaaacctttaacagtgatagacaccagtgaaaagtttagagaagaaaataaaggggatagttaataagttcctttgaattaggatggccatggtgtggctagaaatttaacagatactagaaggtagttacaattttggagacttcaagttaaccaatacagttatttaatttaaaccattttaatgaaggatcgttttgcatgactggaagtttataacatttttgaaatatagtgtggtctagtgtagctggagatgatgcagatgatttacatatagctgattaatatgagtacaagtgatgaaatttaagcccttgtaacagagccataatttacacaggttatttagtttcacatttaaacttaagaagttactcatgtcagtgctgggcatggtgactcatgcctgtaatcctagcacttctgaaggtcatggtgggaggatcacttgaggccaggagtttgagacaggtccgggcaacatgatgagacctcacctctacaaagaaattttaaaatttaaatgggtctgcctagttactcgggaggctgaggcaggaggatcacttgagcttagaagttcaaggctgcagtggatgcaccactgcattctagcctgggtgacagagcaagatcctgtctctaaaaaagaaataagaggaagaaattatacatgtctcttaattttagtattcagtattctgctttcttagtactgtctttggaaattcttttaggattatatttttcatggctacagggaattttttttttagacaatctctgctttgtcacccaggctagagtgcagtggcacaatctcagctcactgcagcctccctgggctcaagtgatccccccgcctcagccccctgagtagctgggactataggtgcatgcaccacacccagcgaattttttgtatttttagtagaaatggggtttcgccatgttgcccaggctggtctagaactcctgasctcaagagatccacccatctcagcctcccaaagtgctaggattacaagcatgagccatcccacccagcagatacagggaatttttagcaattctgttattcataaaaccacaaagtatagtctctaatcagttttatgttgcaaaatacgaatgctctctggataattgctgacatgagaacatctcgtcatttcccactggttggtatttatatgctgaaggattactgctacttcaataaaatctgaagaaaattmatttaattttgttaaagatgcctcaaatcagtagcacatakatttatttggtaaactgagcactgtcatacttatacattgtggagctaaataagggttttttgttgtttttttttttaattcacatgaacttycagactttgagttcrtcttctctgaataaaagattgaagcttttgaaatgatactgtgttctactcttttacaattattttattgataggtattccttaacatgattcgcttattttaaaaagatagtgtagtgattttggcttaaggttttaagtataaaaagaattagcactgataaaatttataccctataaaagtatttcgtctgactttaaggaggtagcttttttccctatacaaactgacctgaaattacttttgtatgatatagcagcaatagtttttgttttttgttttgagacagaactgacagtctcctacattctagctgaccaccagcctcatcattctagccagactggaatgcagtggtgtaatcctagctcactgcagccttgaactccttggctcaagtgatcctcctgcctcaacctcctgagtagctagacacacccagctagttaacaaaattttttttgttgagatggggtctgtgttagcccgttctcaaaccgctataaagaactacctgagactggataacttatgaagaaaagaggtttaattgactcacygttccacaagctgtacaggaagcatggctgggaggcctcaggaaacttaacartcatggtcaaaggcgaaggggaagcaagcatgtcttaccatggcagagcwggagtgggagagagtgaagggggaagtgccacacatttttaaaccatcagatcttgagagaactcactcactatcatgagaacaagggggaagtctgtccccataatccaatcacttcccaccaggtccctccccctaacactgggaattaaattcaacatgagacttcggtggggacacagagccagaccatatcagggtctcatcatttgccccagctggtcttgaaataaaattataagtgtaaaatgcttagattacatagatgttatttacaagtatactattaatggtggatataataataaacaactgcataagtaagtatcattctttcaagctattttagaagtctgttaacttattctgctgttgctgcctatactcaaaagctttttaacttgggaattgccttcagagttgcctaatgaaaagagttctcattatttcatggtttatctaaaagctattatcttagaacaaaatgagctacttttagagtgcttgctatgtgccaagcattttggtgagctatacattgttttatttaatcctcatttatctaaggagtacatattagtcctattttacagctgaggaaactgaaacccagagaagttttgtaataacttgcccaggattacacaaagaagtgatggagcctactcttaaccattagggtatggtacctcttaattaaatcttgctcccccagtgactggaatcttcttttctttgttttcttatacttggttggttcatctttctaactgtatcatcttatcaggcacaagatttgtgagtggttagaacatagggtggcccaacaacggagtggtcaaaagacaggaggaagtgttggatgtttaatttttaacatctcagagtatagtttggaaagctctttaaagtagtttgttaaatgtatgaaatatttcaaacatataaacaaatagccccattatcttccacccatatttaacaggcaattttaatatatttccacatttgcttcattttttttttaattaagtacagccttaagcaaccactggccacttcccattatcaccgtcattggtaacctgctgtccaggagttgatagagtttatcaatcccgtgaatatatgtgaacagatacctaatgcatgtgtataggtatatgttatttttattctttttacaaacagtagaaaaattagatccttgtatgtgtctgtttcttaaggacacatgagaagagtttctcaattcacaaaaaattaaaaactacaaaggaaagagaatagagaagtctgactataatcagacttaaagcttctgtgtcacggggtaacatgaacaaagtgaaaaaacaagccacaatgaaaatatttgcaaccctataaccatcaaaggactaagatctaaattatatacatgtatgtacatgagatcacaggtgctgtcaccggtcctaagaactcactgatgtggcagtacatgagacataagttaaaaatcttccagtattgtgaatttgcccatttttatatgtaattatataaatttctgctgtatatgttttgaggccatgttacatgtatgtctacaggggcagaattgttgtatttttctggtgaatttttttttatcattatataatgacttctcaattatgcattttgagtaaaaatctgatgtaactagaactacattagctttctttttattaatcgttgatgtctttcagtcttttacttcctgcttttctttgtttttatttcaaatgtaacacaaagactgtttttttccctttagcataagtattgtctattataaacctcaaatagctacattttgggttcttttgtataaaatcttttaccagccaagtttagtctatttgcatttatggtaattactcataaatttggattcattcattattattttaatgctttccatttattatgctttttctttgcttatttgtcccaaccctctagtcctgagtttgttaatactgctcttgtattctttattctgtttttctcccttcctctattggtttggaaattacacattctctttcttcctttagtgtaccctttctatcctttagtggtacctatgtattttgacatacatacataaagtctaagttaataatatctgtaccctctttttaatgctttaattgtaacactttagagtactttaatgtagatgtctcctctgtcttacatgtccttattgtacagcattttagctccactttgtttttgtaccccaaatgattatgactactataataactattattactactatttatatagctaaagtttatttagatttatccatgtatttaccatttgctttgcttatcattgctgcttgcactcctgccctctgggttcagtttctttttatcaaaaaacatgatttatcttcatgtaaccctcatgtttaggaatgagagcactgtcatgtgaggtcacagttgcagagctggcagtgttgtctcaccttcaagtctcttgtccttgtgtagagttgctgttcttcctaaaacactgtgtcttccacgtatacaaatgggaatttagtaaatataatacaaatacaaatgggaatttagtaactataaggtgtcatttcacatcagtgggggaaagtaaatgttgctgtaacaagtgatgagctgaacaggggaaaaatacagctggacctcactatattgtgttcaaatcctggctctgaccgtgtttacctgtccaggtctcatgattcttatctgaaaatgaaattgatagtttctgagaagattaaatgagaataatacatgcaaagtgcttaccccagtgaatgagacataagaatcatttactagatggtagttatagatttttttcttgcttattttctcttcttaatctgtacataagtttagtatgattagactatctcaagtctattatgtggctaggacagtcacttaattggcttgactataagcttagcttgaggagcaaaagtataggtgctaaattcatgttgagataatagaataccaagcattacaattaaaaggaatgttgagtgttttktttttttttttttgtaatggactcttgatgtaggttatttgccaagtactgtatgttgaatgtattacagaaaaatgtcaccttggtaccttcttgagagatatcaaagaaagtccaatatccgttcttccccatcactctacagtgtatctagtaataattatttgtcttaatcataaggacaaataatgaaaattatatttcaaatttctaagcttttgtggttaaaaaaagcttctagaaactattgtttctcctcccatgcagttataatatgcttaactttctttaagatgggtgtttggtagtatcatttacaatatatttatttttgttttttaagcatgtttttatatttgtttaaggtggataggcatgtagacctgctagaagttgcccaggaaactgatgggttttcaggaagtgacctaaaagagatgtgtcgagatgctgccctcctctgtgttagagaatatgttaattctacatcagaagaaaggtatgttattttgacttgatttttaayacttgtcaaaatcttttagagcttttaggttagtttcttttattttgctttatattagaaacaccgcttatgaaataaaaggtaaatttggattatcaccccctgcaactttatttattgccatttttccaaagcagaattctgaaaatgaaggagggcagaattgtgggaagggtctagaatgaaggaraaaaaaggtgaatttcttctgatgatccgtggaaatttcacatgtaaatgtgaggggaaatttcccatgtaaattggagatattgaagactagacctcaatttgttaacgaaaatgtatttactgaacaaagaaaccatttatcactgcagcaattttacttggaaccagttccaaagtatagtgaagttgagaatccaatttttttaacagccttatttcagcaaagatactaatgaactggaatagttcagccctggtgaaccatgtcctaaaggaagtttcctaaaatgccacttgcctggaaccagtattatactgcatttcttttcagaatatcagccttctaacaatttctgtgattcttggtgaactccagtgtacttttaggggttgtgttaaaggaattctccaactcttgtccctttgtctcttggtctcccttcctcaccttcctagggatttcactccttgcctgtggtattcatatatttaattgcagtgtgttgccatagcaaacttcagcaaaaaaatgttttgcgagctttgatatagaaaggtctgcatgaaagctactctgtcaactggtagctgtatatgcagtggctctggtctcatcatcgttagtgcaccctcagaatctaccttccaaaggttttattcttttttttgagacggagtttcgctcttttgcccaggctggagtgaagtggtgtgatctcggctcactgcaacctctctccccaggttcaagcgattctcctgtctcagtctcagctgggattataggcgcccatcaccatgcccggctaatttttgtatttttagtagagacgggatttcgacatgttggccaggctggtctcgaactcctgacctcaggtgatccacccgccttggcctcccaaagtgctagggttacaggtgtgagccaccgctactggccaggtttttattcttatatataagattaagaggagaaataaccaaccagttcgtaaattttgcttaggtaaattacactaataatgaaagatctatttttttgctgcctcaaagccctgaaaactgtatttcagtatgaaaagtctggctagttttatatttcctgaatttcatattttataattttatatttcagtatgaaaaatctggatggacttgggttataactttttcctgaatgtttttccctgaatatctgtaaattacaagggagccataatattctggactttgtttctcattgaagtagggaggatttggattagttgatttttactratagtgaagaattttactctcaatttgtaaaaagcaaaacatgcatgtaagtatatacctagaaatgctactttttaattacagttttcatgggaataacgtgattttttaaattggaattatattcccatttcaataaaccatataacattttttaccttatggtaatattgtgtacttatagatgtgaagtctttgtagctattttagcttcctacttcttagcactcagtgcttttaaaaaattccttatgatttctctatgtgtagataattcctggaagcatttacatgaagctgttcattgtggttgtctttggggtcttgaatggtaaagagatttcatttttatacccttttctacagttgaaaacaaaattttttttttaccacatgcatctcttttaaatcttggtaaaatattttagggaggcatattctaaagttatttgagtatttgatggttttgtttgcattttagccatgacgaagatgaaattcggcctgttcaacagcaggacctgcatcgggcaattgaaaagatgaagaaatcaaaggatgcagcatttcagaatgttttaacacatgtttgtttagattaagagtaaagatcatttgtacagttcagtgatctagtttggtgtgtcctcttatcagttagtggaaatagaacggaaagagtgctctttaaacaatgagggagctcagtgtttatggttttatactctgaattctaagttattgagatatagttgttacataggtggtattactgttggtcaaaaatcatgaggaggaacagttgaatccagcctgaacgtgggtgcttgtgtttgaccttttcagccatatattgtacagccttatagaatctaagctggtcttaaagtcataaatgattcattgggtcattagtgagaaacggggatgtggttaggtgctggttcctagacatgtgagtatgcgtttgtgtgtgtgcgtgtatgtatgtgtatattaaatgtatatatccacacattttatattgacattctgtagatatgtttgaatatagaaactttttttaccccaactactgaatccaggagtaccaaataatatatagtaaaactaagatttaaggttgtgtcaaaaaggtacagtgattcagccatttccatttgtcatttgtttcaaccttttttaagttgagtgtttttatttctgcagttattagttggatcctccacatcttgcatatatacatgggctcaattattatgtttgtcaggataatcaaatgaaaatactagttcagtgatcagcattgaatggttgttaggcagccatgtgctcaacactgatttcacctcttgagtataaactttttaaatttaaattggtttacatgaaagtggattaaaaggcctttcaaaagaatgggtttgaaaaacctcagtaccctttaatacatgtacatttctttccttttttcatttaatgtaacatgtctgttgtaactatgtttcttaaatattattttaaggttatgtgttctttaattatggtcaaatataatttggtcaccaaaaatgaaataatagtttaaaacaartagctgttactaagtgtgctaaaaatactcattttataattaattttagttttcttagtatattattataaattgtgccctaagtcaggtacaaatgtacacatcaaaatgcccatattgtatctatctgtagtcgtttaatgtgaattatatgtgaatttttttcaaaattttactaaccagaattctgttataggcacctaaccacgcagcatgaggaaaacggcacaacacaatcttgaggtgccttctgaatcatcagattaaattatgcttcatatgtttttgcttttactgtatttctttaaaaactctaaatctttattcatgtgtyactggattaatttatctgataatgtgtctcacaagaatctgttagatcgtttattcttcagttgtactttgaatggtggggtggaagtttcaggtgaacaatggataacaaaaagcaagttatggaagattgtgaagaggatggaaaaactgaatacaagataccaaaaatgaaaaaaagtgtcccatttttaataactatattctattattttataaatgtgtaataaaggggtccctctttattggttgttctccacttaatctttggtctttttcrgtaattttaagttttctgggattttttttggtttataaaacttgtgtttagactttatcttgctatggagttttcacacttctatagcacatatcctagtatctagtcatttctgttttaatatgaatttcagtaatttaattttaatctggtgacatattaatcgaaaataaggagtaatgtatacctccacatgtcctttctttttgtcttctcttaaattcacaatatccagtaggagtggttattcaatttcttcgtggttttaatcatcaaatgaagttagagaagtatactaatcccagcaactatgactcatctaggcatgttaagaccataaagtaattcaggaaactattttcctgatttttaaataacttttagtgttatgtaacatctatccttctgttttagacatgcatttcacatatagttgaattctagattctaagataattcattttgggtaatacttcagagtactggatctagaatcaggcttcctgaatttaaactcaggctccccatthactgtgtgtctgtgagcccagtttctcatctgtaaaatggggcaacagtggcactcatcttaaagggttggataataaaataatgcatgtaaggccctcagcatagtgcctggcacagaattactgctcaaatgttagctgtcgtattaatattgtcacttttgcacactgatgtacatttcctgttgaccaggctcattctttaagcattctccatgcttaaaccagttccataatccctaggcctgtactccagggattgagactgaaaggatcatttatgccatgtttctctaaaagcatcattgctggaagacttttgataagtctgatgtgtctcaagctattctcaggcctttttatgtagagtttagaaatgaagtatttgaatcaatttagtatctcctttactatgtttctccttttaatctcagccaaccccctacctgcaggtaaacccagcattcattaagagctgggttggggtactctattctgtatgcatcataatagcttaacattatttagtagctgtaacttacaggtttaatgctagatgaggatgtctcaagccgtgagtgtgcttgtgtaaaaatggtggcaacatcatctcgttggtaggaattttttacttgaattgttattttgggaaaatgttaacagatttcttctggataaagaaaataaattggatgatgtatattttatgtttctttttagcttctcttaaaatcagaatattgaacagaattctgatatgctgaatatatatagtgcatggctgaaactccagcaccaactgggtgcttcaaatgaagtcatagaataattccatctagagctgacagaaatctttcagagccttcattattaaatttgttatagatttagttatcaaagatagagttctctaatcttttttttaaagctaaagttctctttatttacatgtataggaaaacattctgcctaaatcatgatgttaatgaaaatcatattgaggagaacttgaaccttattaaatatgagcttctaacataattgactaaaatgtgattgtcatatatgacacagatgctgtgtgcagatgatatcaaacctaaaaccacttagcaatgtgagaagaaacagaaaacatcccagttaccctggtgtaaaatttatactatttattaatggccgataagggtctcattactaaaacactgaagtgggattatatttttgtaatcgtctaatatttacagtcataaacctgcatgagaatactttcaaatactagcttttgtgcttttaaaataggtaacagtgaatgttagtattgggtgtgggatgcatcagggacacaggtttgtaaaccatgacaattcagttgtaaaactaaagccaagtgcacctgtagtcccagctgctggggaggatcacttgagcctaggaggtgaaaattgcagtgaactgatattgtgccattgcactccagactgggtgacatagtgagaccctgtctctacaaaaaaaaaaaaaaaaaaccctaaagccaaaacattgaaataagttactgacatgcaaatttggaactgaaactagaacacagtggtgtatatctcactgttctgaaaatacacagtttccagaaattcaaagaatggccaagataactcaaataggggattggctatatccagtaaaacaaaatcacttgcagtcatgtctaagggagatgagggtcatctgttaggccatagtcatagacttacaaagaataccagttaggattctgtttgtagcaaccaactctagctaacctaagcaataaagaatttatttgaaggatataagatcaaacggaagctaaagaaccagactcaggatagaaacttagctcccgaagatttttttaagcagaaattgctcaataatcttgcttttattcatcatggattaaattaactccagctgcttaaaatgcccattcaagatttaaatgcctggacgtgagtgtgcaaacctaggtcagaaatcacccctggcagtcttggagctttgagaggactctacaggaactacttcggcttaaatgatttgaggcaaagcagctgggtttactgattcatcaagactaaatgtgaaaggagaggtaatttattcaaaggaaattgtgggaaagactgttagacaaacaaaatctgacaaatgaccaggtggttacttgaagccctgacattgaaatatgttgggtgttgggtatatactaaatgaagggcaatattataacaagtggacatgctggaagtatgagcaacttacgtatgtagtttgtgtggacgggcctttagggactgctgcttcagatcccataagctccacttccacttgatgaatgctgcttggcttgccccactctgcctagatggatggtgagcaactttgcatggtaagcaaaggctgtcttgtgcaaatgaaatctcttaggcaacagctatcagaagaataggtgactgcctgtggtagtctctgttttagggaggtgtcagagctttatctttctttaggcagataaaggggcttcagagagaaacctctgcttgcatcctctgtttagtaaggtggatagatgtaaatttcctttagaaatggacagcttttcagagctattcctgcctgcagttctcagaataatcaacttgaaatatgccaaagaagtatattctgaggtggcatattgtggcttcccctcattccatcaaacctttagacataagaacaattgactgacctggtgcctacccagtttgctggtttcctgcctataaggaaagttatgttgcagatcagtggtagacctgaaagtcacataatagaaaaaaaggaggataaggagaaaatgaattgctgttcccaagtaatcgagatttgtttcttcttgcagggaagatgattgggaaaatattgtgacctgataaaagtgttgatacatttaataagggtttgccaccatctgactaaatgataacatatgcctttcagagtcttttctgaaaaatatcctgaaacagtttggcatactccttcagcaacactgacatcttcatgtgtttacgtagacatatcccgccactttgccgtactaattggcactaggagccaccaagtaacatggggagaaaaaaggggactacaaatggcagctttgaattggctatttacatcagttgtatttggggtgaggatcagcagcaaaaaaatgcatgaagccttcaggatagaagggaaggagggactcacggaaaaaagctgcaggcctgaaggctgctgaaagttttggtgggaacaggtaaccctttctgcattagaggtacaggggttgctgagagaaaaacccaactgcttccagccctactggtgaaactccttaggggcacttagagaataagatctgtgcctttgaagtaaagggaacaaagtagcttcatctcaaaaaaaaaaaaaaaaacaaaaaacaaacacctgcgatgaagttctgggctaaggaggccgctggacaacccagcaactaccaaaaatgtcattaagtgcttggctgagaccatgtatcttacacatctagagcacaatttagaatatgacaagaataggctgggcatggtggctcacatctgtaatcccagcactttgggaggctgaggcgggcagattgcttgagctcaggagttcaagaccagactagaccacatggcgaaaccccgtctctgccgaaagaaaaaaacaacaaaaattagccaggtgtggtggcgcacacctgtaatcccagctactcttaaaaaaaaattcttctaaaaaaaaaatggatacatgtgcaggacatgcaggtttgtttcataggtatatgtgtgccattgtggtttgctgtacctattgatctgtcctctatgttccctcccctcaccaccccgcaacaggccccggtgtgtgatgttcttctctgtgtgtccatgtgttcttattgttcacctcccacttackagtgagaatatgcagtgtttggttttctgttcctatgttagttttttgaaggtgatggcttccagcttcatccacgtccctggaaaggacatgatctcattcctttttgtggctgcatagtattccatggtgcatatgtactacattttctttatccagtctatcattgatgggcatttgggttggttccatgtctttgctattgtaaacagtgctgcaataaacgtgtacatgtgtcattatagcagaatgatttatatttctttgggtatgtacccagtaatgaatcccagctactcttgcttgaacccaggaggcagaggttgcagtgagccaagattgcaccactgcaggcaaaaaaaaaaaaaaaagaaaaacaagaaaaaaggcagggtgcagtgagcttgtaatcctagcactttgggaggccgaggcaggtggatcacaaggtcaggagttcaagaacagcctggccaacatggtgaaaccccatctctactaaaaatacaaaaattagccttgcgtgctggtgcatgcctgtaatcccagccactcaggaggctgaggcaggcgaatcacttgaatccaggaggtggaggttgcagtgagccgagatcgtgccacagcgctccagcctgggtgacagagcaagacttcgtctttaaaaaaataaaaaataaaaaagacatgaataagggtaaataatctcagttatgatgttcaagagagttgctgctgtctcactccaattatacaaagtcacaaagcccttaagttgtgtggtcaacccacacccaatggtacaggcagaaaaaactcagccttcactctgataaatttattaaaataagaacaagcatcagttgtacatagaaataatcatttgcactaagcatggtactagagcagaagagcagttttaaatgtattttttaagtcacaaaatatatcggttaaggcactataatcctgtctcatgttttcaataaatatgctgttttttttttttaaaggcagtagtgagtaaccgattacatgagtataggcactatactattaaagacaaactgctgtggccattgtgtgtaacttattctcaaaagaacttttgttagttaagattagtgttttttaagaatgagaatatgaaaattgtcacagttttctctttctaatttaggtctcttccagagagacctatatattaaaaggtgctgtttcttcactttattccttggcaacaatgaattatgcataaagtaaaaacattgcctctcaggaagtaaagccatcagaagatgtctcagaacagcttgaaatctttggaatagctttttttttttttcaactgcaataaaatcagtgcagttcagaaaactcgacctttcagtatccgagaaggcagctttgtaagcactttctgttcgaggaactttgttaagcagctgaggggaatctgacccagctcctgtgttgtctggtgtagacagggcaccagactgggagtcaagtggcctgggtgcttcttcactgccaccagcacttcctaataatggcaaatttacattttgttacggtgctcacagcttacaaaacacatacatgtgcatcatcacagtttgttcacctgtaagatgaaagggttggattctttgttttctgtggtcttttccagttctagtgccttgctagtctgatagtgtgaattattttttattacagctggcgctgctgctgcatcagggccatcctttctgcaagacacaatgaccacagcaaagagcgggaaagataactttccacgacatcgccacattgtttgacgtcctttcatcaaatcactgtatgctattaaaagtcaccgtgtaactggagttacattattcacagaggccattaagacttctcttattagacaatataacttttgtgacagaaataggctgcacagatctctaagataaaattcacgttattgcacattttgtttctccagtcaggtcttcaacacgtaagatatgattacaacattaaggctttgtacagcatgaggtaaaatatcaggaagaatcttgatgtgagccacacctcttttagagtgagaaaaaaaaattttttttttttggtcaattgtacagaagaggacacaatctgatatattttacaactgataaatgacattggaagagtacaggttgtcaagacatgctggaaaatatattcacttttcagcaagtaactagacacatggtcaaacaaagccttaagaaatctgggacctgcctgctcaggtgcagtagaaaatacatagagctaattttattatgaaat

SEQ ID NO: 95131 - DNA, 83909 bp, Homo sapiens
gcagtcagcatccctacccagttgaatgaactgggtaagtgaaagaaattaagaaagcaatgagcaccatctagtggccagaatttttatttttcctcacaatatttaatcactaccttacattactgatgagtttgttcaaacttactgcctgtctcccctccctactagaaaataaggtccagtgggcagggtctttgtcttttttgttcctcacagcatcagtagagtctagaaaggttgccaggcacatatacatataataaataatttttttaaatgaatgaacatcttatatacactttattatcccaactccattcctaacacttctccctgaaagtttacaattattaaacatcatattgattatttcacgagtttgataattatttatattcttgtgctatttataatagaatcttctccctctactccccacaaaggatttcatcagtatcccttctttaaagacctagaaaagctggtgttgattaatattcctaacattgctctagggatctaactggcatgaagcatctagcactatctttgggccagcattgtgaacactgctgcaataaacatgggggtgaagccatccctttgatatactaatttcctttcttgtgggtatttacccactagtgggattcctggatgatatggtagctctgtttttagtttttgttgttttgtgttttttttttttttttttttttcaggaacctccaagctattctccatagtagttgtactaatttacattcctaccaacagtgtacgaggtttcccttttctccacacccttgccagcatttgttattgcctgtcttttgaatgtaagccattttaactggggtgagatgatatctcattgtagtttttatgtgtaatttgcatattttgaaccaaccttgcatcccagaaataaagcctattggttatggtggattagctttttggtgttgctggatttgatttgttagtattttgctaaggacttttgtgtctgtagtcatcagggatgttggcctttagttttctcttttttttttttttgagacggagtcctgctctgtcgcccaggctggagtgcagtgcctggatctcggctgactgaaagctccgccttccgggttcaggccattctcctacctcagcctccgagtagctgggactacaggcgcccgccaccacgcccgactaatttttttgtatttttagtggacacggggtttcaccgtgttagccaggatggtctcgatctcctgacttcgtgatccgcccgcctcggcctcccagagtgctgggattacaggcgtgggtcactgcgcccggctgaagttttgtttttttgctgtgtctctgccaggtttcgatatcagactgatgctgaccctcaggggttagtaaggagtccctcctccttgatttttctggaataatttcagtaggattattgacagctcttctttatacatctggtagaattcggctgtaaatccatctggtccacaggtttttcttgttggtaggttttttagtactgattcaacttggatcccattattggtgtgttcaggatttcaatttcttcctagttcattcttgagaggttatatgtttctgggaatttacccatttcttccaggttttctagtttgtgtgcacagaggagttcataatagtgtctgggtattttttttttctgtaaggtcaatggtaatgtcatatttgtcatttctgattgtgtttatttggatcttctttttccttattaatctaatagtctttaaatcttattcttccaaagaaacaacttttggtttcattgatcttttgtatggattttgcatctcgatttcattcagtctgctcaattttggtcatttcttttcttttgctagttctggagttgatttgctcgtttttctagttcctgtaggtgtgatgttaggttgttcatttgagatctttctaacttcttgatgtaggcgtttagcactataaactttcttcttacccctgctttaactgtgttccagagattctgatatgttgtatctttgttttcattagtttgaaagacttttttgatttctgccttaatttcattgtttacccaaacatcacccaggagcaggctgtttaatttccatgtaatttatagttttaagagatcttctgggtattgatttctatttttattgtgctgtagtactagagtgtggctggtattattccagttttttgcaatttgttgagaattgcgttatggttgagcatgtggtcaaccttagagtatgtgccatgtgcagatgagaggaatgtatattctgcgccaaactgatttgtaaagtcaaaattcattttccctttttaaaaattgttcaaagactgtaaagactatctgactgattcaaatcacaaattctaacagttaagttgctatcaatacagccaaacgtgtatgtgaatagacagacaacagataaatgagacacacatttaccctgatcagcctttccatgggttaagtgtacaatttctattatggtttttgaaatagttgaactaatgtttgtatagctattattatctggctaggaaacattagtttaatattctaatacacacacataaatattgcatttaaaatacttacgtgagactgaaaactgaacataattctctagagcaggattataaggtggaaaagtctttaggaacttacaaccccacacttagttgtcttgtttcctagagcagtccttcttagtactactgtagggttataagataaaggaaaatgtagtcctgcctccttgactcttagtacctagaagtcacagatacctcttcagcagcattttcagataatgaggcattgctactatcttccaacttgttttcctccctcactcctctattgtcacctggaagacccatgtaaaaggaaagcggaatgcctttgggaatcaactagaatagtagtcagtaaacaattacaggcaaactgtggctacacttcaggaaacaaatgtaaaagagttaaacaaaattgaagttgatttatttatctgcaaatatagataattggtccagagctggagtggtggctccatgatgtcagggctcaggatccttgtctctcattctattgcactagatcatcttgaacttgtagattccatatggtggtccaagagggctgcaggcatcttagacctgtaccatgcacccaaactggcaggtaaactgcaaaccaagggaacaagaagggcctaccactcctttaagacatttcatggcagctgcacgtacagctcccatttatatgccattggccacaatttggtcatacagccaacctagccataacagagggtggaaatgcattctttatacaatgcacccatgtactttgctgaaacttggggactctattactatagatttaaaaacagattgtgacccaaaaaaagtttttttaaaaaaatagaagagagtatcaaatagtgggggataaatagcagccccatcctaaagtttctctttccctttttcgtaacgaccaatgttatagtacttactaaggactgagtactctcctaaatattgttggttttgttttggttgattgattcattaaatcatttaatccttacaataacactctgagtagggttctattattcactttttacaattgaggagactgaagcacagagaaatgaaataacttgcccaaggtaacacagctagaaaatcgcagaggtggaatttgaaccaggcaatttggcttatccattatgctatacccctttctctctgttatatttcaaaatatttttagttctttagaagaggcaaggaaaaaggcctaatctacataattttttattcagaaaacaagggtataagggtaattttttattcagaaaacaagggtataaggtaatataagggtaatattagggtataagggtaatttttgtattcagaaaacaagataaaagggtaaagggcaatatacctattagctagtaatttctttttcttttttttttttttttttttttgagatggagtctcactctgtcacccaggctgaagtacggtggcacaatctcggctcactgcaacctctgcctcccgggtcgaagcagttctcctgcctcagtctcctgagtagctaggattacaggcatgcaccaccacccctggctaatttttttgtatttttagtagagacagggtttcaccatgttggtcaggctggtctcgaactcctgacctgatgatccacccacccaccttggcctcccaaagtgctgggattacaggcgtgagccaccatacccggcctattagctagtaatttcaaggactcacttacacggcctttttgtacattcagggccttttcaactcctatttccctttccagaatcatttttgcaaggctgcttccttaccattcaattctgagttctaatgtcacctcctcaaaaaagacttcctgaccatcctatttaaatttgcagctatctccacccatcactgcttctttcatagcacttaccaccctctaaagtcattttttatagttacttgtctattgcttgtctctccctaccagaatgtaaggtttaagacacatgttttctctacctcattcttcccagttgcctcaacattatatgagaaaaagaaaaacagcccttggtgtcacgaacagaactgacactttagtgttgttaggaattgactgcggtgttcccctgttaaaacataacactctcataaaacactaacatcataccaggtcattctgtgatcataatgaagtgagacaacaaacaagatcacactatttttgcctaaccagatttttaaaaaggtcactgtgcaaactacaaaaataccaaactatcctcctcccccagctaatatgattgttgcttctttgccgattacagctttagccctacacctttcctcctcccccagctaatatgattgttgcttctttgccgattacagctttagccctgcacttttcctccctcctaaaggtgagatgtagtatgatcaccaatcgcgggggaccccacagccagtgcgcgctgagtcacactccacagccaatcccaggccacatccaggctcgcccctacctgtacacaataatttctccatgcacctaaccgtcttctgaaacttcctgtacctagttgaagagtatattcctttaatcaatgtatacttttgttccctcctttagaactgaataacaatgctaacgcctctcccactccctctagcctctcatcctcttaaaatagaagaggaaaaatatccaaacataaaattcaatttttaacaaaaactctcctttcgctgacactgccctccccaaagaagtcaccagtggtttccttgttttcctagagaattttctttttcgctttttagtgtcatttttcttccttcttcagtctcacatgtccctttcattcttagtttgctgatcaaactcatatccaggaaagtgaagttcctttacgctttttaaccccacacccccatctcaaatgacaaatgcatctaggaaccccttttcacactctctctagccctgccctctctcaggcaccttccaaagttattccaacccgatccctccacttgtacaagcccagcggccccacagcttgcccatccttgcaaaccagtcctcgtcctataacctgccccaacccgatcagtcgcatacatccgattcgagccctggggccaaattccatacccatatccaagtccccgccccactaactcgagcccgcacctacgcatgcctgaaccagcatgtgatcccggccgactccacagccaatggagttccctgagtccacacccatagccaatccccggccacgtccaggccatcctccatcttgtccccttcctcactcaagcccaacccgtggcccccaccccttccctcctccatttccatccattccgcgatcgcggcggaccccaccgtcatcgcgcgccgtgagtcacactccacagccaatccctggccacatccgggctcgcccccgccccgcccccttgttcccgcaagcccggaactgcccaaatcccgcccctcccctcccaaaaaaacacccctcatccagtctcttccagcctagagatcctggcctacccctccgccaaagcgcgcactgagtgcaaaccccagagtcaatccctgtcccggctccgccccccgcgtccgaatcccgcccagccgggccctcaagcccagtcgggactcgagcctagggaggcgaggttcccgcaccggataggtgagtggggcgggcgcgcggcgcggcgcggcgcttccgtgcggactgactagggccgtcccggcgtacggggcgagggaacggaggycgggctcctcttgccggagtcgctgcggggccgcmtgcgggggtggctgcagggagtcggccctagattarcagtttgaggggaaggcgccgaggtgactggcctccaggggggaatcccctagacccgggtcaccgtcttggcgcttttactcttgatttcgctgtttgggcttttagaaggcagtctgagaagaatgactttgggactcttaatttaaaaatacgaaagaggctcacccctgtaatcgcagcactttgggaggccgaggcgggcggatcacgaggtcaggagatcgagaccatcctggctaacacggtgaaaccccgtctgtactaaaaatacaaaaaattagccgggcgtggtggcgggcgcctgtagtcccagctactcgggaggctgaggcaggaaaatggcgtgaacccrggaggcggagcttgcagtgagccgagatcgggccactgcactccagcctgggcgacrgagcaagactccgtctcaaaaaaaaaaaaaaccmaaagaataccaaggctgttacgttgccttataaatgaagcttagcagaatccaacatttgtagttaaaacagaaagrcagtctgttgcttttggagtcgagtggcgcagaaatccttccttcgcttcgcccacgcgtggctccttggcggccacctgagggggactggggctgcaggtcagcccttagcaagtctgacttcgggagccaaaaccgaattcctgctatcagccaggcagccgcactgctttccttctggagaagtttatagttacacgaatccattttcatagaacagtttttcagcaatttcaggctcgtgtctccttaaagcatatgctgcccaactttggctaattctttccgctcttgttctaaagacgtggctttgaagcgcatccttccactgtactcccccgtccaggactttgttcaccgtctagataccctctgttgtatcggtgaaccttataaacattctagaagcaaactaacaaggtagagtgtgaaaggaaaatcatctttacagtggtcggactcttgtaacagtgtgggcggcgcattattagctgtagccctttttgcctcatgttaatcttgcttgaacttgcagttaacccagatgttctggactttgtcaaattaaatctcttactacctctcctccccatgtgtgaagtataaattgatcatttggatttaagtctagagctttaagtttcttaggatttattttgacgggcttgtctgccttttagctttatattcggccccccaaaattcaccagctttctcagcttcgggccacccccaaatctgccaagcatactttctgaatcttcattttaaacagtctaaaccgttgataataaatcgacagtttcatttctatagatcatgcgttttggaatatggactttatgcataatatgctataattagatcacgtagatcatcctgattcataagttgccaggttttcttcacagaaattgtttttagggagaaactagaaaaatacaatgaaaatattgtttagaattaaaagccatatacctttttattttctccaacttttcgatgacatctaaatttaatgtatttatctcatttgtgaatatatatatatgcaatgttgattgcattagaaaatgctgctcaaaatacttaataaaatgcagatgtaaactagcttgattcaaaggttctgagtctgcattttttatcagcctgcttagatttcttcagagccattttttcacctatgctcccacagttccttacacaatgagattacctagtgagagggtcataagtgagatggaaagagagcctaggtctaggtcttggaattccatcattcaatggcggattgtgggagaggcaggagataaatgagagattgtaagatgtcaaaagccaaggggacatggtgtttctcaggggaaaaagggcttgcctgccagtatctaaagctgcagagagctctaggaaagtgagaattgcaaaatgtccactggatttaacaatatgaaggtcaaaactgactttagcaagagttgccattatggagtaatgggtgaaaagtcagactgcactgggttgaggagcgtagattgaggaaaaggagagagctagtaaaatgagcaacagggagatggtacagtcaagagttttattttttgtgttttttgtttgttttttatgttttttaaccgggagagacaaacaaagttgaatatgcaggagtaaagaggtaataatcagtgaagcaaggtatccgtagagggaatgagatctaagtcgtggaggagaggcgatccttttaaaggagggtaatttcctttattatactgggaaggaaaaaacaaggattttttagatttgggaaagtagagagcgcaatctgcttggactgaggaagaaggtagagggatttagtttaaaggagtgtgggaaaaatttaaagaatcattttggactatgggagacaagtgttacctacaaaatatagtagaaatgctgcagtgttgggggtcaatttaagactgatgaccacaaatctgtggtgaaaccaatatcccgtgggactttctccagcagtccacagccaggaagtacattgcatgatggaggtaatgtgctgtagaagacagataggagagaggggtttgggatttaggctttgagatttcaagatgaaaacaagtagacttagatttaggggcagctccctaagaaggaaggtgggcattgaggcctggtacctagagagtatggctcacccagtctggggtgaaatctcccagaagctgcactccaagcttacttgcttttattattagcacattacctccatcatgcaatgtaattcctggcaactgacccaggtcttcctttctcttccattttccaaagtttcagctgtgtcttttgggacagctgcgccataatcagcaaattccattgtatctttatgtcgttagagggttcccgctacttgcttgctttaactcaaaccttattaatttattcacctattgtgaaaaatggagaaactgaggcccagcaagagtccataacttgactacagatagaaactttttttaagattgaattctgctttaatctcttaatgtggtgaatcacattaataggtttcttatataaacccaaccccccttggtcatgatgtattatccttcttgtatactactgggtttgatttgttagcgttttatatagaagctctatttagtttccatagattaggtctctttttctctaaggtttgataactgttagacgacatgccatccactgatacagcagccttatacagtagacttaagagaacaacattctcagagtaaaaccttatgagaaatatctatttgcctgaatgtttttagaaagctgggttttctttccacttctaagtggcagtattgtaatagtttcattgccttgatcttcctccatttacccatgacggatatcaattttatacttacaggtagagaagcaattcagaatgcatgcctatcatgccactggaatccactaaaatggcttgtgggaattgttggaggaagtaccttcagaataacctaagattcactcatatattctttatatttatcaaggacctactatcattcgtcttttcaaacaactttttaaataactgtttctaacaactttaatttactgttacaaactatgcttttactagtgactgttatccagaggattctgaaatttgagtagttcctagattgaaatactctggattttatagctgctagaaatggaactttcactttctgaaatttaatgctcttgactaaattaaagccttatttttttaattaagaatattcttaaagctctctagtttaaaatgatgtgaatataaatttgtgtaggamgaatacatttattagaatgcctccagtgatgagagattatatcatagaaagaaaacttgaaagaaagcaarctcacttatcaaaaatgtttacttggattttacgtaagcttatgatacatcagctagctgtaagtgtctgatagtgatgtacccatcatatatttattcstcttctcaatttttcttttatttaatagcatgtttttggcccagaggagcctctgctctcttagcggtagagcaaaattcctgaagacaatttcttcttccaaaatcctcggattctctacttctgctgtaggtattgcttacttacagataaattattgtacatattctgcactgtccaaaaaatatgtaatttttcagatgcttttttacaaatactttattgaaatgaacatttctattacatatgctgaaggtgtctcttgtcattgactagaattgacattcactgagcaactgcttgcctgtctgtggatcaggccatgtgctggtcattatatattcattacctcattttgtcttcacaaaacccttcaagttatgaatataggtccagtggcatgggaaaaaagtagaagaggatatttcaggaggactgctcagggatcgaaaaaggtttaaaacccataaccaccaaatacaatacgtacatctgctttaggaacttgattcagtcaaccaaaatgcagaaagacattttttaaagacaatcagagagatacgaatgtggactgggtattagatgttaacaagaaattattgttggtgaggtgtggtaatgaaattgcagttatataagtagcaatattttttagataatatgccaagtatgtagggatgtaatgacctaaggtctaagatttattctaaagttactcagcaattacagaaaaaaagaggcaaaatcttgagaattactgaatctgggtagtgtgcatatgagtgttttatattaggttaaagtatatgaaattgctatttttgtatgaaaattccatttttggcatatgaagtaccatttttgtcataactggttgaatattgacaattttgtattcaacctaattctaatctctcaactggtttaaaattttctcagtggtttaaaattttcataaaaaccatcatcagtgtcttctatatgtaaatcttatgaattctacctcataactgtcttgaattctctcctctttatgccaccgtgaccacctttttcaggccctctcccaacatagaagtcggttgaagccagggaagtggttgtgcttccccaaggtgaacatatgaaaccatggcactaaaagggcatttgtgtgcacaatcctcatttgtggaacttttattagactacgtatgccagggctcaccattatgcattctaattctacatatctggaatgtattttgaaaaatctttccagctgattctgatgtatgtcccaggcaaaaaccactgacaatgcattattcaaacttgtggactatttgggatagcactaacccctctccatacctagcagtggaatggttgggttgtgtggtagctttatgtttaattaagtaactgccaaagtgtttgtatcattttaactacattggaaaagtgtctacagttcatcagaggctttgcatttaaaatagtcgcacagggataaagataaatattcttcctattgctggacgaatgaaaaacactggccagtgttacaaaagcaatagtgataagtttaaatcaagaaagacttgtcagaaccagccagataagttactgtgaacttacttagaatattcgtttcatccacatcatccttaatgtcatgaaaatctgccgggaagggaatagaatgaaggataggctgtattttcctgtattacttgcttttttacaaaaacattttacatattctctaattttaaagaatgttttgaatgctaaaggaaaaatgtaggcggggcgcagtggctaacacctgcaatcccagcactttgggaggctgaggccagtggatcgcttgagaccaggagttcaagaccagcctgggcaacatggcaaaacctcatctctattaaacatacaaaacattagctgggcacacacctgtagtccaggatggtctcaatctcctgaccttgtgatccacctgcctcggcctcccaaagtgctgggattacaggcgtgagccaccgcgcctggccctaaaatagtctattaatttttttttttttaagagagtctaaaatttaaatgtccaccagagaagcgcaaaagcaacactggacaaaaccttttccttaggtctgtccttccttaaggaaatcaactctctctgtctctctctctctctcttttttttttttcatacagtctctcactcttgccgcccaggctggagtgcaatggcgcaatctcggctcactgcagcctccgcctctcgggttcaagcaattctcctgcctcagcctcctgagtagctgggactataggtgcccgccaccactcccggccaatatttgtattttttgtagagacggggttttgccatgttggccaggctggtctcaaactactgggctcaagtgatccaccctcctcagcctcccaaagtgctgagattacaggcatgagtcactgcgtccagcccaaccctctcttttgatgtgaaagtatcaccttttgtacatttagtccatacccaatatctctttgcctcctttagtgcaaagttactcatccttacttgtatctaagagaatctttcctactttctgagtgggcactagttttggagtatatatattgtatgccatgaactatatttttctgcttatggctttgcctcatttaattgccatagcacttacatggggcaggtattcattttcctgcttagcaaataaggaaactgaatttcagagatgtcaggtaacctgcctacttcacacactaggagttttgatgtttaattttgaactaagatctatctggcttgaaagctctttgcattaaacaaccttgaacaatatacttggaacgtaggtgtgtttttggcacagaacatggcatgtgtgtgagggattgaacacagacttgcccagattcaaacttaccaatcttctgtttcatgtgcccagaagaaacagcctgtttctcagcctcaaacccaaacttctagttgtcttgattggttcagcctgactgtccaactctgatttatagctgtgattgggggagctgagattacacagtgtaggcaggcagaagggccccaggcctattgatatgggtgaggacaatactcacgcactcccttcacttactcactcttccaaggtcttggcttgaacccaattttttttgagagaataaaccaggctttttgttctccacttggcctgactccatttctggcattccagccatgtatttagctgttatcagctttcagatttagagaaagccttgtttccaataagcttgtttctctgaagtaattgttaaaatataattttcagaaaaaggttaaatcatgactcatacaaatataaaaatgaacatgtgctaaagatttttatttcactcatgtgatatgaagtaaccagacagaagttataaccagtacatatggaaagtcaaaaagcacaaattcatatgtagtaaaggaattggattgcaaatgaaggcaaaactgttttttctacagggtggagggaagataatcaaaatgctagaaccagaatttgcatgcctgtcacttagcttcaatttacaaaagcccagaataactcaaaggcaaattctagccctgcaaatatcagccctaaagctgtgctgtggccagtgcatagttttctattgaagtacaattttttccccaaatacattatctctcagagggagtccaaattgcttccctttcactcagcagatctgttcagtcaacagatgttaaatagctacagcgtatcaggcacaaataattctttataaaataaagtaacaaactatatgttgtttcaaagttccagttaaggccagccgtggtagctcacccttataatcccaacactgggaggccgaggcaggcggatcacttgggctaggagttccataccagcatggccaacatggtgaaaccctgctctactaaaatacaaaaattagccaggtgtggtggcgcatgccggtaatccaagctactcaggtggctgaggcacaagaatggcttgagcctgggaggcagaggttgcagtgagccaagattgcgccgctgcactccagcctgggcaacactgtgagactcctgtctacaaaaaaaaaaaaaaaaaaaaaaaaaagcaacaaaaaaagggctcctgttaattatacacacttttgagcttaatataattgcattttttatgtatctttaagcatctttccctgctttacatttccacttctgagttttactttcatttcttccaccattacaggaacattctgttgttttcctctgccatctagtggcaaaagaaagtaattttcctggttttttgaatggatagccataccttaaaaagcatccarattgcgcagtagtgctagcggcttcgcggttcagtcctcctaactgacagccgccactggtgctgagctgctaggaagcccctgtcggcgagcttgttggagcttgaacccactgtcacccctccgactcaccggcaaaaaaaaaaatggttgaagcagatcgcccaggaaagctcttcattggtgggcttaatacggaaacaaatgagaaagctcttgaarcagtatttggcaaatatggacgaatagtggaagtactcttgataaaagaccgtgaaaccaacaaatcaagaggatttgcttttgtcacctttgaaagcccagcagacgctaaggatgcagccagagacatgaatggaaagtcattagatggaaaagccatcaaggtggaacaagccaccaaaccatcatttgaaagaggtagacatggaccgcccccacctccaagaagtagaggtcctccaagaggttttggagctggaagaggaggaagtggaggaaccaggggacctccttcacgaggaggacacatggatgatggtggatattccatgaattttaacatgagttcttccaggggaccactcccagtaaaaagaggaccaccaccaagaagtgggggtccttctcctaagagatctgcaccttcaggactagttcgcagcagcagtggaatgggaggaagagctcctctatcacgtggaagagatagttatggaggtccacctcgaagggaaccgctcccctctcgtagagatgtttatttgtccccaagagatgatgggtattctactaaagacagctattcaagcagagattacccaagttctcgtgatacaagagattatgcaccaccaccacgagattatacttaccgtgattatggtcattccagttcacgtgatgactatccatcaagaggctatggcgatagagatggatatggtcgtgatcgtgactattcagatcatccaagtggaggttcctacagagattcatatgagagttatggtaactcacgtagtgctccacttacacgagggcccccgccatcttatggtggaagcagtcgctatgatgattatagcagctcacgtgatggatatggtggaagtcgagacagttactcaagcagccgaagtgatctctactcaagttgtgacagggttggcagacaagaaagagggcttcccccttctgtagaaagggggtacccttcttcacgtgattcctacagcagttcaagccgcggagcaccaagaggtgctggccctggaggaagccgatctgatagagggggaggcagaagcagatactagaaacaaacaaaactttggaccaaaatcccagttcaaagaaacaaaaaaaagagtggaaactattctatcataactacccaaggactactaaaaggaaaaattgtgttaccttttttaaattccctgttaagtcccttccgtaatttttatgttyttgtgaggaaaaaagtaaaacatgtttaattttatttgactttatgacattgcttttcaacaagcaaatgttaaatgtgttaagccttgtagtactagtgttgtaactttccaagtaaaggtgtccctaaagaccacttcctatctggtttttcccagtaaatgaggcaagcaattctaagatcttccacaaaacatctagccatctaaaatggagagatgaatcattctgcctatacaaacaagctagctattagagggtggttggagtatgctactcataagatttcagggtgttttctaactgaaatctcactgttctcagtatgcaaaacctgaaatcagatgcctatgtaaggaaagtgctattcacccagtaaacccaaaaaaagcaaatggataatgctggccattttgcctttctgacatttccttgggaatctgcaagaacctcccctttcccctcccacaataagaccatttaagtgtgtgctaaacaactacggaatactaaataaaaagtttggccaaaaccaaccatgaagctgcaaaggtgcttgctcttactctttcaaatttttgcaactctaatgtctcacttttaaaggaacagcttgattgcaaaggagaaaatagataagcaatgaatttatctccaacttcctaaaggcttatgacttctaaaaagtgaatctatcagcattccacatcagatttaaagcatcaaatgcctgtgaaacagcaaagatggttgaagattgtgctcattatgtttgtggagtgctgattgattcacagtagataacgctggcagtaagagaaatcaaatgctaagagttgttgaagcagaaggcggctgattgttggtaagtcagtgcagttgcataagcagtgctgtcagaattggtttggtgcaggcaatagattttgccttcaagggttcctgtggatctcaggaaggcatcagtgttgattaacactcataactagggagtgagtggtagttacttaagtaattgaccaaatggaaaaggggaagtaattaaggaaattggtaagtggaggtagtcaggaggttctcgtggtcctttacacagattttacagctttgggtttcattttgtttagctaaagtcatggggacaactcttcaatttagaacttaagatgaattataaaaatgatggatataagtggtagctctatctggtgaagtgtcttgtcagtaagtgaaacatttttttgtggtggcttatccacaaacagtttagttgtagaataaaacttatgagtgacatctggaaagtaacaaccatgctaagatggcaaacacactggaaacaattgggccacttggctttcttttgctgtattgttttataagcctgctttacctccccgtcttggaaacaagttttagtttattgctttggagactagagccaatagtgtaatgttctcaaaggaaacagacttgagttgttggattagaggaactaactcaacttctaattttttttgttgtaattatggcactgtcatgttttaacatttgcaactagggatagtaagtacaacatttttaactctcatttggcagactactactaatcacagaccacaagggtaatgaccaaatttatgtggttgttacacttccatagttgtcttagccgaatccttccatattcttatgattacttgggttaaagcttctgtgaggaccttttggctcttaagatatcctaaatatttaaaatatttagatatcctaaatataggatatagagtttgtaccaaatatgaatgaatattgttcaaagcaaggagtatgttaaaatgaccagacacctgtttgataaatagtttactgaactagcagacgtgtggaaaaagaatcagatcttgattcttctgggtttatactggttgtaaaacagaatgatattagaaaatgttttccttgtttaastggtagttgaacatagaacttgggtattatagatcacttttcactttttggaatgttttgtattgaaacttaatacaactttaacatggcaaaaaaaaaaaaaatccaaaatctatgagataattttgttaaagttggcttgcttgggcgggtgcttggtccagagggagaaaagaaggcatgatttcagaatactctggcagctttttaaattcagctttatcaagttacagtaaactgtatctgtttagaattacaactcaatggttattttgacagatgtatatgccatgaagccactgtcaccatcaacatgcagaacacttccatcgcccccaaaagattcctcaagttcctttgcagtccatccctcacgctgctgatttgtctttgtcaccatatattagtttgctttgtggtggtgtttagtattttatataaatgggattgtgtagcatgtacttttttgtttatggtttctttcacacacaatgactttgaaattcaccaggttgcagtgtatcagtagcttattccttttattgctgagtagtgtcccattatgtgaatatgccattatttgtttttctactcacctgttgatggaccttgggattgtttccagtttggggctactgtgaataaaactgttaggaacatttgtgtacaagccactgtgtagacataggttttcctttctcttgggtaaatacctaccagtaaaatggttgggttgcatggcagatttatgtttaataaagtaactgccaaactgtttgttttccaaaggggctatacccttttatattcccaccagggttgtatagagttccaactgccaacactcagttttcagccattctgatgggaatctagtggtatctcattgtggttttattttcatttccccgggtgactaatgctggtaagcatcttttaaggtactttttggccagttgtatattttctgtgaagtggctgtcaaatcttttgcccacttttaattggattgtttgtcttattgagttgtaaaagttctttatatatactgtattaaagtcctttgtaagacacatgttcgtaaatacttttctttcattatatggctcagaatctggcaactttttaagagatacttgagcccactgaatgatatatagatcttayagtttttttaagtcaagccttaataataattaacattttttgagtgttcatctctcagtccctctatggccatgaaggtrggagatgtgactctgtttagtctcaagtaaagaaatgcaaactgagataatgggtacaaatggagatgaagcaaagccctgtgatgttcaagttcctggtttctgttaccattcagtctggctggacctctgcctttcccatggtaacatgacctttctaatgaattctcccttttcatctaaactgtttcagattgagtttctctcacataactaagagatctgattactatagcttcggagcttctaaggcatcttatgcacttgtctcttccccactgttcaatctgaagcatgtactctgccctttagcaaaaatcacaactccrccaggtgtggtggctcatgcctgcaatcccagcactttgagaggccaaggcaagaggattgtgtgaagccaggagttcgagtccagcatgggcaaagcaagaccctctctacaaatgaatgtttgaaaaaaaaaaaaattaaggccgggcatggaggctcacaccaataatcccagcactttgagaggccaagacaggaggatcacttgaacccaggagtttgagaccagcctgggcaacatagcaatattctatctctaccaaaaaaaaaaaaaattaagaacaaaattagccaggtgtggtgccacatacctgtagtcccagctactcaggaggctggggtgggaggatgacttcaacttgggcaggtgaggttgcagtgagccatgattgcaccactgcactccagcctgagcaacagagcaagactctgtctcaaaaaaattaaagttaaccaggcatactggcacacatatgtcatcccagctacttgggaggctgaggtggagatcaccttagccaggaggttgaggctgcagtgagccatgatggtggcactgccacagcctgggtgacagagcgagaccctgtctcaaaaaaaaaagacaccacaactccacccggagaagwaataaaatctcaaagaagcatgagcagccaacacaattwtatagcaggaaagaaaaagcaaaaaagctaggaaagaacataacagtttctttttaagatctgtgtttaaacaaagacacttaggaagtggtacaagtgctaaggaatgaattaatactaaatgtcatcactgtgatggttggaacatcaaaatatacataacatatacatacatgtgtatattatatacatatatacatatgtgtatatattatatacatacatatctatatacaatagagttatgcttcacttaaaaactgggatacattctgtgatcatagagtgcacttacacaaacctagatggtatatagcctgctacacacctaggctatatggcatagactattgctcctaggctacaaatctatacagcatgttactgtacttaatactacaggcaactgtaacataatggtatttgcatatctaaacatagaaaaggtacagtaaaaatgcagtgagataagaaaatggtacacctgtgtagagcactttccatgaatagagcttgcaggattgctctgggtgggtcagtgagtgagtagagtgaatgtgaaggcctaggacattactgtacactactatagactttatgaacattgtatacttatgctatactaaatttattaaaacttttttctgccaagtgcagtggctcacgcctataatgccagcactttgggaggctgaggcaggtggatcacctgaggtcaggagttcaaaaccagcctggccaacatggtgaaacctcgtctctactaaaagtacaaaaataaaggaagggcacagtggctcacgcctataatcccagcactttgggaggccgagtagggcagatcgcctgaggtcaggagttcgagaccagcctggccaacatggtgaaaccccatctctattaaaaatacaaaaattagctgggcatagtggcaggtgcctgtaatcccagctactcgggaagctgagacaggagaatcacttgaacccgggaggtggaggttgcaatgagccaagattgcgccgttgcattccaacctgggcaacaagagcgaaacgtcgtctcaaaaaaataaaaatcaatttttttttaaatacaaaatttagctgggcatggtggcacgtgcctgtagtcccagctactcaggaagctgaggcaggagaatcgcttgaacccgggaggcagaggttgtggtaagccgagatcgtgccactgctctctagcctgggcaacrragtgagactccgtctcaaaaaaacaaaacagaacagaacctttcttcttcaataataaattgaagacaattcacctactgtaactttttaccttataaactttttaaatgtttaatctttgactcttctataacacttaacacacaaactatacaaaatatttaaaaatattttatgtcattctataaattttttctatttttagtaattttctttttttacttttttgtgttaaaaactaagacacatacgttagcctagacctaccgatgaactggatcatcagtatcactgtgttctacctccacgtcttgtcccactggaaggtcttcagggacaataacatgcatggagctgtcatctgctatgataacaatgtcttcttccagaatgtcctgaaggacatgcctgaggctgttttatagtcaacttttttttaataagtaagggtacactctaaaataacaataaaaggtatggtatagtaaatacataaaccagtaacatagttgcttgttatcatatcaagtactatgtactgtacataattgtatgttctagacttttatatgactggcactgcaataggtttataccagcatcaccacaaacacgtgactaatgcatcatgccacaatgttacaacagctacaatggctccactaggcaagtaggaacwgttttttttttttgagatggagtctacctctgttacccaggctggggtgcagtggcgtgatctcggcttactgcaacctctgcctcccgggtgcaagcaattctcctgcctcagcctccggagtagctgggactacaggcgcatgccaccacacccggctaatttttgtatttttattagagacagggtttcaccatattggccaggctggtctcgaactcctgaccttgtgatccgcctgcctcagcctcccaaagtgctgggattacaggcgtgagccactgcacctggctgcaagtagaaatttttacctccatatactcttttttttttcttgagatggagtctcgctctgtcacccaggctggaatgcagtggcatgatcccggctcactgcaacctccacctccygggtcagacgattctcctgccactgcttcctgagtagctgggactacaggcacttgccaccacgcttagctcatttttgtatttttagtagagacggggttttaccatgttggccaggatggtcttgaactcctgacctcaggtggtccacccaccccagcctcccaaagtgctgagactacaggcatgagccaccatgctcggcctgctccatatagtcttatgggactaccgtcatatatgcaatctgtcattgaccaaaacgtgtttatgcagcacatgactctgtgttgtatatataatgtaaagcttcaataaaagtaaatcaaaagttaaatgtgtttagtttgatagaaccagatgactataatattgaggatattatccttcttgtgataattagttttgttacaatacagcactcaccttccacgtgaaactttaaaatgcaggggaaaagagcagagaccatataattaaaatgcacagtagaaacactgaaatgtggggctgggcgctgtggctcatgcctgtaatcccagcactttgggaggccaaggtgggcagatcacgaggtcaggagatcaagaccatcctggctaacgtggtgaaacccagtctctmctaaaaatacaaaaaattagccaggcatggtggcacgtgcyggtagtcctgtgtccggaatttattccttcctgtgggttcttggtctcgctcgcttcaakaatgaagccacagacccttgyggtgagtgttacagctcttaaagatggtgtgtctggagtttgttccttcagatgtgtccagagtttcttccttccagtgggttcgtggtctygctgacttcaagaatgaagccacagaccctcgggttaatgttacagctcttaaaggtggtgcggacccaaagagtgagcagcagcaagatttattatgaagtgtgaaaagaacaaagcttccacaccayggaaggggacccggacaggttgcccctgctggctcacgtggccggcctttattcccttatttggccctgcccacatcctgctgattggtccattttacagagcaccgattggtccattttacagagtgctgattggtccattttacagagtgctaattggtgtgtttacaatcctttagctagacacagagtgctgatttggtgcgtttacaatcctttagcaagacccagagcgctgattggtgcatttttactgaatgctgattggtgcatttacaatcctttagctagacacagagcgctgattggtgcatttataatcctctagctagacagaaaagttctccaagtccccactcgacccaggaagtccacctggcttcatctctcagtcccaggctgaggcaggggaatcgcttgaacccaagaggcagaggttgcagtgagccgagatcatgccactgcactacggcctggccaacagcaagactctgtctcaaaaaaaaaaaaaaaaaaaaaaaagagagagacaccaaaatgcattgcaagacaacaagacactgaaataacatgcccagcaacaggggaatgaatgagtaaaatrtggcacaaaaacaaccaaaaacatacgttgtaattaaaagtgaaatttttatgactcagaaaattcataaaatacttaagatacagtactttgttaagagacaattaaaaatatttttaaatgacacatgattgcaactacaaatccccacttcatagatctaaaagacagtracatttgggccctccagcatccaggccccccatgaaaagggtgcccacttctgctctttcctggtcccgaagtgtggtatccatctgtttcccaagcctggttctgttttcacctctccatccatgagctttgcatttcctatttctggccttttcttgcagttattattattgttactaatattaaactttttggctgtgaccttgacttctctggatgaagacttgattcacagcccatactacacagatatccacagcctcaattctcccagcttcagcccatcatttaggaagactttttctgtacctgtcccatctcacctgcctcagatcttatgggaagagtcctaaaaatatatacaattgaaactttgatggactagggtcttaagatcatgggttcaacatacagtattagtttttttcgatctgtccaaacttttttaaagacttaatcttttccttatctttgtcaagcttgccacctggtggtgaatttctagaacttcattgttctagaaattagcctcaagtgagcataagtaaggttaaaagatgctacctttgatttcactagcagttttgcgttaataacatggaagtataggcctttaatcaccctggtagccaaagtcatatcacagggttagctgatccagaagttatacaagccttatagacattcccttacttgcctgggactcatgccctgattccccgtaggattctaggttgattttaattacctgatactggatctgctctgggaagtagttcttacttagacagtgagcatttgcatctactgcagaatcttggtgactccgaacattgtatagtgtcttgtaaactttcaccagtgtgttagttccctcaggttgccttaacaaagtactacaaactaggtggcttactaaataacagcagtttattccctcattgtttgggaggctaaaagtctgagataagtatcagcatggccagttccttctgagagctgtgaataagattgttctataccccacccccactatcatctggtgattgcctggaaatctctgcattccttggctggtaggagcatcaccttagtctgtgccttcatcttcacacagggtctatgtatatgtccagatctcacctttttataagaccaccagtcatattggattagggttcacgctaatgacctcatcttaactaattacatctgcagtaaccctatatccacataagattacatccggaggaactgggagttaggacttcaacatatgaaactaaggggggcatggtscaacccatagcaaccacgtatctcattatacctccagacttcatttccaccatgtttttcacaattatttgctgctgttccctgctggacagttacatttccttgccccactgatgtgaagcttagctgtgaaattgctctgcccaataaaatatgaaaagaagtgatgtgtgcacatcctaacagaaccttttaagagcctcttccctctgccatgaaacaggcagtgttccaggtgaaggctgtttcatcagcctatgtctcagaatgacagtgacacagaccagggcagcagctgaacctcagtggatatgtagtatgaacaagaaaacctttatgattttaggccaccaagactttggggtcatttatcactgaagcataaacgaactttagctgactgatagagctaactgacaccataagttcaccctgtaatgtgagtgaggtttttttaaaaaaattcattcatcagataattattwraaactatgtgctaggcataactatatgttggacactgtgatggtgtcaccttggctatgccctggtacccagatatttgccaaacatcagtctaggtattgctgtgaaggtgtattttagatgagattaacgtttaaatcagtaggctttcagtaaagccaattaccatccataatatgggtgggcctcattcagtggaaaaccttaagaggaaaagactgaggtcctcaaggaagagggagttcttctgactccagttgcagcatccgttcttccctgagtctccaacctgctctgcagatttcagatttgccagccctcacaaacacataagccagttccttaaaataaatgtatgtatagctcacatttatttcaatgtttcatattagaagtgtttcattctttatttagaagtatagtagtgattttgtgaccagaaatatgctgtagaaactgaactcttatttatctcaattagcctatggtaaaattggtcatgctgtatatcattttgcttaaagctgcagtttccaagaacctatatgacacttttaagtgatgacttgctgtactgcatttaatagaagcacataggagaagcacctgaccctgactcgtagaaccaaagaaggcttttgggagggaatgaagtcgaatttgagaactgcacttggcaagtggaataggagttagccaagtgcaaggaagggtggtggggaccaggaattggactgagtagagaacatgcactctcaacaagggcatgatctcccccaggagaagaaaatgggtgcttggcagacaagataaatcttagctatcacactgttttgtcaccatccaaagctcaatcctatgtgacaaaattgtattcctcttaatatttaattgaggggagggaagatgactaggaaagaatttctaagaagstctccttaggtgggcaataataaaaaaaaacattgagaaacattggtatagaaagagcatttgggcataggaaagatcacacatgaaactactgaaatgagagagaacatagactatttgaaaaattagaatgggtgtggcatagaattgggagggaagaggaagcaggaagaacaatgagagaagaggccagtctagaaacaaattttaaagaaaattaaacctgaaagtgcatttcaacctcaattatctaaataatttaaagttggattttgtgtctaaattatctacagcacatcaaactcacttttttatgtataaatcatcctttgtgtttgtggtctctactgaatgaattaagctttaaacattgtgttagagatagacaagagcatttgttaagatagatatttcaacctatcatgctagaacttggtagttgtacaactgttgtctctagaatggcatcatgttcaggtgggtaattataatgctattccagcaagctttttaacctctggagaattttcatgtgatttacttcactggagtttcaaagacaaaatatgacactaaaaaaggtatttttcttggtcccattatttagaatagaatgagaacaatggtctatttaataaccattatcgttatcttcccagattgaattaaaattacattaatattccattagaaaattctctgcaaaaatgctgtcaatcatttttttatttctaccagcttgttaacaatgaactcaaagctaattcaatacttttgggagatagtataaaactcaattttagaatctaaagaactaaaaaattgtatgctatgtgataattttaattcctatttttctactacagccttagcttgcttggtattagtaggcttatcctaaatttataatatacttttaagaggcagcattctagtaatatttttagaaggtcttattatataaaacacagtataaaattatataatagttctgagtgtggattctggagtcagactgtctgggttcagatcctgagttgaacctgtttgggtttaaatgttactagctttcataaacttgagcagatgtgaaaagttgtgtgatcttaacctctccgtacctctgtacctcatagttctaactatgtaatagaactactacatatttttgtaaacatacagtaataatgagttcattatgtaaagcacttagaacagtacctaggacatactcagtactcaataatgttagcaataattatggaaccccttactgagtagctttaaaaccatttgttgagtctttcctgtatgtcatacaaggaacttacttgtgaaactcttagtacatcttacctaaaatgatgttcagagcatggcttaagatattttttgaaactractttttaaatattattattgttctctttactacattacaagccttaaaacagattagctttctagggtaggatgatactttttgtccttaggtgagaagatgaacatctaaatttcatttgaaaaagcattccttccagccaagcatggtagctcacacctgtaatcccaaactttgagaggccaaggtaggaggatcccttgaggccaggagtttgagaccaacctgggcaacaccacaagaccctgtctctwtaaaatatacaaacaaacaacaacaaaaaaaatagtttggcacagtaggatatgcctatagtcccacctgctcaggagactgaggcaggaggatcacttgagcctggayagttgaagctgcagtgagccatgatcacaccactgcattccagcctgggcaaccacgtctgagaaaaaaaaaaaaggcattccttcagtagtaggtgggagatgaattcctcttcagaattttgtgttggagtctaagatttatctttatggaactactatttacatggtaacagtagggaaaaggaagaagagtgacccatgatttactggcttttaaaattttgactaaggcaattccttttcaatatttatatatttcagaaaatgtcactgaaattcacaaatgcaaaacggattgaaggacttgatagtaatgtgtggtgagtatcttaaaataaataataatttagtgagggtttcctacatattttcgtatctttagatgggagttttttttgcctcatccatggtctataaataaaggtcctcatttaattcatccattaaatgaaaatggaaggaagttagcaatccatatactgaattgttcatttggcacatgtgccatgccctttgctggacactggacatatggcagagaaaaggacaaatgttaatgccctcatggaacttaacctccaatccaggaacttttcttattagttctgttctctaatagttgatgaaagaacttagcagcagctggaattgttgagaaaatatatatatgtggttaaaatatgggtagcgtgaaactgaggtttgtaagggacattgggttcataaattcagccatcattctatttggtaaactgatttgtggttggtaaatttttgttggaaactcattttttaaaacctataggactaaactagggtcttatttgtctgttttgtggtaagactataagatataaaaaagcgaactttataattgtagaacttattaatattagtatttttttcaatcttaggattgaatttaccaaattggctgcagacccttctgttgtgaatcttggccaaggctttccagatatatcccctcctacatatgtaaaagaagaattatcaaagattgcagcaatcgatagcctgaatcagtatacacgaggctttgtaagtatatcaagaccatatgggccatgagcttttattttatactggggtgtgtgtctgtgtgtgtgcatgtgcccttctgtcattcatatataagtgactttctgggaccagctgtcccatcctagcaaccacagaaacttctgcccttgccctatgtcctgagatgagccttcgcctacttccagcccctctacacttttctttcttttggcccttactttactgttgctccaagataggatcctatggcaacacgataaggaacaacattctcttgagacatgtcttttctatctcatcaacatttatgcagcctgagcactgaccctttatttaatatatccaactagctacgtttttcctccttgtgccagctcactcccatccttctgtaatgaaatgcctaggatagccaaagattttctagatcagacgtacctttgaactgtagacttgtatctgttgtgccaaaagccatacaattatcatatgtctgaccacttgtcttttccttttatgatattgtgggaaatggggaggggaatggtataggaggaagcctgttttttgtcttctatagtggtctaactataaaaatccatagaagggttttgctttgggaatagcacagggaaaagcagtgaaacttacctgtgtcacagggtttgacactggtgagaatccctgctcttcatagatctcactccctggcccaccctacagacccccatctcagacctactcaacataactcactccccagcctatacaaatccataatgaaaggctagaaacaaaccaacaatagagaaaattaatgaaaccaaaagctggttctttgaaaagatcaataagtaaaagttttagctagattgaccaataaaaaagaaaaaactcaaagtaccatatgaagaatgaaagaaggaatatcattactgatcatacaaacatgaaagcaataataggataatattatggataattttatgtcagtacattgacaacttggatgaaatgaacagattatttaaaagatacaaattaccaaaactgacacaaggagagatgaaaaatgcaactagccctatgtcaatgaaagaaaatgaatttgtaattaaagtcttcctgcaaacaaacctcaatacctagatggcttattagtgaattctatcaagtatttaaggaagaactattaggtcagtgcaaaagtaattgcggttttgccattaattttaatgacaaaaaccgcaattacttttgcacaaacctaataataccagttctgcacacatttattcagaaagtggagcaggatgaaaaacttttacttattgatcaacaatttttgtaatttgaaaaataaagaaatgcctaatggttttgtctgaacttttaatcaggggttttgtatcagggtaatgctggtctcataaaattagtttcagcattaccctgatacaaaaactgatttaaaaaatgccagcgaaagaaataaagaaaactccagttcaatatctctcatgaacatagaaacaaagattatgaaattttagcaaatcaaatccagatatgtgtgtgtgcatgtgtgtgtgcctgtgtgtataaagatataaaaagtaatacatcctgaccaagtaaggtttaccataggaatgcaggattagttttaatatccaaaaattaatcattgcaattatgctatattatcagaaaaaaaagatcatcttatgtagtatatatagaaaatgcatctgacaaaattcaaccctcatttataataaaagttttcagccaattagaaatagaatggagctttctcactctgataaaaggaatctatgagaaacctacagattacacctgtagtgcacataatatagtaagattgaaaagacagcaaagatgtccactctgaccattgttattcatcagtgtactggagtcctgtgagatataaagatacatagattagaaagaagaaaaatgtaaactcattttcagaaaacatgattgtgtacatagaatatcctaaggaattctaaaagaaaaaaaagcctactacaactaataaatgaattgagcaaggtcacaggacacaaagccaatatacaaaaatcagttgtatttctatatattaaaatgaacaattagaaagtaaaattttttaaatactatttatagtagtatcccaaaacacaaaacatttaagaataaattttttaaaatatatccaagatctgtacgatgaaatctataaaacattactgagagaaattaagcaatacctaaataaattgggaatgatgttcatggattgagagactaaatattgtctatgtcagttttcccaaattggtctatagcagggttttgcaatctatggcctatggacccaatatgtcaaattttgtaaataaagtttcattagaacacaaccatacccacttatttattaatatgtatattctagtttttgtaaatacataggtatatacatgtctatgtgtttttatattggtataagcactgagagtggtgttgcactatcaccaggctgtggacattcatcacctcagggggatgggaatgaaataatattgaggagcgattgtaatttttatacatctttgcctagttttacttattgcatgaagcataaattatttttgtatttaaatttttaattttaaaagcacaaacacttatcattctaagaaatgtatatagtgtttatagttgcttttcagatctcctcttgctagaatttgttagacctgctattaaagtaaaattcaaaggaactcagtttattgctccagagcccaaagtgctttcaaacaaaggtacatgacctgcacttgcactcttactctcaagggatagaaaatcaggatggtacttcaaaagcaaaatgaggaggtagatgctggacagaaaacaacaggaaatattgacctaaataccaaataaaacaaggagggggaaaggaaaaggaagaaaaaaaaggaaggaaggggagagagcctagaagagaacttagggagagctaatccaggagtcttcagaccccctrcttgcctcaggctgtaccttcataatcccttcacttctcctatgaaagtagttaccttggataaccactgctctcttgactgtcagtgtgagtagtgtctcacttccttctaacatttgctatcacatcaacactagtgttcgtgtcgttggtgaatttgtttttgttctctttccctagtccattggttggcataaccatctctccagcaatcaggaagagccaaggagtgggtatacagttaaagtgggtttttttcacttattttaactgggaaacaaatccaactcttttcaatatgatttaattactgtcaaaaaatacaaatggttgatttttattcaaagcaaatactttgaaattatataatcccaaaccctttatttagtaagaagttttaatcattagcaagccttcatgacaaatagtgtgggaatactctaaatgtaggaaattttaaaaaatttattgccattaaaaaatataaattttcttggggtaattataaacatcaaatccaaattttaaaaattcttacattttagagccatattacctcaaacagtaggtcccatatttaaattcaaggttttgttcttatttttaatccaacagggccatccatcacttgtgaaagctctgtcctatctgtatgaaaagctttatcaaaagcaaattgattcaaataaagaaatccttgtgacagtaggagcatatggatctctttttaacaccattcaagcattaattgatgagggagatgaagtaagtatattaacattatcgtaatacccatattaatcaattatcatttgtcccacctttgaatctttcgcttatattctactcttttctcyttttatttttaattatgttttaagtataatgcatgtacagtaaagttcacaaatcttaaatgtacagctggataaattactgtgtaaatttctgtgcaactacaaccagacaaagatatgatacatttccagtacccagaaaacttctttgttcctcttcagagtctatattctcccagaggtaagtactcttctgtcttctattaccataggcttgttttcactgctcttttacttaatatgaatataattatacagtgtatactcttgggtctagatccattcatttatttttgtgtctgtgagattcatccattttgttgcatataatttattcttatttttatagcctatttaaataagggcagatggaagggactaacactgccagggaaaaagaatcttttgttttcattgctaaaataacctttactcttaacttggtctacaagtttttgatcaatgtctttgtgtgcccagtaattgtataagccatcccatgtgaggatgtttttgtgattgtttttgtttttttgagatggagtcccactttgttgcccaggctggagtgcagtggcacgatcttggtcactgcaacctccacctcacgggttcaagtgattctcgtgcctcagcctactgagtagctgagattacaggcgcccgccacgaagcccagctaatttttgtatttttagtagagatgggattttgccatgttggccagtctggtctcgaactcctgacctcaggtgatccgcctgcctcagcctcccaaagtgctgggattacaggcgtgagccaccacgcccagctgagaatgtattaatataataggaaggtaaaatgatttctgcgatttagtactgtgaggtatgaccaacttttgcaactacctcagtcatctctacccgtatttcccattagcattccaatagccttactttaatactttttgcctctttcatttattcagaaaatactgaggatccaatatatgctaagcactgtgagatagaagatgttttaaagatagattctatgcagaaggtgttccctgtctagtagagaacacagacttgcaaatggattacgaggaacactatggtagtgacaaaaggaagaggcaatcacctctgctaagtctggaaagctccagagagacattgcttaagctgggactgcagaacgaatatttatcctgatctatattgttaactttctttaaactctcataaccctttatcataccacttttatgaaagatgccrctatctgctttgtgttatgttattcttttacaactttgattcccttcactatgccagacaagatgtttaaggaaacatgttaatgaagttcacagtttcatatacataawctcctttaatcctatacatagttttgtctcatacttcgatgttgttaatcctttgttgcttctttctctgcactctgttgggagtattataaggcttagcccttagctttctttcctctattctttcttccttcatcaacttatctagtattttgaaaccacatacatgtcacttgctatcatactgacctatttattgtttctttatagcatttattactatctgaaattatctaatgtccttatttgtctctccgttcattataagcctctctcagtaggatataagttctaggagaactttatagctttactgccagcacctaaaatagtgaggacgcaataaatattctcaaaaaaaaaaaaagagagagaggaattgttcacatcataaaagtgaaaaaatcaaggcgaagagtaacaggtatatttctcccactctactgccctgcctctccaatttattttcctttattgtgctctcaccttgtattaagctttatatttcccactagagttacaaagatagattgtcttagtccctgagaacttcacagatgaggctgagtgtggtggctcaggcctgtaatcccagcactttgggaggctgaggcagatcacctgaggttaggagtttgagaccagcctgggcaacacggcgaaaccccatctctactaaaaatacaaaaattaaccgtgcttttgagaagagagaaacatctttactctcaagataatgcttttaaattagcactttataccagggaacattacagtgttctcttcccacatagcctgctgtctgtcactgcttatacatcacttatattctagattttattttctgatttgaaatatgaagaaatgcttaatcgttttgcctggaatatccctttgagaatgtgatagtcccattctccaggtaaatctayctatgcatatatgaaattttatawgtaatttcaaatactcccactgcatgcttatttatagatctccctaagataccaaggagtccaattaagactacctggacaagtttgtctccgaggtctcttcccctcagatgttagctccacaagggcaaagcctgcctttttcactgctgtatcccaacacatagtacagtgcctagcccatagtaggtacacagtattattaacatgaataaatgattgacaggttgtgatcttatttgcttttattgcaggtcatactaatagtgcctttctatgactgctatgagcccatggtgagaatggctggagcaacacctgtttttattcccctgagatctgtaagtttgccagtatggttcatatggcaaagtttcaagacttaagaagtcttgaaaataccaattactttgtcatgataaagtttctactttgattgcatttggagatttcctgtatatctctatttgtctagttgtctttttaaaatatttttaacataagtaatacastaaggtgagtcacaaaatcttcagctagccttacaatatcagacatgttaaccatagttatagctagttcctgtgaagtaatattagcagcagttaatgttgacagggcttatttttycatttaacaggtgtgagcataagacttaggttttcttaggctcttaagcagaactacagcccagttatttctgtttatcttctttgttagtctttttctagttttttttctgttcctactgcaggaaagcatttgttggtaatttattcagtttcctttgccatgactttctttgatgtttttttccttattaggttattygtttgtaagacagtaaacatgacttaattgaattaaattatatcttcattcttcatgcttagaaacctgtttatggaaaaagatggtctagttctgactggacattagatcctcaagaactggaaagtaaatttaatyccaaaaccaaagctattatactaaatactccacataacccacttggcaaggtaagcaagtctcatctccttatacagtcttctgacctatcattttctcacatgttgaataattggctgtgctctttcctttattatgtgtaggtgtataacagagaggaactgcaagtaattgctgacctttgcatcaaatatgacacactctgcatcagygatgaggtttatgaatggcttgtatattctggaaataagcacttaaaaataggtaccaactataacacagagtcacatatctaaatgtgtttgggcacatatggaagaactgattggaaagcatcccagaccaactctaaaacagtctttgtaatgggtatctgtctgtatgaacactttaaaatagtatttaaatgagcaatactttagtgaattgatgaatagttcaaaggacaaagagtaagagattttggatcatactataaagctatgataccagaaaagtagttcttttgcccatatatccctggcttcttagcagaaatccagcaattacttggtacataagacacagggagctttcttgtgcctgaaaaggttctagacggtctatgctgaacaacttaccaaaatgccaagtcaacagaaagaaattacaggggtagtcaggtatgctgcttggcccttgcttgagattcagccattactactgggctatctcatgaatgccgtactgtctgctggggtagtccaaaccatgtcaactataggattacaaactgggctgcaacttttgggtcttcgcacctccctttcctttgcctggaaacacttttcctccagrtatccacctgacttcaratatccttcacctccttcaggcctttgtccaatgtcagttttcatgaccatcacattgaaaatagttaacacctctccctccagcatttgctttgtcctttttctgttttgttttgttttttcctctatagtaaatatcagaatctatatattttacttctaaaccacagtaatggagggattttgtttgttttagtctcttctgcatccccattttccatagaatcttgtacatggtagagaattagaaagaaattgttgaataaatgaagatgaaagatgaaaagattaagagaaggatgactaaaaaatgtggcagagatagataaattttaaaatttaggccaggtacagtggctcatgcctgtaatcccagcactttgagaggctaaagtgggtggattgctagagtccaggagttcaaaactggcctgggcaacatggagaaaccccgtctctacacagaaattcaaaaaatcaaccaggtatggtggtctgtgcctgtagtcgcagctacttggaggctgaggtgggaggatcccttgagcccaggcaccactggctcactgcagcctccatctcctgggctcaagcaatcctcccacctcagcctcccaagtagatgggactgcaggcacagaccaccatacccggctaattttttttaagaaaaataaaaataagaaatgtaatgcacttatatattaaattgttgcattgttgcatgtgccataattattcctatagtatattacaagttgctatagagatgggaagagaaagcgactgtttgaggggaataaaaaaggagtggccaaaagatagagaattagctaaacagagaaatagaaactaaactcctaaaacataaactagcatgtacttagataaggaggtatgaaagatcaagatacacttaagaaaggtaaatgattattgaaattttaaaaacaaagaagaagaaaggtaaataagttatttaattttttttttttttttttttgagacagagtcttgctctgttgcccaggatggagtgcagtggtgcgatctcagctcattgcaacctctgcctcctggattccaacaattctcctgcctcaggctcccaagtagctgggattacaggtgcatgccaccatgcctggctaatttacttttagtagagatggggtttcaccgtgttggccaagctggtctcaaactcctgacctcgtgatccacccacctcggcctcccaaagtgctgggattacaggtgtgagccaccgtgcccagccttaatttttttttttttttaagagacagggtctcgctgtgtcacccaggctggagtgcagtggctcagagctcactgtaatctcaaacttttgctttcaagcaatccttccacctcagccccccaaatagctatgactacaagtctgcaccccctcatctggctaattttttaaaaatttttgtagagatagcatctcactatgttgctcggactgttctcaatctcctagactcaagcgatcctcctgccctggcctcccaaagggctgtgattacaggcataagccatagaacctcgcctcagtttgatttatgagggtgtgttttagtaactggcatagatcagggtggaaaactagggtgattctaaaggactttgaatatgagatagagtataaactttgttgaggaggtcagtggttctgaaacttactttagtggtagatcaccatgagatcacagtgttctacatcatgaaatggtgatattgtgaattccatcctgaaagtaatagcaattttcctaaaagaaatccaacaattagaagccaatataaaaatcacacttctgttcatacttgtccacaacaaaaagctattgaaataaacacatttgagtttttctgattttgccattaatatgcatttactaaatgctcatctgtttcactattggagcatccactatcagataagtggtagtatttgctaaaggcttaagaaaattgtgtggtagaaaacttaacattgattttttaaaattctgcacattaatttgatcaccagagtgccagtgagcttactttgagaactattgcaaaaggtgtaacaaaacaggagaaatggttccatgactagatttttttttttttttttttacaaagatgagagccagccacagaggagggtcttaagcaaatcagataacctagcagtgaagatggtacatcggggctatttagaaactatagagtatagcatttgaaggtgggaagaaaacaagcatgctactaagatctctagcctgaactactcagcagtgatgagacctttaaccagrgtaaatatggagaggagcagatttgtatggaagggctgagcaaagggaattcctgcttctcatgctttaaacttgctgagtttgggtgtctgtgggacatagaagaatagatatctggggacaagtggaattataggcctgatcgtcagaatcaaattataatgggatatatttttggcagtcatcaaaatgttggtggtagctggacacatggaagagaatgaattttctcaaggggaatatataaacagagaaggcagccagagatttgcagggtgtgacaccttaatacaccawaatgttatcatgttttaaattgtatcagaggccacaattgcccatcttgttggtgacctctgtctcaagtaatttgaactgtttcccagtggaaaatcagattaacatgaacaattactttcttgttgtaattaactcagtgtagcaatattcatcccaaaaaatcactttagatcatcttgaaatttattgtttagatctactcattttaagcccttcagggtaaagcataactggtaacattatttactaaagatatgcaacagtatttactaaagatatgcaagatgtatattttgaacttagatttttttatttgtagcagcccataaagtttaaataagaccaaaaaatggatacactatttcattatttagaaagtgcaatttgtttgcattaaaacttaggtattctatcgaatacaatagtctttgttacattaaagatgcaaaatggctacaaaatggccattacatcaatttgcaaagtgcaacagtagtcctttaatatatgatgtatcctttactttaaaggaagtgataatctgcattatacgtagtttagattttctctgatcaaatagaaaagtggggcatgtgtcatagtgttcttttggagtattttggaagaccagaaatgtctcagaagggatataattatttatatcaaatcttaaagtattccttcttcaagtggacattctaactatttttctcatttatctttttgggttttgtcatattccacagagaataaaattataacttttctgatttatatgcttttcctactgtttcaaatttagcaggtatttcagggtagactgaaattacttatacgttgttttggaaatttctgtagctgccttacattttagtaggcactttacttgcttatgagcagattacttcaagaaagcagaagcttagattcccagagatgagcatttattttccctttgtgtgtaccaacactctaagracaatacaagagcccccacttgtgcttctgaaaaacaagtggaaaaacttgtgggttgcatggaaagaacttcacaagtaaattacttgaggaatccacaaagcagtattgtgggtggcattgtcagaagagtgacagaatggtaatttaccagttattaccaatgtctmgcaaaatttacaaactcttgcattttagacctctagacctttgttacctgcattttcttagcccaaaatatcttcattccccttctctgcctggctacagcctatgtggtcttctatgtctcagcttaagaattactggctgcagaaagccaccctcaacaccctcttctattcttgcatcaccctccatgcctcctactacagcatttatcacactgcattacagttgtcattgtatgtggctcatgtccctactagacattaaattttttgaagaattgcatcttattcatttttgkttcctctagaccttagtccttagcacctggtggttgctaatgaatatttgatgtatgaatgaatcaatgtctttattaaagatgttaawcaacttgaaaaccattatacagccaattcacattattcttgagttctgtatttgcaaatttgcctacttcctaaaatatatgtgtaattccaaaatcaataaaggggaaatttgagtcaccctacacacattcccagtcgaggtcaaacaaggcaacattatgcttctgtttcaattcacactayaagcaattgttctctgtacagtgattttgctgtttaaaatggcccccaagcctagtgctgaagtgctgtctagtattcctaagtgcaagaaggctgtgatgttccttacggagaaaatatgtgtgtttgataagtttcattcaggcacaatggccatgaggatattaaagagtgatagctaaaaggtacagggcttcttttgagataaaaaaagtgttctgaaattggttatggtgatagttgcacagatctatagatatactaaaaaaatcactgaatggcatactttaaattggtgaatttatgggatttatatcccaataaagttgttagcaaaacacacgcccatacacacatacacacacacatgcacacacacacacacatgtgcacacatgattactgggtcccactcccagagtttctgattcagtaggtctgggatgaggcccagtgatttgcctttcttacaagttgcccagtgatgctgatattgctagtgtgagatcacattttaagagccattgctctaggaagcctggagaaatacactcagaaaataggcaaaataaaggggcctaaacaataatcaggatcacaacctaagccctgccactggcctattttatcgaacctgcagtcactgctaacattgaacactgaatgctacagctcctgtgacagctgccacttaaggcagtctggaacactgcctgctggtgcccctgacactcctgccccagaactaattttaaaattattaaatctatttatatactatcttggtgcaacattacagtattgtaaacttttcgtctgtgttttgcattaaagttacattatctaaaaaaaaaactagaaataactatactggctaaattataacacacttattttcattgaatttatgtatctttgttatgtttttagattatactaaatgtgattaattggaaaacaatatttacccttttttcctcctctgtttagctacttttccaggtatgtgggagagaacaataacaataggaagtgctggaaagactttcagtgtaactggctggaaggtaagatgagtaagaatttaattgcttaaaaataggcctgtatattatttattttttgttgagtggtttgtgttttaaatgctggccaggcatggtggctcatgcctgtaatcccagcactttgggaggctaaggcaggaggatcacttaaggccaggagttcaagaccaaccttggctacatggtgagaccctgtctctacaaatacattttttaaaaattagccaggcagggtggtgcatgcctgcagtcccagcaacttgggaggctgaaatgggaggatcacttgcgctcaggaagttgaggctgctgtgagctgcgctccagccacttggagacagaacaagaccatctttaaaaaaataatgaaataaataagtaaacaaataaatgaatcattgcatacatattcagtttatatagatttttatacctggtgatctttgcttatctcttgacttatttggctttcatgttgagttttatcctttttgagacctaattatttctttaaacrtaagaaaaattaggtcattttcccttttataagtgatcaactaatgacacctttttctttgcaaaaaagtgttcagattgctgcatattaatataaaaggagaaaaataatagtagctaatattttggcaggttctaaatatataccaggttctaaatgttttacatatactaatttctttcattctcataaccacactataaggtgggtatgattagtgtcctcattttacagatgacagagctaaagcacagagaagttaaatgacttgcctgagattacccagctaataaattcaagcctgtacaggaagtctggctccagaattcatgcacttaaccactgtattatttattacaataatttatccagttaaaacccaattctcttccagcctcacctctcctgagcatgggtaagaagcagggagcatcggccaggcgtggtagcgcaygcctgtaatcccagcactttgggaggccgaggcgggtagatcacctcaggtcaggagttctcaaccagcctaacatggtggaaccccatctctactaaatacaaaaaaattagctgggcgtggtggcgcatgcctgtaatcccagctacttgggaggctgagacaggagaatcacctgtacctgggaggcggaggttgagtgagccgagatccggccattgcactctagtctgggcaacaagagcaaaactccgtctcaaaaaaaaaaaaaagaagaagaagaagaaggagggagcatcaaaacaaaaattaggcctggagaatcaagtctgtatgttttaattacaagtcccttaggccctctttcagagttactttaatctgtaattcaaacaagctttgttaccagtttttaatcttccagaatatcagaagtagcaaattattagaaaggaaaaggctaataatgatcgccggctgtttaccttcagaaaggcagagcttagtgatgaaagcagagtttaatgactccatttggaagctgttccttgaaaagaacaccattgaaatgattctaagtactaatactgtactactttcatagtgtgaacttttttttttttttttttttgagatagagtctcactctgttgcccaggttggagtgcagtgctgtgatctcagctcactgcaacctctgcctcctgggttgaggtgattctcctgcctcagcttcccaagtagctgggattacaggtgcccaccaccatgcccagctaatttttttgtatttttatagagacagcatttcaccatgttgaccaggctggtcttcaactccaaacctcaagtgatccacccacctcggcttcccaaagtgctgggattacaggtgtgagtcaccatacccagccaacattttaggattgtatatatttaacaattgcactaagtttaaactgctgtctcagatttgttatatacaattagattttctgaaatcttttatcttttcctttcccagcttggctggtccattggtccaaatcatttgataaaacatttacagacagttcaacaaaacacgatttatacttgtgcaactcctttacaggtaagtgttatagtaactcagggtagaagcattgtcttttggtgaaggtattacttttatattgcatatttgaattgacttaattctccttctatccttctgttgcagggccttctaatataatttggaatttggggagcagatacatattcactgttatcaagcatggtttgggtttttttttaaacacaattttagctgtgttaaacattgctggcaggaatctaaagtgctacaaattctgtgaaggacaatggcaacaccaaacaaaattacacatgtgtttgccccatgaaagcaatccatcttctaagaatttaccctaaagttgtgttttagtccrttcttgcacttaggtaaagaaatacctgagacttagtaatttataaagaaaagaggtttacttggctcatggttctacaggctgtacagaaagcatagtggcttctgcttctggagaggccttagaaaacttacaataatggtggaaggcaaagagggagtaggcatgtctyacagggctggagcaggagggagagaagtggggaggtgcaacacacttttaaacaaccgtatctcacaataactcactctcatgagaacagcatcaaggggatggtgctaaaccattcatgagaaaccactcccatgatccaatcacctcccaccaggccccacctccaacattgaggattacaactggacactagatttggatgaagacacagatccaaaccatatcaagctatctgcacatgtaagaagttacgtacttacctggctattcattgcagatgattgaggagaatccattatcatctacagacrattgattacataaaccatgatctatccaaacattgaaatgttatatgaccatattaagtttcctactggtgctataacaaattaccacaaacttagtgacttaaaacaacacaaatttattatcctacggttcttcagctcagaagtcagaaatgggtcttaaagggctaaaatcaaggtgctggcattgctgtgttccttctgaaggctctaggagagtctrtcctctgcttccgtcaacacatttcctgtggcttcaaccctcctgcctccctttttcccttataagcacctttgagataacattgggcccaatggataatctgtccaattaattaaggataatctccttaatttcaatcacatctgcaaagttcctttcaccatgcaaggtaacatatttacaagttctgggttttaagacctagaagtcattgggacccattactctgtctactggctgctaaagagaaaagaaacaagaaagaaaatagggaaatactataattactgtactgagataaaaaagatttctagaatacatcataaagtaaaaaagaaaaactatttaaatattatttaatatttaatatttttaatatwtattatggaaatagggatttagttaccatcattctatggataatcaaaatgctgaaaaaaatagtatttttctagaaggcagttaaaagggcaaaagaaccaggcacaatggctcacgcctataatcccaacactttgggaggccaaggtgagcggatcacctgaggccaggagttcgagaccagcctggccaacatggcaaaaccctgtctctactaaaagtacaaaaattagctgggcatggtggcaggcgcctgtaatcccagctactcaggaggctgaggcaggagaattgcctgaatccaggagacagaggttgcagtgagctgagatcgtgtcactacactccagcctgggcaacaacagcaagacttcgtytcaaaaaaaaaaaagaaaagaaagaaaaaaaagatgttgatagatatgaagaagaaagataaaatagggaagaggaaggatataaagctccaggtgggagatatacagtgttaaatagggtaatctttgaaagcctccctgataaggtaacatttgaacaactaactgaaggggattaagcagccacatggttacctasagaaaaacccctttggacagagagaacaagcggaaaggcccagtggtagacagcctggctggcatgttaatatcagagaacagcacagagactggaatggaatgattgagagaagagtaggaaaagctaagatcagagaggtagctgggagtccaatggagctggggcatgcatgtcactgtaaggactgagtgagataggaagtcactagagagttttgagctcaggagtgacttggtctggcttgtgttagcaaatggactctgactgcctcattgagtgagaaagctgttacagtgatccaagagagaaatgccagtgcattgaacaaagatgggggtggtagaagcagtaaaaagtgattggactctgaatatattttgaaagtagagccaacattatttgtcaataggttacatatgggatatgtgaaaaagaaaggagtccaggataatgctgtagttaggatggatgtttatgtctccttatacttggaattttctaaggcagtatctcctatagtaaatgaacaagttgccaagagaaaaaaaaaaaaagatatagctaagaatgcagaacatctttttctgaacactcttattctccatttcagctaggtgctctgttttgtcctgggacaaccatgtttggttccaggaaaccacagatttccaggctaaggcaatcgatccttattttccaagattttgtagtactggagatttattactaattctgttttactgcattcttttggcataaaatctctgtgatcttgcccctctctgtctccagtctcatctcttgccacacagtctctcttacctgcctggtccttaatgtcttagttggactgggtggcttataaacaacagaaatttatttctcactgttctggaggcagcaaagtccaagataaggcaccagcagatttggtgtctggtggggacatgcttcttcacggatggtgccttttgctgtgtccttacatggtggaaggagcaagctaaccctcctttgtaagggcactaatcctgttcctgagggctctacccttctgtcctaatcacttcctaaaggccccacctcctaataccatcaccttggggtttactattttaatatatgaatatgagagtgggcacaaacattcagtccactrtacttaacaacattggctttttccttggcccagtttgctgtcctggctcttgaagaaagatagaggaattactgtagatgttccagaaactcatttctagtccctcttacactttgaccaacttcctggcatatgaataattccagcaaggatttccacacctatggagaataagaaaggcacatttctcctttgcacagtaggtgagctttcatttccactctgtccccaaatgtaatggtgagaggctgactactctctggttgttcttctgacttagatttagcaagtcattctacaactcacctcagcagaaaatatcttaatgtctttttgtttccaagcaagccacctttaagtaacagctctttttcaatttgaattttcaggactccttctcagttcttcacatgagatttaatcatttasgtataactgattcctccattaacctatagagtttaatataggttcacaggaattcaactgttatttcctgagtgacttctttgccaataattttactcagatcatctctatttattataccaataaactaagcaataaataacattgccatatgccttttcatattttttgattcttaacaaacaggaagccttggctcaagctttctggattgacatcaagcgcatggatgacccagaatgttactttaattctttgccaaaagagttagaagtaaaaagagatcggatggtacgtttacttgaaagtgttggcctaaaacccatagttcctgatggaggatacttcatcatcgctgatgtgtctttgctaggtttgtaaaggcttttattatttcaactatayggaaacttatgtgtgaaattatatcagaattatggagaaaagattggtgtcaaagccacagcagcattttatctgtggagaaggatggatttttgcaatgtctacattttctataattatctttacttttaggccttttaccttaaatgtgaccattgttaaatggttatggagtcagtgttgttctagttagtctattaaacataggatttgctatcactctcttctggtgtgtaattttaaaacacaagtgtgtgaaataatattatatactcagtgttcatttgagtaaaattgtagtttcctttttacttaacaaaatgtactatttcattagaaaaatatctagaaattttgaagctatcagggaatatttgccattttagaatgtactgaaataaaataaatgggagaataacacttattgagggtctactttgtgccacgtactcaaaacacccttttgaagaaaacattagctccatttttgcaggtaaaaagatttagaaagttttaaatagcttccctgaagtcacmcagctagattctaaatagttctgtttccaaaaagcattgttttttatattacctaaagctgttatatgtaattctgacatgccatacaaatctaaagttagaagcatgataatgtgtcatatataacttttcttttaaaaaaattagtaatagtaaaccttgaagcctaatttatcatgacagaaattacagccattctaaatatagttttaaatgttttaaaattttattacaatgaagttatatgccaatgaacttgaaaaactgaagtgttttatttatacyaaattgtataaagctggaaagagtaaaggaaattttcaattttatarcaaaacattgatcatattttttaactttacatccttcacataggagtttgttttgttttgttttgttttgttttgttttgttttgtttgaggcagggtctggccctgtcacccaggctggagtgcagtggcgtgatctcagctcactgcaacctctgcctcctgggctcaagccatcctgccacctgagtctcctgagtagctgggaccacaggcatgcaccaccacrcctagctaatttttaaattttttttagagacgaggttttgccacatttcccaggctggtcatgaattcctgagcttaatgagtgatccacctgcctcagcctcccaaagtgctgggattacaggcatgagccactggctgagttctttcttactataagcatttgatgctagcaatttttacttgtaatagttcattatcatcttagcaaatttcagaaaagtaaggtgttatgattttcctataatttggtcttcaggtctgtctctctggaaagtggctrtaaactctagctgttccctgatggggctccaggggaggtcctggatgtttgcagtgtgcctttcatgggctacttgtttatcctggcagatggcctgatgttaagtgtctgacccatgaccagacatccctggaaactggtttatactggcagacatccttgtggctctcatctgacctgtatccagtttatttccacagagatagccactctctaggaggaggagagttaggttccggtgtgttggtcagttgggacacagaagaggcagcaggcctcccgggaccaatgggaagtgaggagtggtccaggatatacacactcaaccagcaggtggggaacagagagagagtgggatctgtgggccaaagcctttttgggggcccaaggtgttacccaagcaggtttcctgcagagacttctaacagatgggtttagagcgagcaggcacaagctcatggtgtcaggctgtgactgagaggtggtcactgtggcatatctaggcagtccatgaggagggtgggggtcagtgggcgagtcaagtaggttgtatctagctgtaccacagtgaggtgctcgccaggaggtggttgtctcaggcagatatctgaatcaactacattgaggaactgtgaggaggaagagaagtggaaattgtgtcaagggtgactaagccctgcttctggtataagaaagaccaacttatattcacaatggatgccaagrcaacatacagtcataagaattcattacatgaggtttggctcaaactgaaacactctccttcctttcacattagcttatttcttcatttgttgtgagagaagaggctttgacaagcaaagattcctgcagtgctattgccatagagctgtatttagcaggctcccaagctctatgcttatatagaacctcttaaggtgttctagactctgagatttgggaagtgctttttctatattgagtctaaatgtgcagttyattttatgaaatgataaaaaaaattagcacagttgtcatcacttatatttttgcctttgaatcataaatccccaagatttccatatgaattattatttttttaaaagaacaacatttgtactttatatgcttccaaaaggaatgtgagccttctcatattaaaagttttctatgcagtaatatrtaaatagaaatgattgtatctaaatcaaaaatcaatgatacatggccagtacagtgactcctgcctgtaatcccagcactttgggaggccaaggcgggaggattgcttgagcccgggagttcaagaccagcctgggcaacatagtgagatcctgtctcttaaattaaaaaaaaaaaaaatcagttacacataggagggaaagaaagcaaatatttcagtcacctaggttcacatagtattgtaattagcattaacttgagactaaacttcctgacagtaaaggcaaacagaaaaatgaaattagttgcgtagtttttgaataaaaagaaacttagctttttagataagaacaattctttcctggaaccaaacttttccagatatgaaactcgatttatcacattgtgacattaactatcaaaagaacagtgataaaactcagaatattacattaagctcctaattagtttccatttctttcctcagtcaatccattctatatgcaatactaatttaggtcttagatcttgaactagtgtggtgataataggagcaaaaaggattttggttaggaaagcttttctgataatgaaaacaagattttttttatggtcttccttcactcgtggaaaaatgttaatgtccacaaaaccttcctacatataaagaaatttatgttttgttttaccttttcatctgcttcatttgcaatgtgataattcttccatatactaaaagttggcccataaactagagataaaaacaaaaactcttatttaatcgtagcttgagaataaaagtaaaccataatattcatgaaaatagtaatgacttccctttacaattaatagcaagggctgactagttaatatttattgagaatttatgatacagtatgaattacattaggagctttgcaaatatattctcacaaaagctatatgaaattggtgctattatatcactattgatagagaagaggagatagagaatcaagtaatttactgaagttaatcaactaataagtatcaaagctggcctctgaatccagtaattagaagacaagatttcaaatgagattattacagtttttctagtgaaataataggatccaaaattatggaggagatagtaagaatgcaaaaacaaatttgggccttcatagattacttagatatgctcacacatttgatttaaactcttactgtcaataaagaaagactttagttcccttgaggatgtctggctgaggcatgtcaaaagaaatagattccaaattccttctgactaaaaaacctttataattatatttattcccttctttcctttttcaacatcatggtattacgttacttttttctggcagggtaccatggctcaggcctgtaatcccagcactttgggaggccgaggcgggtgtatcacttaaggtcaggagtttgagaccagcctgaccaacatggtgaaattccacctctactaaaaatacaaagattagccaggtgtggtggcgcatacctgtaatcctagctactcaggaggctaaggcaggataattgcttgaaccggggaagtggaggttgcagtgagccgagatcgtgccattgtactccagcctgggtaacgagagagaaactccatctcaaaaaataaataaataaataaattccttttgtctaagctctacaagaataaatgagtagtacagtgtcaattagaattagtcaataatcctcttctactcccttaggtattcactcctttctctgcctacctgtgtaccttcaatacactgctgttgtatacctgtcacatggaatttttacataatttacaattagactaagttttttagctggtatttttgttagggccaaacctgaattacatataaataccttgaaataataatttaacttccttatctgtaaacagaggattatcattacctctcagaattgtggtaacaactaaatgagatgatcatgtaacatgcttaaccaataagaagtgttcaataaattgcagtttgttgttggcattattacttggaaattttatgttctccttaaaacacaggggagaatggagattaaaatatcaggtaaaaggatattagggctttgttttaaaaatacaggtgaacctttcttcagtgtcaaaggttttacatgattaatttgaaaagaaccactagtatttaatgtatagaagaaagaagtaagatatctgcctcaatttgttttcagcaataaattataaaatttcctggatgaygataaccatcaatattagttgctttagggcattcaagaagatcaaagagtacaagtcaataaagttgaaacaatatgaaatgtggattgctgaaactgaatgccagagatatatcttgcccagaccttaaagcaaaattgaggcaagagcaaacaggagtatatatttgactttttcacaaatttaaaaaamrgtataatatatgggagcaagagatgaaaaataagagtagcatttggaagatctaaacagatatcctgtatttataaataatgcataatattaatttatccattcaacaaatatactttttgtcacttatgtgctagacactgacctaggggttgggaatacgataggttaccaaacagacactttacttttgtggaacttatagtcgaatgagtggctatgtggagatataatcttactgatgaatacttaaaaatttagcagttatttccttagtaatgatcatagagtcttatttctcaatggaaaggcatccctcctctgcccttcaccttttctactctcttcctgtgctgaaagctgcacgtataagcctaatcaccctgatgtatatgtgagtactgccttagactatcagtaaagctctgtgaattcacttcccaccccaccgtacagtgtgagactccagcatattctgtgactatgttctgagaaaattctaaaccaagctaatttaaataggagaaaatgttgaatcttgatagacttaaatgaaatacatgttgcatcagatgaaattcataggccacctaattttcattgtggttttagatccagacctctctgatatgaagaataatgagccttatgactataagtttgtgaaatggatgactaaacataaggtaatgtttattgttctttgcaagattctgttatattttatagttaatttttgaaggaaatctgctggtatgctttgaaatcgatcaaatgtaatgttgttatatgatactccacttgtggcttttaaaagcatttttctttttggaaattattgtgactatttaaaagtatctagttgcctctagtatctgtagtaccaaaattaatatttgaagtgtaagtagttttcttattatatgtttctatttatttttcagaaactatcagccatccccgtttcagcattctgtaactcagagactaaatcacagtttgagaagtttgtgcgtttttgcttcattaaagtaagttccctgctctattgaaaacacatatatagtatcttcatttcaatttttaaagtactattttcttctgtttctaaaaatgatatgctcatatgcagtttttaaattttggcttacggctttaaaattaactgcttactggctgggcgtggtggctcatgcctgtaatcgcagcactttgggaggccgaggcgggctgatcacgaggtcaggagatcaagatcatcctggataacacagtgaaaccccgtctctactaaaaatacaaaaaattaactgggcatggtggcrggcacttgtagtcccagctactagggaggctgaggcaggagaatggcgtgaacccgcgaggaagagcttgcagtgagccgagatcgcaccactgcactccagcctgggcaacagagcgcgactccgtctcaaaaaaaaaaattaactgcttaccaaaataaaattcaacactttttgaaagaagacaacataatacagaccccttaccatgtaatatgacaatttctagcttacaatgaaaaattactagacataagaaaacacaagaaaatatgacctgtagcaaagaaaaaaagaagttaatagaaataggcctaaagktgacccagatctagaaattagcagacaaggactttaaagcaaacatttgaagtatgtttaagaaattagatgaaaacgtggtaataataagtgaacagagaggttcaaactattaaaaaaaaaaagaaccaaatggagattcaagaacttaaaagtctaatatctgctatgaaatacttatggtgctaagagagtactgaagatgtcagaaaaaaagggttaacttgaatacagattaatagaaattatccaatctgaaaaaaggagaaatattatttttaaagagtgaacagaacctcaggtctatgagacaataccaagtgataatatatgtgtcattggagaaccaagaaaaaaaagagagagaatatgacagaaaaaatattttaaggaataatagtcaaaatgttcccatatttggtgaaaagcaacttatgtctaaaaaggtcaatgaaatacaacaggataaatattttaaaagcacaattaggtacatcataaactgctgaaaacaaaagtgaagataagatattaaaggcagccagaggtcaggtgtagtggctcatgcctatagtcccaacatgttgggagaccaaggcgggaggattgcttgagtccaggagttcaagaccagcctgggaaacatagtgagatcctgtctttataaaaaaatatttttaattagccaggcttgctggcacatgcctgaggtactcactattcaggagtttatggtacaaggatcacatgagcccagcacgtccaggtagaaatgttaactaacttcttatcagaaacagcggagaccagaatacaatgaaataacatcatctgagcactgacataaaaaaaaaaaaataacagcctagaatgctatatctaggaaaatagcctttaaaaatgaaaatgaagtagatatccctgacaaatgaaagctgagagatttatcactatcaaacttctccttttttaaaaggttccaagtgtgttactgctgttttcaaaatgttgttggtactgaaaatagtcttactgagatcaagacactctatcaactcactcatctttaaacctaatgagaataacataaacactgttttcaactttcagagacaaccgatagccagacttgctcagaatagaatataaatattaacaacctaacaatgtaaacattcaattgactgaaattttaaagaacggtaatgctattaatatccttcatcttacactggattgagaaatagtggtatattatttgaaattgtaaacaaaactaacagaagaaagaagtaacgtaggacttccagttttaaaatggtaaacccagccctcccctaatctctttttagaaattatttaaaaacaactaagagaatagaaaacaaattccccagtgtttaaggaaaggctgctaaatactgtgaaggtgatggtagagggaagatccctagaaaggatcctgcttttacatcttcaaattacagacaaagccagcaggcagcatactcattattgagaacagtaggagyagtcgctgcactggcagcaggaacttctctagaccgtttggcatgatggaggaaacggcaaaaacatacagtcatgtcatctggaaactatgtaaggcaaggtggaaaggagactctggttggtctatagatttcctcatttactcctgtcattttgctaaaagctatgttgaagcaatgcggaagagatgtattaaactggggatagccaatttaattatttggtaagaactgtggtctaaaagaactcccacccactgaaccctacatcaactgtattaaattttactatgagacaaggagaatttctgctcttttctggtgctgccccagcttctcccttatacaaatcagcaaatctatcttcaaatcacagacaaagccagcaggtagcatgcttattactcagaacaataggtatagtgcatgctttggcagtggaaaacaaagaattcaatcaaaaatgattaataatcaaagaggaggggccaggtgcggtggctcacacctgtaatcccattactttgggaggccgaggcaggaggatcacttgaggtcagcagttcacaaccagcctggccaacatggtgaaaccccatctctactaaaaatacaaaaaattgaggtgggtatggtggcacatgcctgtaatctcagttacttgggaggctgaggcatgagaatcacttgaacccaggaggcagaggttgcaatgagctgagattgctccactgcactccagcctgggtgayggagtcagactctgtctcaaaaaatataataacaataataataataataaaagaggaaccaactgtgaatctatataggacagtataaggaaaagagaaaggtacaaggaaaaacaagtgttagagaatattcgcccaaaaaaaatgttgccatggagcaaataaaattagtgctatttcagatttaaaacctttaaaatgagaaagcagagattttacgaattcagggaagatagagtaagatattataagaagatcaaatgggagctatcagagttcaggtaggaaattgaaaagaaaaaataaagctattggaaattatggtgacattattaatagaaacaccacaaagaacactaaatacttctgtaaggacattaaggatggagataagtgagcaaaaggaagtagaaaggaacaaataatttttaaaatattaggcagaaaaattattgatgcagaggaaaaataaaatatgtrgagttgccagaaaaaaataagagcagaacaaatggaacctgcatataataataattgtcacacaattattaacactgagatatacctcgcttgatatattgggcttcaaagacaattcctttggtcacctagacagtaagatcaaggcctccagaggggccagaagaggaggatcagtatggacccagactcttcttacatcagcagtcaatattggcagatagtgtggaagtagctggaagtttctagggaaagtggacacacctaactccacctcttagaaagactaaaaatmaaagaatgacaaaaacataccaagaaaatagaaattgaaagaaagcagtttgaattcagagcaaaataaaagtgataaaagtaaataaatttaaggcaaaaatagcactttataatattatgggtaagatccttagtagttgttaaacttataaaagttgtcaaacttatttcatagtaagggaaatgaaaaatagaactgcaaagaaattttatctcttagattggaaacaaccaaaacaactaaaagtttcataaaacactctcacaaattgagagtgggagtataatttgtaaaatctctatggtggttagtttgaaaatttctgttcagatgtgatttcccataccctttgatccaacaattctacctctacaagtgttttcttgtggatttatttgcacatttcgaatgacttatattcaaggattttcactgaggcatcatttgtaatagcaaaatattgtaaacaacaaaattattcaccagtgggggctgcttgaataaatgatgctacattcagatcaacctaaatgcccatcaatgctgtcattggataaagaaaatgtggtacatatacaccatggactactatgcagccataaaaaagaatgaagtcatgtcttttgcaggaacatgggtggagctggagcctattatccttggcaaactaacacaggaacagaaaaccaaatatcacatgttctctcttataagtggagccaaaaataatgagaactcatgaacacaaagaagggaacaacagacactggggcctccttgagggtggagggtgggaggagggagaagagcagaaaagataactgttgggtgctgtgctcttaatacctgggtgatgaaatgatctgtacaacaaacccctgtgacatgagtctacctatgtaacaaatcttcacatgtacccccaaacctaaaataaaagttaaaaataaataaacaagaacaataaaaaatatacaattttaaaaagaaagatggatgaaaatctctggaaaaatatataatgaaatcccagtgttgtctctggagagaaaaactgagtggctgaggaagataggtgggaagctgacttactttaaaacaaatatttttaaatgctctcaacctaaaagtttcaagaacttttttctaaactatttcagagtaagttgtcaacttaattactgaggatgctccgatcacccccatatactttcttgtgtattcttcataaacaagacattctcctcccaaaccacaatataaccctcaaaatcatgaagttaaccttgatactccatctaatcctcagatctgatttaaatgtcattcattgtcccaataatgtcctttttataataattaattaattcaggctagaatcatgcattgcatttagttgtcatgtctccttcaagctagaatggtttctcagttttctttgactttcatgatcttgatacttttgaaaattatcaatgaattatttttaagaaagtacctcaatttaagtttgatgtttcctcatgcttagaytcaggctatgcacttcggcaggaaaccacagaagtgatgatactctatccttttcattgtatcaggtggcacatgatttcatttattcctattaccagtgatgttaactttaaccacctgattaaggtggtgtttgccagtcttttctactataaagttatactttttcttgttaaatagtaaatattttgtagtaaggtactatgaaaatattccatatctcattaagcaatttatttattaacttattcatatgtatcaatgtggacttctggatttttattttgtagtacagtgggctataatttattattattattacttattttgatacttagattttcccagatttggccactagtcatgtaactactaatttaatcaatacttctgtatgggatcaatctcctgtcaaagccactgtgcatccctcaccttcccagtccctgagagaatacccttttcccggttcaggctttgacattttgtgccaggctgctacactacatcttcacccsacctgggctttatcacccatgccgacctgtcctgtcatcctcctggagaggtgcccccatctaggtctccaataccccataccaggccaccactgtcacctactacacagaagccctccttgcccctcttgggcactgacaccatgccagatgcctgcctcatctcatccaggctccaggaccctgcatgaggccaccctaccatacaggtgcctcacttaccccactcagactctgacatcctgttccagccagcactatcacctcatgacacccatgctgaccagcctgctcactccactctggctgcagtgtcctgcactagggttgccaaggctctcccagccctatacatggacagccgctttgctcagcctcacctattggctttcagactgaatcattctgatggagagagaagacaaagaaaaagaagtagagaaacagaagatgaacaacagaaggctggattttctctgcttacacctctgtttaattttatgctatatgtatgaatcacctattcaaaaaataaactatttttcaataattacaactatgaaaccttgaaagcaaggggcagagtagtgtgaatgaactaatttttttttgttcagagcaaagtatagatatagtagataatatgtgaagttcacaaataaggaaatagaagcataagcacattattagattttggtggtagccattagaactaaatccagaaattgccataaaaggttatcttgaaggtagagggagtcataggaagggtgaagaaggggtggagcagacagctattatttttcagtgtaaactcttctgtaccctttgacctgtttctgtaattataattcatttggttaactgttttcctgttttgggttctgcttttgctttttcactttgaaaatttttcttcacttgagatcagatattcacttaaatcttcattatgttgtatatttaaatctttgcttcatcttgaatttatgtatatctgtaataatgatgattatttcattaatttacagaaagacagcacactggatgctgctgaagaaatcatcaaggcatggagtgtacagaagtcttgatttgtgcagaatggattaatgtttctgttagatgacctagtatggaattgttacttagtgctgccacctgctggatgttaaaaggtatttcagtacaactggaatttaaatatttccattgtttttccaaagcagttaacccaactcctaacaacattttcgggggatctgaccttttttttccagttgaaatgtattaacacaccttccacaatcattttataagagtcagcataacatagtggataagaamtgtgagatgtttaacctctcagtaactcggttctctcattataaaataggaataaaatcagtacctgtttcatatgaaggtcgtttctgagaattaaatggactaatgtatgcaaaaagcctggcaaacaataaacactcatctgactttagccggtttcatgtttccaccattgtgtaaaaactcctaaccagttccacccctcaaccacatctatttgttttgtgtacccacctgtagttcctccccttcatttaccaatggccttgaactctgttcacagttttgcttcataccccaagtactgctgttatttgcggtggcttcaggtccacatagattagccaggctttccatactttgacatcctcacctctggtgatgttcacctccactgcacttcagccaccgctgccttggtcgctccctgaggcttttatgattcaagtcggcttcaccttttgagatcacaaattcatcatctcccactataatgacctattcttccagctcattgttgctgtcttgtgcacatgctctcccttttttttttctctctctctctctctctgtctctctctctcctccatctccttctcctcagctcttttcaaaatatcacttcttagccaggtgcagtggctcatgcctgtaatcccagcactttgggaggccgaggcgggtggatcacttgaattcaggagtttgagaccaggctggccaacatggtgaagccccatgtctactaaaaatacaaaaaaaaaaaaaattggctgggcgtggtggcgtattcctgtaatcccagctacttgggaggctgaggcaggagaattgctcgaacctgggagatagaggctacagtgagccaagattgtgccactgcactccagcctgggcaacagagtgaaactccatctcaaaaaaaaaaaaaaaaaaaaaatcacttctttaaacttactacaatttcaaatccactatttcacaaaaaaatggtctatgaccttctttcattagaatctactaagatccttgttgaagacagagattctggtcatcaccccagacctggtgaataataatttcaggatgtagccctccaggtgatacttacacacatgaaagtttgatcattactgttgtagtttgtagaatcctccattttatttctatcggctcccttaaatcttcactccctttctcatctagccttgacttcattgtctatcacttcagacaagttgcttttgctgccttgaattatttgcaccattgttctatctcagctgatcaaaaagaaagaactcaaccctggggttggagctccatgcctgtacctgggctgtacattgcacagttgggcaggttctagcaaccatgaattcacgtcactgacacgaactagacataagtctatgttcccctaccttttaccacagcagcaattcctaccattctcctatatttatgttttgttttgagatggagtctcactctatcgccaaggctgggaggcagtgccgtaatctcagctcaccgcaacctctgccccccaggttcaagcaattctcatgcctcagccatccaagtagctaggattacaagtgtgcgccaccacacctagctaatttttgtatttttagtagagacaggtttcaccatgttggccagcctggtctcaaactcctggcctcaagtgatccgcccgcctcagcctcccaaagtgctggaattataggcatgagccaccgcacccagctgattctcctatttttaataacaaaaatatgctacctccattctcacctcaaagcctaccacagtakcatgattaaatcatagcaaataacttcaaccccacttctgtgaaaaatataatgaaaaaacaagctaccaaaccagcacttccaactaggatcgtaccaataagcctgtgacttgtctgcatcatcatccatccttccttccctccagttataatggtcattcatcctttgacttgtccaaggccgacaggttaggggtggcagtagagtaaggaggacttggttaaaaattaccaggcccagccatctagaaggaagctcaggaccccaagagccaacaattctgtagcaacagaaatcccatggcaaatgtttagcctgtccacccttgctgggaacttgacaaaattttcagcagratttaaagcagctttttgcagccctggrcttgtctaatgctacttccactgcctgtgctctggatcttatttcctcacacactctcagaattggctcagtctatgctcttggaccttcaatctctactggttcccttcttcagaagtgggatatgttcaaatctctcccatcttagaaaattctttcactgattgagtctatctactaacctgctatgtcttcctattcagggcaaaattctttctatctttcctctctctcctcctcctccctcccttccttctttcctttgttcctatcttctttacttcttccctgtctgcctccctccttcccctattttttccctccctcctctcttttccctttttccttcttctcctccttccttccataagtatcacttgaactcctactatgtgccaggcactcttgtaggcacttactacatcagtgaacaaaaattaaagattcctgtcctctaggcttttcatctagccaggggagggagattaagtcataaacataataaaatatattgtatgtaaatttatacctaattgtatgaagaaaagaactagagcagaataaagggggatgactgttacagaagcaaattgaaattacagtagtgtggtcagaaaaggtcttatggaggggacatggaagcagatttaaaggagggaagggagacagccttgtgcagatcttggggagaacattcccagcagaaggaatagacagtgcaatacttcaaagacaggagggtgcctggcatttttgatgagtaactcaaagtctggtgtgattggatggaataaccaagggggagagtagtaggtattacatcagagaagtaacataggacttcaaggacttattataaggatgatagcttaatccagagaatcagggtgttgttccatttttttaaatatgtaaaataatgccagcttggtgccatggctcacacctgtaatcccagcactttgggatgctgagacaagaggatcacttgaggctaggagttcaagaccagcctgggcaacatagtgagaccttatctccacaaaaaagaatttaaaaattatccaggcatgttggtgtgctcccatagtcccagctacttgggagactgagggggaggattgcttgaacccaggaggttgaggctgyagtgagctgtgatcacaccactgcacttcagcctgggcaacaaagcaagaccctgtcttaaaataataatagtaataatgtctgttgcggcattgtatataattactccaaatgggaaacaacccatttgtttatatctatctatcaatagtctaatctatcaatagtctaccaatcaatagtctaataatttagggggcatattcatacagtagtatcaatagtctaatagtctatcaatagtctaatcaatcaatagtctaataatttagggggcaatattcatacagtggaatatcatatggcaatgaaaattaacaaagtrcagctacacacaataacatgaatgaatttcatcaacactgttgtcatagggtttcttcacagtgccttcaaagaatgagctagagctctcagtagacagtattctgtaatactagaatcaagtgctgtgatcattgaagctttgcatgtcagcctcaacctcagggcttctagaatttctgcgtgcaccctggagtgagggtttccacagtttggtccaacagccctaagattaccatgggaaactccatgtctgggtgattcaagagacagaatcattatcttttccattgagctgtgatgaggagacctgagttggggagagggaggaaatggcttttttttttttttttttttttttttttttgcagttgcaggagtgaagacagagctcccatacaaagggaggggacccaaagagggtagctgttgctggctcgaatgcttgggtttacatcccgatcattgtccttcccattgtgctctcaggtgataagatgattggctatttctttacgtcctgtttttgcctaattagcattttactgagctctctgattggtcagatgtgagctaagttgcaagccccgtgtttaaaggtggacgtggtcaccttcccagctagccttagggattcttagttggcctaggaaattcagctagtcctgtctctcagtcccccctctcaacaggaaaacccaagtgctgttggggaggttggccaacaaccactctaactgcttcctgctgaactggggcatagtaggggttgtacagttgagatttcctcaggaggggtgccttcaatgtcattaacattggagcatgggctagcaggccggtccaggggtccgcagtagatcttagtcatggattgcatctggggctccatttgaagaatgatttgtagttttacagcttcgattctggaagagacaaacttaacaaggaggttaaagatagagggattgaaatatatggcctgcagtgcaggagattatttctttgccacacttcacaggccctgactatctgcttgatagttttgaaaaggcctggtccagtaaataatgatttggccatctgatgggtgctatcaatgcctaagtgaaaggtttggtgaagggttttaagtaatttccattggttagctgcaggcaaaagtatttttccttcttggtggctagccatcctgaggggaggaaactatgtcctcatgaggttccccattctatttcttcttctgagtaccggggcttggtttcctggaggggattaccccacactaggggtccttctataagcatttctaatggagggtcctgccttgcggctcttttggcttcaatatctgcttggcgattcccttctgtttccctttcctttcctttctgatgaccttggcagtgtaagactgccacctctttaggtttctttatagccaataataatctcctaatggcttcctgatgtttgataggtgwtccctcggaagttgggaattccctttctctctatattgctgcatgggcatggaggactaggtaagcatacttaagagtctgtatatatatttaccttttttcttcccttaattttagtgcccaagtgagggctattagttctgccagctgagcgctagttcctggagtgagggaattactttcaagtattccattaccactgaccactgcataccctgcttttcgaagtcctttttctacaaagggacttccatcagtatacaagttgaggtggggatcagtcaagggaacctctagaaggtcccctcgagcggcgcaggtttgagcaattacttgctgacagttaagttctatttttttcttcattgtctggaagaaatgtgactggattaagagttgcgcaagtgcacagtcgcagcactggcccttcaagtaatagagcctgatatttaagtaaacggttttctgacagccacaagtctcctttagcagtgagtatgccattcacatcatgagatgtccacacagtaagatctcttcctgtatcattttaactgcttcagatactaagactgttactgctgccactaccagtaaacaatgaggccaaccctttgccactacatcaatttccttactcaggtacgccacagattacaagctgatccctcggacctgtgtaaggactcctagagctattccggttttttctgtgacatataaagaaaagtcttgccttgttggcaagctcaacactggggcttgggttagggccttctttagggcctggaaagctgcttctgcttcaagtgtccatcttactaaatgggtattggctttctgagtttccttaattagtgtatataaaggcctggctatttcgccgtacctgggaaaccacatttggcagaagcctgttatgccaaggaatcctcttagttgctttagtgttttgggatgaggataagccagtataggctggatacgtttctcactgagggccctggtgcctttggataattttaaccctaagtatttaacctgttgtgagcagagctgagcctttggtttggaaactttgtagccacagatggcgaggaaatttaagagtgcttgggtggcttagtggcaaaaggtttctgaacgagtggctaaaattaaatcaccacgtaccaaaggacaagagggtccaggtatgagaactggctcaagtcttgggctaatgcctggccaaatagatgggggctatccctgaacccttggggtaaaacagtccaggtgagttgagacgttgggttcgaaggatcttcaaaggaaaacaagaattgagagtcaggatgtacagggatgcacaaaaggcaccctttaggtccaggactgtaaactactctgcttcctctggcatttgggaaagcagagtataagggttaggtacagctgggtatagagggacaacggcctcattgataatcctgagatcttgcactaacctccactgtccgttgggtttctgtactcctaaaattggagcattgcaggggctattgcatggttttactaggccttgggcttttaggtctttaacaatcttttggagtccttgttgggcctcgggtctaagggggtactgcctttggtagggaaaggaggcgggctcctttagtttaacttgagcaggacgggcattctttgctcgtccatattgtccttctcttgcccagacttcaggattaattccttcctcaagcaggggacaacaaacgagtgttccttctcctatgttcaggtgtataatggcccctgcttttgctagaatgtctctccctaacaagggagtggggctttcaggcataattagaaaagcatgtgaaaacagtaaagctccccagtcacaacttagtggctgagagaagtatctagtaactggctgtcctaggacccctcggatagtgacagatctggaggacagttgtccgggacaggagagtaagactgagaaggctgtgccagtgtccaggaggcagttaacctcctggccctcaatggtctagcatacctggggctctgtgagggtgatggcatgggctggcacttgccccgggcaccctcagtcctgctgctggatcatctggttagtggcttctgactcagaggaccttcgtcccctggggcagtgggccttccagtgattcccttgacataaggggcatggacgagggggtggcttacttctacttggacaatcttttttaaagtgtccttgtagaccgcactggaagcaagccctattagcattcgatttgcccagcttttctcttttccagagcctccaaagtccgcttgcctgagggccatgactaaagcggtggcccttttttttttatcccgtttgtcccgttcctcctgatctctattataaaaaaccaacgttgccaagttcaatagggtttctaagttttgctccaggcctaaggaggacttctgaagtttttttctaatgtctgcagctgactgagtgaaaaatttatcctttaagattagttgaccttcaatagagtcaggtgacagggaggtatgcttcctcaatgtctcccttagtctctccagaaaggcagaaggattttcttcctttccctgtgttatagtggacatcattgaataattcataggcttcttcctagttttccttagtccttctagcgcgcaagttagcaaatgtctgcggcaccaatctccatgttctgattctgtgtcccaatgaaggtctacagtgggaactgcctgctggcctgtggggaatcattctctttcctctgttgtcatcctatcattgagctgactgagataccagagatcaccaaactctcgggctgcagttatggcggcacttctctcatttggggttagtgtctgatttagcagtaacatatctctccatgtcaaatcaaaggattgtcctaacccttctaaaacatcaatatagccatcagggttatctgagaatttacctaggtctattttaatttgctttaagtctgagagagataaaggtacatgcactctggctgggccgaattctcctcctcctactgcttggagggggcataatcggggaatactggtactctttggttcattgtttacccctttgtctatctcctcttggaccatttgggttgaaggggggtccttattagttggggaaggagtcagggggacactggggtagggaggtagactctgagggcttcctgtagggcataaatcacactttttacataattgccagttgtctcttaatgaaaagaaagtttgcacatatggcacttcactccatttgccttcttttctacaaaagaggtctagctgtaagatgctgttataatttatacttctcttaggaggccaggtttctcccccttgaagaggatattgtggccaggcagtactgcagaagaatataagtagtttctttcttagcatctgagggtcaaattggtcccaattctccagaatacatcttaggggcgtttttgccttggggggaatgtttcccatctgaaaaaagaacatagggatgccagcacccctagtcattttctgatgagcattagtcctagagcgtcctctatggtcctaatgtttattcccttccagggtgcgtaaccacccatggacctctgcttatcggattagttacgcttaccgatgtagcagtcctgcacccctttttccgtctttcttgaccacaaagaaatgggtccgggctgctggattctagtggtcctttaccagcgtgcccaacattgcatttgtgctcaggggtgagtcctagagctgggctgggttcctgagtatttcataacaacccagctgccccatcaagattcattcccataaacaacagttcttwtgcaaatttgtttcagagarggtgtgggtaaccttttgagtcaggattgagatagtcttttttgattctgtaagtactttaaggctcggctaagtgcaaacagctcccacgtttgaggagaccaattattaggcaatttttctaactctgcttccacaagagtctccctatcaattactgaatacccgttgtggtttttccctcagtctcctgggaggaaccatctatcggtcagggccaggtgtggtggctcacatctgtaatcctagcactttgggaggccaagacaggaggatcgcttgagcccaggagtttgcgaccagcctgggcaacacagtgagatcctgtctatacaaaaagtaaagaaaaattaaccaggtatggtggcacacacctgtaccctcaactaattgtgggggtgaggggggtggattgcttgggcctggaaagttgaagttgcagtgagcgccataattgtaccactgcactccagcctgggtgacagagcgagaccctgtgtcctgtcctgaagggagttcctcctaggtctggtcggacctttgtatggtaattaagatttaaatcccctgttaggaaatctgctgggttaagggaattatcagtggttggtgttaaattacctttttctaacagaatagacccatactttaagatttttgagttagtaagctacctgtttgcttttttgacttacgatagttctgaactggtgaggtgtgctcacaatgaggtttcctctaaaggctaattttctactttcttctgttagcaaagcagttgctgctacagattgaatgcatttgggccacccgcgggttcctgggttaaggatttttgataggaaggctactggttgtcggtggcctcagtgctttcggctacgcccttatttacactgacaacaaagtggtattggaatgttatagggtcagggagaagaccttcaattatcaatcataggttttaaatttaccctggcttttaaaggaatagggcacactggtttttgtttgtttgtttgtttactatttctgtctttttctttttctctttgactccctctttatctctctctctctatctcctctgtctctcctctgtctctctctcctctgtctctcctccatctctctctctctctctctcttccatctctctttctctcttccatctctctctcctctgtcactctttctcttctcttagccattacaaacttggggccctggcaagggtggtggggaacgggtcccacataactgcccatatcgagagctgtatacctaaatcaggagggacaccagggataagactccctgggtttatgtctagatgcctcaggacacagcgtagagcttccttagatccctttcgagatacagcttgctagaggaaatgaaagtctgaaccattagtacctaggaggcagggatcagaggaagcagattcagaggtaaggagaattttggggctacactttcaagaaagtcgtggtcgggacccaggaggtatgggtcagagggaaaggtaggggcacacgcatgggcgactgtagagacttctggctgtgccatgatctcaaccggctaatgtcaggagttcgggatgacagctttctgcctctagtcggcccttggtttctccaagaaaattgaaagtggaagctggctccagacagacgaaccggacgacaggtgcccagtattttcctccaattctaaggaagaataggacagaatagcaagtgaaagtggtctaatattactcaccgctttggaagtcccttcgtggtcaccaaatgttacctggggtccttgctcccagagctcccaagatggcggcgggctgcttccaagatggtggcaagcctcatgttctctgatctggggttcttggcctcacggattccaaggaatggaatcttgggccatgcggtgattgttatagctctattagaagccatgggttatggaagagaaccatggaacccagtgactagtgttcagctcgattaggatgaacccgggcacttagccatgcaggaacaatggcaagcctttagcccaatcgggagcagcaatgggtgcctcactggatcaggagcacagcagacaccttaccggatctggagagatggaagtcagcagcgagtctgcgatggcggcaaacagcagtggtagacggcgagcaaaagctcagcttgagctgtaacaaacacggaccagaacagtgcagttgcaagatttaatagagtgaaaacagagctctcatacgaagggaggggacccaaaggcagttgcctggaaatggattttaaatatgaggtctgtgggtgaatagtgcaatattgaacaaaggaattttttttttcagatataagaggtttattaaggaaaggctcacagacacacccataaataatgggaggaggatggggaaagggatgaagcccagcaagagtgtgatttcatgtaagtcccagcattggcctgactgccaggggagggacctatggagtataaattatgcctcagagtgtgtgcctccttgtgaagggagctgggcttttgactcctaaccctgtcagtccatggcctcagccaaggggagtgggaggtggagtggccacaggcacataaaacccccagaccctgctggtttctatacggactgactggctccaacaccaggtcacaggtgccagcctttaaccacaaatcacttagttaagattgaacacagtgagctggcaagagaccctaggggatctgggtggctgcaaacagtactggtcacaacctatacctccaatactccctgctcaccgccaggcaccagttttgggtctttcgttgaattctgccataagagaaaattaatatcttttgaaagttctgggttggtttttcatcatctacagatgtacttccttcctccagtgagtagaagtggatgtccctctgcaagactgagcagccatcgcagttaaagatgacctgggacatttgaaaactatagagggcatacttttggctctcctggactcttagttgagggattttctgagacaggcactggcagacagatgcagagaatggattcccagaggctagctttggatatccaaacatttcatagaatttatccagagatttctgaagtccattatcctcttctwcggtctctgattggccttacacagaaaggtgaaatcaaaagttctcagtggtcccagagtcattttgtttagtatttaggctcctggtgtctggatccacatcagaaaagcaaggaaaagaatggaatttcacagaactaaaagccttgctgttggcctcttggctgcatctctgcaggacataatccttcacatacaggcttatggcaggtccaaagtactgctctcctctgacaggctgtcggggggtggcttcctggcagccacactccgccctgcaacagcaagagcccagaacttggaaatggaggtgcaccatctttgtaaaccaaggaaatttttaaactgtgacttaatattcctgggacttgtctccctaccttatgtcttgcaatccattatccctacagaccaaaataagctttctaaaatgaaaatgtgattacttgacatatattaattaacaatattcatgttgcaaggcatagaaagcctaagtcatatggttttgaatctaataaatggcaattttctgtctcaactggagatttaggagtagaagagtttcagttacagcttgatacaggaatctgtttataatctttcaccaagctccatttcacagttctgtcttctccgtgtgtcagtgttaccttaagattacccctctagtgatagcaacatggctgcagcagtttctaagcatcacatagttactctagcaaacacagcaaaagaggacactttctcagaagctccagcaaatggcatactgtgtcttattgacccatccctgaactaatcactgtggccaatgggattaggtttgctaaatgtcttaagccaatttgaggtcaattccatacaaactacattggttggaagaagggtcagaataaagatgggaggaaataggtgagcaaacatcttaagtcagcagtcaccagcctttttggcaccagggaccggttttatggaaaacaatttttccatggatggagggggatggttttgggatgaaactgttctacctcagaacatcaggcattagttagattctcataaggagcatgtaacccagatccttcgcatgcacagttcataatagggatcatgagactctaatgccaccactgatctgaaaggaggcagagctcaggcaataatgcttgctcacccaccgctcacctcctgctgtgcagcccagttcctaacaggtcaccagctggtaccagtctgccacctggaggtcgggaatccctgtctgaagtgatttaaaacccttcagtaatctctattgctcttcatataaaggctgctctttcctcatcagggcctatactaccctgcatggtattgtctctgtcacccctttgggctcatctttctcagtcattctttcctggtgttcaagcatgcttttttttagagagagagggggcctcattctgtcactcaggctacagtgcagtggtgcagtggtgcaattatagctcactgcagtcttgacctcctgagttcaagcaatcttcccacttcagcctcccaaagtattaggattataggcatgagccaccatgcccagccctcagtcatgcttaatttaggtgctgtgatggttaattttttctgtcaacttggctaggccacagtgtgtaactgtatgataaaatgttattctggatgtttacagggggacgttttttgatgagattaatatttaaatcagtagattttgagtaaggcagcttgcccttcataatttagataggcctcacccagtgagttgaaggtctaaatagaacaaaaggctgacttcccctgagttaaagagaatctatcagcagatggccttcagacttgaactacaatgttggctcttcttgagtctccagcctgacagcccactctgcagattttagacttgcttgtctccataattgggtgagccagttccttaaaataagcctttttctatacatctacacatcctagtggttctatttctctggagaaccctgactaatacaggtacatgagcaaaaatgaagttaagttgtctataaattcttgaagttaggtaagaaatcattctacaacatcatactacacaataataagacatatagacttcacactgtaagcaatgatgaacctttgaagatcttttatggaatagagagtatatgataaaaactgtggtttggctattgaaaaaccaataatatctaccttcttctttgactacttatactattaaggctaaaaaaaccaaagtacctaatttctccagttcctttgcaactagtcaaaagtgctcaaggagggcttccctttatggaaaaaggcaaagtcttcttgagactttttaatcctttttgtccttttcaccctctaccttcttcctgcctagaatgtagaagcgaggcctggaggtgaagcagccatcttccattcatgccacagctagcatgagggtgaatgtctatataataaggatggcagagcagaaagatgaaaagagactggaactctggaagcagtttgaagccactgtacctacccctaccttgtaatggatgagacaaataaacccctatttgtttaagccactgtagtacagttctctgttatttacagatgaatgcattactgatataggttacatggtacaaagatcaaatttctcttctagaagataagttgacctgaggaaaagtcctgcaatgcacagagagaagccagtcagaaggctccaggaccccaggaaaaagacagtgaggccttgaaggatttagtatgagaaaaaggtaaattatcacaaatttttgtcatttgtaaattttttccataattcttatgatgaaaataattatataaccacacacttaccaaatattaaattaaaaattatttccagataaaacaagtctacttggtctcagttggataaactcaagagtaaaacaacaaaacaaaaacctcaaccatgttactgacacatgagaatttcattttattgctgctctgggaatacatctaattactcaataatgccaattaaataggaagttcacctgctgacaaacagctatcttgggatatatcagaataaaccatagaaataattggattttctaatcaatattaacttcatcatattatacacttgctagtttccttcatatttagcaacaacatttgtttcttatgtttagcctttcatttgtgacaacaatctcatggttaaggaaataaaggctgggagcagtggctcatgcctataatcccaacactttgggaggccgaagcagatggatcacctgcgtccaggagttccagaccagcctgggcaacatggcgaaagcctgtctctacaaaaatacaaaagttagccaggcatagtgttgcacacctgtagtcccagctatttgagagactgaggtggtaggatcacctgagcccagagaagtcgaggctgtagtgagccatgttcgtgccactgcactccagcttgggtgacaaagttacaccctgtctctcaaaaccaaaagaagagaaaatatatttttttttgaccatgagaacagtcatcccgtctgaagtatttttttttataaactctaattatccattaatagtataaacatccagaaggggtaaagatggctgactagctgcaagcagtataaacttcctccacagagaggaaccagaacagcaagtagatgcattacaaacagaccatctaggagagaatgctaggattcaccaaagaagagacaggaaacaccagaagtaaggagaggctttgaggcagcttgcccagctggggactgactgagaatcgaaagaggctcctggacatgggaaaacagtaaaagagaaattcccagggctccgaaatgggtttttacaatcttggctatgggagaaactcttgacccagtagggccttgggcctgatatatgaagctgcttaaaaattgcatggagacattgttccagaaaggaaacccacacagaatcccacaggcatccacgcctagagctgcctcagctaggtgccattttgagagcttagatactggatctacagacactgctgctgccactacgctgatccagggaaggagatggagggactaggtgctcccacacacgcctacgagggtccctacctccctgctgcaggctgctcagactgagacaagagcaagccacactccccacagcttcttgcctatgctgctcaactgagaggtgccccatcctctctggtcccaggcccaagatgccattttcagagtttaacaccaggttgtgccctccactttggctgagttcaggccaatgggactgtagccaccacccagacaagtaggatcagggaaaccaagctcacccatacatatctaggacaatacccactgcactgcaatgggctgctgtgagacaagacctcaatccccgtagctttttgcctacattgcctgcctggaagggacctcacccttcctggtcacaggcccaaggcaccattttgagagtttcttgcagagccacaccttgctcttgggctgagtttgagttgacatggtagcagttgtcacctggacagggagagccagagaaaccaggctcttctatgcacacctaggaaaataccttcctccctgctatgggatgctgtgagatgtagactcaagcagaccacactcctcgcagcttcttgcaatgctgctcacctgataggggccccaccttctctgatcacaagcccagagctggcaccattttgagagtttaacactgggctgtactctacccttggtgtgagttcaaggtaatgaagctgcagctgctactgagccatgggagagacaggagagatcgagctctcctatgcacatttaggacaatacccaccaccctgctacaggcagctgaagggctgggaacttgcctgctcaacccattgcagctttctgcaacaccagtgtggactgattggctcccagtgggttgttccaccactgcaaccaccatcactcacatcaaaccagctgaccaggcacctaagaacccatctacacaccaggcccactgctcccactactcactgctaaacaagccacctggaagtccaagaatcaggacccaccaacagcaagagccagtataagctgctctggggcctaaaaacaggcacgcttaccccatagctgccaccattaagtcctgaagactggttcagttggtgtccaagtcctcagttaaacttcactacaacctaaactaatagctgtatcctgtgtcactgaggaaatcacagataccattgaccctgtatactgcctaaaaagtcacacaaaaatcacattagtgcaggcacccaaaatcaaagccaaagcattttacttaatcaacaacatgtatatattttcaggaaataattatctcctgcaaaaataatttcaaaaaaatggaacaagcaactgctacattacatgtacaggtatcaatggaaggacacaggaagcatagaaaagcagggaactatgtcatcaccaaaggaccacaacaattgtccaccagcagatctcaatcaaaaagaattccttgaaataccagataaggaattgaaaatactgattttaaagaacttcaatgagatgcaagagaaacctgaaaacctatacaaagaaatctgaaaatcaattcagaatatgaatgagaaatttacctaggagatagatatcctttaaagaaaaaaagtagagtgccaggcatagtgactcatgcccgtaatcctagttcttcaggagacagagatggatgaatcactggagcctaggagttcaagaccagcctgggcaacatgacaaaaccatgtccctataaaaaatacaaaaattagctgcgcatggtggtgtgtgcctgtagtcccagctactcaggacactgaggtgagagaatcacctgagcttcgggagtcaagatcacaccattgcactccagcctgggcattggagtgagaccttgtctcaaattaaaagaaaaaataacacataaatactggaactaaaaaattcattgaaggaaatagaaaatacattcaaaagcttcaatgatagactagaccaagtaaaagaaaggatctcagaacttggctgcagtgagctaggatcaccccactgcactccagcctgagcaacaaggtaagaccctgtccccaaaaaagaaaaaaaagtaacaggaaaaaagtataagaaagaatgaataaagcctttaagacatctgggactacataaggagactgaacttatgaattatcagtattctcaaggaggaagagagatctaaaagtttagagaacctgtttaaggaaataattgatgaaaacttcccaagtctgttaagagaattagatatccagatataggagggccagtgaatgcccagcaaatacattgtaaaaagaatttcaccatggcatattatattcagaatgtctaaagtgaaagtgaaagaaagagttttaaaatgagcatgagaaaagtgcctagtcatctataaaggaaatcagtggacttttcagcagaaatcttataagcctgaagaggatgggacagcattttcaaaatgctgaaagaaaaagactatcagccaataattttttatcctgcaagaatatgcttcataaatgaaggagaaataaaatctcaggagaaaaagcaggcaaaaaaaaaaaaagaagaaataaagaaataaagtatttttcagataagcaaattctgagggattttgttaccactacaccaaccctactgaaaatgctcaaaggggtcttaagcatggaaacaaaaggttgatatttactatcatgaaaatacattgaaagatcaaactcacagttcttataaaacaatcacataaaggaggaaggaaaaggaatgaaatggcaacaaaaaagaatttcatcaaaccacaaagacaaaaaaatagagaaaaagaaaaaacaacaaagcatttataaaagaacttgaaaacagttaacaatatgacaggagcaaagcctcacatgtcaatattaatcttggatgtaaataaattaaatgttacacttaaaagatacaggttggcagaaaggattttaaaaatatgatccaactatatgctccctacaagaaactcagttacccataaagatacatatagattgaaagtaaaggagtggaaaaacacactctacacaaatagaaaccaaaagcaaacaggagtagctatacttatatcagacaaaacaggcattaaataaaaaccagtaaaaaatgcaaagaaggtcattatataatgataaaggggttaattcagcaagaggatataacaatcctttgtatatttgcatccaatatcagagcacccaaattcacaaaacaaatattactagacctaaagaaagagatagacagtaatacaataatagtgaaatactctaacaccccactcaaagcactagacagatcattgagacagaaaattaaaaaagaaacattgggtttaaattggactttagaccaaatggacttaatagacatttacagaacattctacccaacaactatagaatacacagtattttatcagcacgtggaacattctctaagatagaccacaaaacaaatctcaacaaattttaaaaagtcaaaagcatatcaagtatcttctcagaccacagggaataaagctaggaatcaataccaagaggaacttcagaaaccatacaaatacatggaaattagacagcatattcctgaaggatcactaggttaacaaagaattgaaggtagaaattaatttttttaatgagtgaaaataaaagtacaacataccaaaacctgtgtgatacagaaaaagtagtgctaagagggaagtttatagtattaaatgccaacatcgaaaaagtagaaagatcataaattaacaacctaacgtcacatctcaaggactagaaaaacaagaacaaaccaaacccaaagttagcagaagagaagaaataacaaagatcagagcagaactaaatgaaagagagacaacagaaaatcaacaaaatgaaaagttggttctttgaaaagataaacaaactgataaatcattagtagactatccaagaaaagaagagagaagatccaaataaacataatcagaaatgagaaaggagacatgaaaactgaaaccaaagaaacacgaaagatcatcagagactattttggacaaccatatgctcacaaactagaaaacagagaaaaaatggataaattcctgaaaacacacaacctcctaagactgaaccaagaagaaatagaactcttgaacaggtcaataataagtagtggattgagtaagtaatttaacatctcctcatttaaaaaaaaaaaaaaaagtccaggtccagatggatttccagccaaattctaccaaacatacaaagaactaacatcaatcctcctgaaactattcctgaaaaattaaggataaccttatccttaattctccctagctcattctataagaccagtattaccctgataccaaaaccagacaaagacataaaa

SEQ ID NO: 95132 - DNA, 19876 bp, Homo sapiens
ttgaaagttcagtgctcttttcaacctgctatcagaacatccttgagctggacatggtggctcatgcctgtaatttcagcactttgggaagctgaggtggaaggatcacttgagctccggagtttgagaccagcctgggcaatatagtgagacccccatctccacagaaaaatttaaaaattagcagggtgtggtggtgcacatctgtagtcccagctacttgggaggctgaggtgggaggattgcttgagtctgggaggtgaaggttgcagtgagctaagattgtgccacttccctccagcctgggcaacacagtgagactttgtctcaaaaaaaaaaggctgggcatggtggcttacttgcgcctgtaatcccagcactttgggaggctgaggcaggcagatcacctgaggtcaggagttcaagaccagcctggccaacatagtgaaaccctgtctcttctaaaaatataaaaattagccgggcgtggtggcaggtgcctgtaatcccagctactcaggaggctgaggcaggagaatcccttgaacctgggaggcggaggttgcagtgagccgacattgtgccactgcactccagcctgggtgacagagcaaaactctgtctcaaaaaagaaaaaaaaaagtatgtccctcaaagtgttgctgagaggagtaaaggaaacaatccacataaagcactcagggtggtgtctggtgtggacaaagcactcactaacggttagttattgtcactatcacccttaccactattctgaaagatgtggaatggaggacagagacagagagagggatcaccagagagatgagaggggcagtatgggtgggaaggaaaggacaggttcaagagggctgcaggagcaagagaaggcaaatgacagagccagggccagaggcaaggaaattgtcttttgggaacattgcaggggaaggagcagagctcagaagaatcaccctaggttcaagttcctgctctgtgactggttccctgggagtgcagggcaaggcagggctgggcctcggtgttgagtaggctggaagctaggattcttgggtcgtcctcccacttggtcccatggccactctctcagactcatcttgatcctcttctagttgctcaatttggttcaacctgtgggagatgctcctcccattctccaagtctcacttccatccttcctgctaaaggacttggggatcagtcccattcccttgtctgtctgtctatctgatgtctgtgtggtccctcaggataattgctctggacaactctaacaccactcagacagattgtccggcctcctggccctgacatctcccaccactgcatcaagccaaattactcggcccccccaagccccgggctctggtgaaatccgattagtgaggagagagctgcactgagctgacagctcctccgataattgcttcccaagtaagtgatgcaaatcagcccatccagcctattcctgctcctctcttggggacccaggcgtccaggccccaggagatggaggacaccagagttgaggagacctagacgctgtcatcttcctccagttaagtaggcataatccataaagctaggttgtgctgccttggggctgaggtgtgcgtagcagggtagcgaggctgagccagggaccccactggctctgcatttctgtcttaactgagagggtgtcactttgtcaccttattctcaccccttggagaataatcccatttcttgtaaggtagatgaaggcagagatatagaagatacagagacagcgagatggctgaacctgttgagaaacaaatcaggcaggtgcggtggcttacacccataatcccaacattttgggaggccgaggtgggaagatcacttgagcccagcagttcaagaccagcttgagcaacatagcaagaccctgtctctacaaaaaaaatttttaaattagctgggtgtggtggtgcgcacctgtagtcccagctactggagaggctgaggcgggaggactgcttgagcctaggaggtcgagagtgcagtgagtcatgatcatgccactgcattccagagtgagaccctgtctcaaaaaaaaaaaaaaaaaaaaaaaaaggacacaaatggatgaactcacagcctagctcctctggttgtgggccctgcagatagctttctctctttgtaagtgcccctcctcactaggctgaggaaaagacatggagtgttaagtccccacagatggaatggggaggcatggggaatctgatcaagtctggagacttttgcatctgtgccaaggacatgtccttgggatgcagtggcccttgcttaactcacacatcaaggagcccttttcccttccccaaatcagggccctttaaagggcctgttaatgcttcttccttaatgcatttccttcctacatctttacttcaggttctttcttgctgtgacctccttatcccaacttctgctgaccttggagacctgaagagttactttccttgcaatcctgaacttccaactccaaacctaaccctgcatgcaggtcactgtctttgggaaatctacaggatgagctccccagtcttgtcctccgtgcttgtgtgtctgatagggcttcatggactgggtcttgggtactcagactatcatctgcctgagaccctggcagagcaacagcaataactaccctttgtggagcccaaattctgtaataagcacttaatgtaattaagtcatttaaacatcacaaaagaagatagagattacaatgattatcccattttacaactgagataactgaggcacagagaaattaagtagcatgcccaaggtcaccatgagtaagtggcagagcttggattcaaacgcagcagtctgattccagagcccaaagtcctgaggcctctgctatgctgtcttcactgtcctatgctcttttgatgtttgttgggctaatcgggacaggacccagtgtagtggaagtggggaaggtggctacactgaaagttaaacaccagaaccccctttggggctccccatgtcagaaacagtgagtgggagctgaacagggtgaaacttagtatctatgaagggggaaacatggccttcaccttctccaattcccgacctttgttttgtgcagtgggaggccccgcagctagacagcccttccccgtgagaagcggcgaggcaagggaaaggctgaaagatccgcctagcagcccaagtgagcagagtcggagctaggacccaaagaggccgatagatggcgctcatggcccaacacagctccagcagcccgaggaamcaaaaaaaaaaaaaaaaaaacaagtgagccggttaaccccttccctcccgggctcaggacagaggggctggctggtgggtatgcctggagccctgccccaggaccggtgactcaactctctaggctcttacccaggcgataacctgggtcatcttctgttcctgccccacaaggctctacccgtaaatcacagtcagcagcctcctgaagacttcccagaagacatgaagactaataaatggaagagactggttggaagggctgcacccaagcccatgtttcatctcttgggctctatctcttgaaagcctcagggtccctgtttctaagcacgcctacttcaggagagcgcctcacctccatctttcctgggagtgactcactgggcggggaggaatagcatggactagagagagagaaggccccaggcccctctgacattggctgtagggactcactgtgggctgcctaagcctcagtttctccttatatctggacttcctatctctgggttccctggggtggatgggcttatagggacagaaacagttattcaagtcttctaggaaattgaaatcaggggtggggaggtggaggtcctgggggatctctgcttgcctgttactcatttcactcattattgttctgccagaagcagactttgaatgtggaggggctgccaagatgacaaactagaacagaagtgctgggcaagcaagtgacagaggggtcggggtggacaggagggttgtccaagggatggtggaaatcctggaatttttaagcaatgagatgacaccacaatgaggtcccttcaccttatttttggtcagaaacacagaaatacatagacacacagagatgggggaacttgttctagaagctcagattctcttattccagtcattctagggtaagaagcagaaacagggagatgttcacagagggagacagagacctgcagatacagagagaaagctacacaagagactagaaatagagataaatttacataagtagagaggggcaaataacataggcagagagagacacagagagggagaggatctggtaaaaattaaagctcaggaaattatgggcttcatgaggtggatgattaattccatttccaaagtcttgcaagggtcagggtagtttctcacccttgatgtcagcaggtcactgctcacagctccctgaagctcctactgcacccattaagtttttgttgataggagatcagacaagtcctgggaagggaatagcatcctttttctctcacttcttcctgttctggggtttataggtctccttttctaccactcacagggagaccttgcttctgtgattagagccttggctgtgctaaggtgtgtggagattgtggggtgggaggaatatagaagataactaaccttagggggttcccagtctaatgaaagttttagagtcacgacacagaaccagacccagatagagcacaagaacaaaactaggaataggacagatttggacatagatattgggatgggggaatggtgggggaatggactgttaggtgcagccatgggatgaggattgatcagggaagccttcctggacaaagtatttgagggagaagatttggatggaagagtgatagctaactttatgtgtctacttgagtggtctaagggacacccagatagctggtaaaacattatttctggatatgtctgtggagtgtttctggaagagatttgcatttgaattggtagactaagaagatcaccctcattaatatgggtgggaaccatccaatcccttgggggccagtagaacaaaagagtggaggaaggcaaattctctttcttcatgagctgggacatctattttacctgcctttggacatcattggagttcctggttcttcgtccttcaggctctgggacttagcagtgagcctcctcccctgctttggactttcctgaattataccacctgttttcctggttctccagtgtatagacagcagagcgggagactgtgggacttcttggcctccacaatcctgtgagccaattcttggaataaatctcgtcatatagatagatatcctgttagttctgttctctggaaaactcttgactaatactgaggttatagggttgggcagatagcaaggcagagaaagaagtcaaaatggtgacactctggagatgggcttggacagtaatgggggatgccccttgctaaaaagttgttaggagctaccagaaatgtcttcgtggatgttctgtataagtaatggcaggctgcaaaggagaagtctcttatacccacggtggcagggggcctagcaatggtctttagctattgttaataccytcaggtgggtgagggattggggatggttgaagcttcctgatttgcaatccctttgggaaaatagtgaatgaacttttggaagggcgatgccctttagggatagaacccaggatttcctaggtacttacaggctgtggcttttcacttctcaagacttcctgatttaacgctgatggaaagattaaactacaattcccagcgatctttagggctaatttagtgcgccttccgggattggagcatttccggcggaagtggctgcgggtacgccaatctccttccctaaacaatgtagactacgactcccactgtccttagcgccgggggttgggtttggggtgggggaaaggaaccggaaacgggatggggagctggaccaggtgaggaagtagggggctgggaatccgggactgtgggggcaagttgacggctcccagggtcgtcggggctgagccgagagggtggttagaatttctatattttggggtccctccctccgtatggggtaagactcagtgcagggagagcccagcctatgaaaccgcctgggaggtctgcaggatcaaggctttccagtcggccggagccagcgggcgcccccggaggttttgtatggtgccttagtagtcggcccctttggaaccagatgaaatggtctttttgagtttatgctttattattattattgtttatttatttatttttctgagacggaattttgctctgaattccaggctggagtgcaatggcgcgatctcagctcactgcagcctccgcctcccgggttcaagcgattcttctgcctcagcctcccgagtaggtgggattacaggcgcgcgccaccatgcccagctaatttttgtatttagtagagactgggtttcaccatgttggtcaggctggtctcgaagtcctgacctcgtgatccgcccgcctcggcctcccaaagtgctcggattacgggtgtgagccaccgcgcccggcctatgcattattattattattattattattattattattattattattatttattattattattattattattattatttcgtttaaggatatttattattgtccctggactcccggagtgcctccaaaggacaggggagtgcatatgtgatttcgattccttcctcacttcccggatttgatgtcagagaagtctgacatcagtctgaagtcggcccttggtggtcagccttatcgcttggtccaactccgctgtctttgtgcttaatgtagtatgacmccgtattttataaaatatctacatttcttaagcctctggctcttggggcgactttgggtagaacttacaagttcctcctttgggttctcttagtgttttgttccgggtattaaagctcacatcacactgtattacagttagttgtttatttgccctcacagcagattatgagcttacagaaagcctggcctacattttactctttttggatttcttcctcatcaagagactgctgcrgtgcctgtcatgtaagagactcataagtattgaaaaaaaaaatgagttaacaggtggtaggttggatggagtatgtgattttccatagagaagagagttaaatgagttgctcaagagaaccttcttagagrtgaaacaggagtagaattcaaatcaattgacttccagcctgtggctcttgctatgagatcaggctttgaagttatggaacaatgaaagtagtatcttgccactcttttccccagccttgctgtttccaacacaggtgtctaaatgtcaaaggtgggctcaagacttctygagattctagagctggagcagccaatctgctaatgttggtgttgcatggggagatgcaaagcaaggtcccctgaaacactggcgttctccacagcacccttctcagcttttgtatgagcccagtttgtcctgggtagccacctggacaacagatcagttaaagactactgagacagtcagggaaggacttcctaagttgggcctctgatttyttttctctcccacttcccctaggctagggtgagaaaayaggtttatcgagctgttgtgtcaaccttgagttcttatcttggagaagtcactcctgacccaggcagaaagttgagaggaaggaatgacaatggtccttgtcgcatgggaggcacacatatgatgggyacagacccagagtctggaaaacaagcagagtgcaaagtgggcagctaagccttgagtgaactcaggatatagaagtggagaaggatccatcaggagtgcctccttggtaaaagctgtttattttatttttatatttacagatggggtctcattatgtcagccaggctggtcttgaactcctggcctcaagcaattcttctgccttggcctctcaaagtgctgggattacaggcatgagccactgtgcccagcacagaaggtagttttaaacaaaagtgaaaaagaagatggacattgctgagcaggtgtttgttgagtacctaataagggccaggaccttgggcttatggagggagattgaacaaggcctggctcttgatctgcccaagtttagctggggaggcaaaaggaattcattaagacgacggtaaccatggtgacacacagtggttctcagccttcaccaaccatcagaatcaccctgggaagcttgtttaaaatacagattcccaggctgggcacggtagctcacgtttgtaatcccagcactttgggaggctgaggcaggcagatcatgaggtcaggagttcgagaccagcctgaccaacatggtgaaaccctgtctctactgaaaatacgaaaattagccgggtgtggtgctgcgcacctgtaatcccagtacccaggaggctaaggtgggagaatcacttgaacccgggaggcagaggttgcagtgagctgagatcgcgccactgcactccagtctgggcgacagagcaagattctgtctcaaaaaaaaaacaaaacaaaacaaaacaaaaaacacagattcccaggcctcacacgggacctacttgtgttgggggtggggttgggacactatggcaaatactgcagtgttctgaggagggaagactttatcaaagggatggtttgagctgcattttgaaggatgggagtgatttggatatgtggacaggttggggaatcaacagtcctagttgactggatgactgctggatgatgtcctggttgacttcaggagtgtatttggttggactgtagaaatggtatgtgcaaggttttgggagttgaggcaggaaaggcattttgaaaatgtgagtagaatggtcaggttggaacactgggtttgaatgggagtggagtgaagcaatggcctttgcagtttacaaagcttgctgtcatgttcctgccccctcccttctccttcctcccacctcccttctctcttccctttcttcttcctctcccatttcttttctcccttcacctaaacataacatctcattccatccttacgtctgtttgtttgttttgagacagtctccctctgtagcccaggctggagtgcagtggcacaatctcggctcactgcaacctctgcctcccaggtcctggttcaagcaattctcctgcctcagcctcccatgtagctggaattacaggcacgtgccaccatgcccagctaatttttgtatttttagttgagacggggtttcaccatgttggccaggttgatcttgaactcctgacctcgtgatccacctgcctcagcctcccaaagtactgggattacaggcatgagctgttgcgcccggcaaatttatttatttatttatttatttatttatttatttatttattttttattttatttttttttgagatggagtcttgctcttttgcccaggcttgagtgcagtggcacgatcttggctcactgcaacctcagcctcccgggttcaggcagttctccctgcctcagcctcccgagtagctgggattacaggtgcccaccacaacgcccagctaattttttttttttgagasagagtttcactgttgttgcccgtgctggagtgcaatggcacgatcttggctcaccgcaacctccacctttcaggttcaaatgattctgcctcagcctccagagtagccgggattacaggcacgtaccaccatgcctgactaatttgtatttttagtagaggtgggagtttctccattttggtcaggctggtctcgaactcccgacctcaggtgatctgcccacctcagcctcctaaagtgctgggattacaggcttgagccaccacgcccagcatgcccagctaatttttgtaatttttagtagagacggggtttcgccatgttggccaggccagttttgaacgcctgacctaaggtgattcagccgccttggcctcccaaagtgctgggattacaggcatgagccaccatgcctggccttccttatgtcaacattattaagtggatattattattctttgtatttgaaggtggaaacctgaggctctggccatggttgtgtagctcgtaagattctatgaggagtctgtaatcatcctactcggtattcctgagtgtgggaaagaagctaggctggggttagggggttgtagaattagcagggtggctgatcaaaccayctaaggcaagatggcgtgggtggttaaagcatagccttgagccagagagattgggctcaaccaaatccagctttattacttactaactgtaagaccttgggcaagttgcttaatcttgctaagcctcagtgtcctcacttataacaggggagcagtaatacccacctcatgggattgttgtgaggatcaatgaggtgtacctggtgcagagcagtcgctcaccacctggaagctattgtaattagccttcccaggtctctgggctgtggctgtgcacttgcatttcattcttcagcgccgtgctttccagaacagtccattctggctgggcttttcttttttaggatgaccttaaaggtgctgaaaggatgccaccagtaaatgtttattgaaaacctactatgtgctcggcatagcccaggaactagtgacctatgcctgatggaaaggagatttggagtgggagatgtttggtggctatggcttatcctcaccaggtgccatgtgaagaggacagataatggaagtggggagggaaagggcccttcattaccaagaactgagatgagttcagtcctacttggtggttggtagatgactgacatggtctcttagggtcccttctgagcccaggaaatggtagtgggggccctggcaagcatggatccctcctactctgtggctgagggttgatggggcttctgtccatctcttttcccaggtgacagcggcatggacatatgcccyaggctttcctgctggggtccatccatgagcctgcagktgccctcatggagccccagcccwgccctggaagcttggctgagagcttcctggaggaggagcttcggctcaatgctgagctgagccagctgcagttttcggagcctgtgggcatcatctacaatcccgtggagtatgcatgggagccacatcgcaactacgtgactcgctactgccagggccccaaggaagtactcttcctgggcatgaaccctggaccttttggcatggcccagactggggtaaagggtttggcttccccagtgggtggagtggggggttctaggtggatgcttggctgggtgtgctgtggagaaggagcatgtgcatggctgtagacatgtgtaggtcctcccgccccattctgtctcaacacatatactggctcctgtggtccgaggccctctcccagcgtctctgcccgtaattaaccaagcacattaatggtagtttcgttttccctgtgagctggccagtaattgcctctgagagcccttccttccgccagccccatccttactttactggatctcccctgtccctgaagtgtggttggggtcagaagagggactaggactgctgggtcctcagaagagactggttgacaggggtgggtatgtaagagatgcagggcgttctgggaacctgggttctgtttcctagctaaggcgaggttcaaaacagagcctggctccagtgcctgcccgcttttctttcagggctcaggatgagtgactgcccccagtgggggtgcttggcaggtgggggaggggaagaggcttcagggcagaaggctcaatcgcttttattgaccccaactgggtgatgaaaggtgatcaatgatgatcgatggaaatgacagcctgaggcttggggctgagagggcatccagacagcagtggtcagcccatccttgtgcctcctttaaccctggctgcctttctgtctcagaccatctgtctgtccccagtactaaccatcaaaccctgtgtagggctagatatctcaatgtagtccctgtacttagtcccaaaggctagttgggctagagggaaacaaattcttctggaccacggttcacaatgaagaactggaaaaagacagacaggctcaaaccatagggccaagaatccttgtctcaggcctttgggtgaaggtaggggtagggggtgcaggctggatcctcatgtaaggtataaagaagtcagttggtccagagcccgggcctcaggtctccagtttgaagcctttcatgtctctctccttcctcacaggtgccctttggggaagtaagcatggtccgggactggttgggcattgtggggcctgtgctgacccctccccaagagcatcctaaacgaccagtgctgggactggagtgcccacagtcagaagtgagtggtgcccgattctggggctttttccggaacctctgtggacagcctgaggtcttcttccatcactgtttygtccacaatctatgccctctgcttttcctggctcccagcgggcgcaaccttactcctgctgagctgcctgccaagcagcgagaacagcttcttgggatctgtgatgcagccctctgccggcaggtgcagctgctgggggtgcggctggtggtgggagttgggcgactggcagagcagcgggcacgacgggctctggcaggcctgatgccagaggtccaggtggaagggctcctgcatccctctccccgtawcccacaggccaacaagggctgggaggcagtggccaaggaaagattgaatgagctggggctgctgccactgctgttgaaatgagtgcccttggggccttgcatgggacacattcaagacctcgaagtcattcttggccaagcagatgacaacacatctcctgkactggagcaaaaggtccttctgtgcaccctggtcgctgggaaacgtattctttgatctgttgaactgtcttccaacctgccatggcagttttgacactactcctgtttgccctcctgattcctgctttctttaccttttaacattgcccctttcaggggaccccactttgtagggaatcygcagaaggtgtgcttttgcacttgcagactgctctacctcagtgtttccttgggagactttattcagctgagartgccctagacagtaacttctaaggtcacgtttactatttcagaggaaatatcttgccaggatacctacccatccttatagaacagttrcctttagctgacccctttcctcacagggaccaagacaaagcatgggacatgaaattaagagtgaacttcttatgggaggctgcagctggatcagaggaaaaatccagtgtgacagagtgcaagtcagaagacctggcttttcatcccagctttgaaacttggaactttttgattgacaaattaataaacctctctatgcctcaggctcctcatctgtaaaacagggatgcctaccttatggggttggtgtgaggattaactgagatcacacttgaaagtgccttgcatgggcttggcatgtgggtgctcattacatagtcttcttgttttcttgcctctgggttgaggattcacagcactgcactacaagggtagcccctctccattctggataccttgctaggagagagtctgggcttccacctgcggccagggtgaagggaaaattcttgccatgtcagagatggatcaatgactatgaaaaaactagcctgtgattttttttcactctaagcattaagagctcctaaagccttttgtcttgttacttttttccccctcttgcatgctagaggtggaaggtagtcatttagatttcccccctcttccctcttcattgttggccaggggttctcttgggcagctgggggaaggatgtagtagatctctcttttttttttttttttgagatggagtctcatgctgttgcccaggctggagtgcagtggcatggtctcagttcactgcaacatctgctttcccggttcaagtgattctcctgcctcagcctcctgtatagctggaattacaggcatgtgccaccacgcctggctaatttttgtatttttattaaagacagtgtttcaccatgttggccaggctggtctcaaactcctgacttcaagtaatccacctgtcttggcctcccaaagtgctgctgcctggctggatgtagcagatctccaattgccttaccaaacctgcagggtctctgttaagtgtctgttaggggtcttatatgatactctggacaccgtgagaaacaggtgatggggcagatgggaacctggtatccaactcattttttatgtctgctgaatggttgactgggtgcccctttggtaagggctgggaaagtgaaccaagttgggagcagagcaggtcttgagaccaccttaatgaggaacacatggtctacttcctatctcctgggacacaggtcatttccagcttccagaattagtaagatttttcatataaatcctcccctacttcattgtataataaagaatttggcctttgtcttcagttcctgagaaggagactctaaatccttggaatttcccaagtaataggagtatctttgtttttcgtggcaggtccctgaaactacacctgaatttatgttgagatttgaccttaggctgcacctaattttatattgaatttgatctcagaccacacctgagtttgctgtaagatttgactgaggatggaggctgaccatgccagaatgaccaaccatatagttacagggctgggactttgagctggatgataccagcttgatccccagggaggggagaggggctagagattgagttcagccacatgccgatgattttaaccaattatatctatggtaaaactctagatataaaaacttctgacacaggttttggtcagcttcctggctggtgaacacatggatgtgctgagggatgtgcattggtatcctgtttctatgagcagagggcacacatctgtgcctgggacactcctggaccctaccatatatttgtcttcatttggctggttctgatttgtatcttttgtaatagaaccataatcataagtatagagttttcctgagttccgtgagtcattctaggaaattctccaacctcagggtgggtggcggggggttgtggagactcctgaatttatagccagttggtcagaagtgcaggtggtctggggatcctcaagctcgcaactgacatctgaagtgagagcagtcttggtggggagtatgcccttaaaccccgagggtatgcactaactccctgtagttagcatcagaattgcattacagtattgaacttccacatgccatagactcctttccttctctttttgctgtcagtgctacgtagtgagtgcgccatgttgcagagcactggattaggtacagtggaataactgcacagagatagaagccatcatttcattatatatttagctgaggaaatatataatggaaagctctctggaggaggtggcatttcaggtggccttaagactgggaaagttttggataacttagagaacagcactgttatgttcaaggggtggcaagttgtattagggtctagagagacagaactaatgatacatgtatatatgaaaaggagtttattcaggataattgactcacacgatcacagggcgaagtcccacaataggctgtctgcaagttgagcaaggaagccagtagtggctcagtccgagtcccaaatcctcaaaagtagggaagccgacagggcagccttctgtctgtggcctaagtcccaagagcccctggcaaactactggtgtaagtccaagagtccaaaagctgaagaacttaagagtctaatgtgtgagggcaggaagcatccagcatgggagaaagatgaggactggaagactcagcaagtcagcttctttcacctttttctgcccgctttttctagccgccctagcagccagttggatggtgcccacccacattctgggtgggttttcctgtgggtgggtcttcctctcccagtctactaactcaaatgttaatctcttctgctaatacccagaaacagtactttgcatccattaatcaagttgacagttaatatttaccaacacacaagtagattcctattggcttggcccagtttggagaaaaagatgaagaggtagattgaagctagcctgtgaagggtcttgaatgctagaataatctttgagaatttaaagtgtagtgggggaagtgagatgcacagaacacacacactgaaaatacccaacaataggtggaaacccatagaaggagatgaaggggcaaaccatgtaggaggcagtgtgggtgcagtggggaaagggatgggaagagaggggatgagtctatagggaggacatctaggggcatagcaggtctggttgaaagcctagagttggggtctctaggtgatgagatagtgggataggattgggtaatacacagaggcacttgaacagtagtgaccagaatgacttgaaggcctgggtatggcagagtcgctgctgggtctgggtcctagtggggctgttgctttcaattcctggggtgcatcttgtcggagaggttgattaaggtcctgggcctgcctttccctaaggacactgtattacactgctagggctgccatgacaaaactaccacagactgggtggattaaaacaacagaaatttctgacacttctggagcccgttaagtccaggatcaagatggtttgatctttcctgaggcctctccttagcttgcagatagctgccttcttgctgtgtcctcccatagccttttctgagcatgtacctccctggtgtttctcttcttggaaggataccagttgtactggattaggtccccccttattacccaatttaaccttaggtgcctctttaaatgccctatatccaatatagtcatattggggcttcaacatacaaatcggcaggggggcataattcagtctataacaggcacacaaagtcatgtcactgctttttttgtccccaaccaatgtcaaccataaacaaactagggtacttaggagtgccttttttccagtctggaggattggaagctggtctaggggcttaggtagctgatcagacttagtctcatcagactggcttttacccttcattctagagcagtttcttcagtgcaaatgagagtgtccttagggaaaggaaagtcattgttttttttttttctctgagtggtagagaatggagcctttagttgctataaaacagcattgtgagaattattctaaagccaaactgaaataatttggtgtcatctagacttttgtagaccaatacagtagccactagccatgtgtggctgttttagttcaaagtgattaaggaaaaaaattcaattcttcagttcatatttcaagtgctcaatagccacacatggctagtgactactgattggatgacacagaaattgaacatttccattatcacagaaatttgtgttagacaacactgatctagagatcagtggcttacaaccctgccagtgaatccgaattaaccggtggaggtttaaaaaaacaagtgtctcagctccacttaagatattttgatttgtgaggtgcgaggggcatcctgctatccgtcttcaacagaatctctccatgctaccaatatgcagccaaggttcaggcaggagtgtcctgagtgtcttgaaggcaaaggccagggtctcctttttcttttcccagtatgtaatcccacacctggcacaaagtaggtattcagagcagacatggaagtaatgcatgaatctggtctgggaaagctacccgtgtgccatccagaaacactagtttctctagagtttgttctttttgcctagtgatggtatttcaagttctgattcagaggaatgatggaggtcccaccccaaaacacacaaactcaacttggtggagaccaagggtgtgcttggggtggggatgcttctgagcttctgagggatagattgtgttggtgaagaaagagaattttcttacctctttttttttttttttttttagtttttatttttttgacacggagtcttgctctgtcgcccaggctggagtgcagtggcgcgatctcggctcactgcaagctccgcttcccgggttcacgccattctcctgcctcagcctcctgagtagctgggactacaggcgcccgctaccacgcccggctaatttttttgtatttttagtagagacggggtttcaccgtgttagccaggatggtcttaatctcctgaccttgtgatccgcccgtctcggcctcccaaagtgctgggatcacaggcatgagccaccgtgcccggcctttttttttggggggggacaggatcttcttctctttcccaggctggagtgcagtggcatgatcatggctcactgcagccttgacttcctgggctcaggtgtcctcccacctcagcctcccgagtagctgggactataggcatgcaccaccacacctggctaattttttgtagagacggggtttcactatgttgcccaggctggtctctatctcctgaactcaagcaatcctcccaccttagcctcctaaagtgctgggattacaggcatgaggcaccatgcccagccttttttttttttagatggagttttgctcttgtttcccaggttggagtgcaatggtgtgatcttggctcaccacaacttctgcctcccgggttcaagcgattctcctgcctcagcctcctgagtagctgggattacaggcatgtgccaacatgcctggctaattttgtatttttagtagagatggggtttttccatgttggtcaggccggtcttgaactcctgacctcaggtgatgtgcctgccttggcctcccaaagtgctgggattacaggcgtgagccactgtgcctggccccggccttttatctctgtctttttttttctcccttactgatacaggatagcttaaagaaaattgggtcttgaatttggccactgtgtggtctcactttcctttttcaattcaataaacatttattgatgtctgctgtgtgtgtgtcattccttgtgctaggcactgtagggagtgacggaggtgaattagatgattctttaccctcacgttgttcactgtctagtgctgggagatacaggcatataattatatataaatcaagctgaaagcatgttgtgaacaagttataaacacagcgctctgggcacactgaatgaggaagtgattagccctcagagtctggggaggaggtgtgtgtgcctgtgagagagggcggagactgggagatttcttatctcataacttgctaaatcttaccacctccatggagtggatatttgcaaaacgggaccattgtgtcagatatgtccaggaatttctcagccccaactgcaaggggctaggaaacaggatgaggggaggggctcagaggccaggaattaggcaagagccaagggttgggtgtggccctatggaagatgagaagtggagcttcctttcagaacacatctgttaactttggggatggaaaactgcagcagatggtggcaggcaatgtccaggtagcagatcaaaaaagactggaaatgcagcctggccacagctggggtagagaagctagtgatggaatggaagaagggaatagagattgcagcctatcccagactaagtgttgactctgaatattcttgtttaggaggata

SEQ ID NO: 95133 - DNA, 19469 bp, Homo sapiens
atgtggtactgtaagctgacaggaacaggttacagcagatcaagtttgagtgcttggggaagaaaggcaaagacacaggacaaagcctgctgggcctggctgggcctcagcagacaaatctggaggagaaaggggcatcaaaatgctaagtagagacaggcccaaggaagggtagtgatagaccctttgagagtgttttggccaggtaccatccgtccgtcctgtcttcctgccgcaggtatctttggagtggcactagtgttttgttttttgtttttgtttttttttgagacagagtcttgctctgttgcccatgctggagtgcagtggcgcaatctcggctcactgcaacctctgcctgctgggttcaagcgattctcctgcctcagcctcctgagtagctggaactacaggcacatgccgccacgtcccactaatttttgcatttttagtagagacagggtttcaccatattggccaggctggtctcgaactcctgaccttgtgatccaccctcctcagcctcccaaagtgctgggattacaggcgtgagccaccgcgcccagccatggcactagttttaatgcctcagttgccctgcctgcctcctaagtagatgttaaaggctactgctgtctgcccatgtacacctgttacacttaccaatgtgtaactttagcagtagagtctgtggatctgtggagttctagtgtggtttttctctccaattgttaagctcaagggaagcaagtatcttacactctcacgtatccctcacatacagcacatggtaaaaccttttttttttgagacagagtctagctctgttgctagtgtgcacaatcacagcctactgcagcctcaactctccagctcaagcgatcctcccacctcagcctcccatgtagctgggactacaggcgtgtgccaccagcccggctaatttttgtattttttgtggagacggggtgtcgccgtgttgcccaagctggtctcaaactcctgggctcaagcaatctgtccttctcggcctcccaaagtgctgggattgcaggcgtgagccaccatgcccggccaaaatattttattgattaatttgtgctgtacttggttgacaatggcgcttccttgctgttctcccaccacctcactggcaacgggtgataaaccctttttcagatcctactacgtgtcagcctacttccggctgggggaagatggttatagcgagaggggaagaattggttcagtgatgagaacatggttggttcctgccttcgacaagctttcaatctaatgcctgtttttttccaaggacaattcagaacggtctgacaagggattttttttttttcctgcctttcggcctcagaggccatctgggaaaaagagtttagaatttccctgccatttccatgccgtgctgggaggaacatttgaaatcgggcctggcggggtaccagcaggcagcaatagcaagcggggtggagaggagcagggccaggcccccgagccgtcgccatggcaatccagcctgctttccagtagcttataccacccacgtggagtagcatacactactttgtaatatcgtggttgtgtcgtgagaactttaagattttgcagttccttgtaggcaggagtcctgtttgctgctactttacaatactaggcttaagacattttatgaaatgaactcacagaacagtctctgagaggctcaagcccctccttcccttccgggacggaggatcatagagctgtctggcgcagcgaggcctcccggcgccaccgagacgcgcagaggacggctagagcgttgctcgccgagagacttcctcttygtyaagtcggccttcccaacatggcgcagtctattaacatcacggagctgaatctgccgcagctagaaatgctcaagaaccagctggaccaggtggggacgggccccagaggcacctctttcctgctctacatcccccttgcccacgcgtacttctcgcgcccggttccaagttggcagcctacctttcccaggcgaaacctctatccgatcccaggacctgccccctccccggccgcgctcctttctccccttagtcctctcattgacccgctatcccggtcctctgtaggaagtggagttcttgtccacgtccattgctcagctcaaagtggtacagaccaagtatgtggaagccaaggacwgtctgaacgtgctgaacaagagcaacgagggtatggggtaggcgggtgagggtaacctaaagtggcgaacctgcttctctcgtcccacctcctaacccagtttttcttacctgaaacgagaaaatccattacatatcgtataccgcttcatgaaccctttgcatgttgcctgcctagaattgaaaagtacaggacattcctctgctcctattgcccctgtttccgttcttttcacactgtctgtgggtgctgtgccctgttggaactctctttaacgtcttacgttggagccgctaaccttccccaggtgtttgtcttcattgctttcacagggaaagaattactcgtcccactgacgagttctgtatcctttccacargaacggctacctgctgccttctccctttctccttcactcccccaaaaagcggggagggggattgttttgattacttcagattaccctctcctcacaatgattttgaggatacccttttttttttctttcttttttgagacggaatttcgctctgtcgcccaggctggagcgcaatggtgagatcttggcttactgcaacctccgcctcccgagttcaagagattcttctgcctcagtctcccgagtagctgggactttaggtacgcgccaccacgaccggctaatttttgtattaatagtagagttgggggtttcaccatattggccaggctagtctcgaactcctgacctcgtgatccgcctgcctcggcctcccaaagtgctaggattacattacaggcgtgagccactgcccccggccaagaatactcttattacacactttgtagctcttttatctgacttcacaccaacatccagctaatgtcttgtgaacaccaaggagtatgtatagttgagatgtaatatttccctttgctgtttgagaacattaatatggagataaagctggtggtttacactttgctaatatcttagaagatacaggcaatagacaaaaataggaggatatagaaacagggagcttggctctgttaatcttcaacttcagcttaattgtggctcatttctaaactgtcactaagaaacctggattgtgttcacttgttcagtgttttatttgaatgagcaagttatggcagtagggcatctttaatctgtagtctcagaactgacaggctaaaaggaacacaggaatagtagtgtgtagtagggaatggtttaaaaaaaaaaattagccaggcacagtggttcacgcctgtaatcccagcactttgggaggccaaggctggcagatcacctgaggtcaggagttagagatcggtctggccaacatggtgaaaccctgtctttactaaatatacaaaaattagccaggcgtggtggcacatgcttgtaatcccagctactccggcgactgagacaggagaattgctttaacccgagaggcagaggttgcagtgagccgatagcgggcaattgcactccaacctgggcgatagagcgagactctgtctcagaaagcaaaaaacaaacaaaacattgactttgtcaggaattagctacttcatgattgagggcattaagggaaatgaggctggctttttacttgtagtactctacaacagtaggaaaacattatgtctagtctttctggaggggctaatgggaagaattgcaagaactgcttagagagtgagagatgggatgaggcaggacaagagggtgttccagcatacatcattttctccttaaagaaccaacttctctgtcttctttccatttggagttataggtattgttctaaggcctccagattattcagtccttatgccttgtagctttttggaaaaagagggtctttggaggccaagcaggctggctggcggaatcatggctcatgctgggctggctagtttttcccttaattcttgcttctcagatgtatgtccctgggaagctgcatgatgtggaacacgtgctcatcgatgtgggaactgggtactatgtagagaaggtgagtgagagcatgtggatgcccctctaaacagggaagggaaattcaggggaagctctagagcgcagcatggccagagggagtctccttttagccccttattcacctctgatcttgtagacagctgaggatgccaaggacttcttcaagaggaagatagattttctaaccaagcagatggagaaaatccaaccagctcttcaggagaagcacgccatgaaacagggtaagttttycctggggcacctcttgaacctatctccataataaggaacatggattgcagtgtgaaccacgggggtgtcccctttgctggagtaaaactatgtcttagtttctctttggcatctttagaatctgtgtattgcataatcactatctgtagattcctgggttgagcgtttgagaaatttagaggaaggaaatcatgtttgtgctttggtggagctcctatttaatgacgatggaatgggggaatgagatgaacacacaggaaggaatcatgatccaaacgaactaaataccagcaattataaccccgactgcacatgagaatcactcaggaagtttaaaaagaaagcttgggcccattccagattgactaaatcaacttggaagtcaaaggaggggaagttgtaccaaggtctgtttttttttaaaaaagctccccctgttataatcaggattcagaaccagtgttccaaaggtaaaaatctttccccatcatagttttctgattatgtcagactcatttaataccatattgtgttcgtttttatatctttggttagcaggttttttttttttccgagaagagtctcattctcaccacacccagctgtgttagcatattgaccgatgcattgtagaccctaaatttgtgttagtgaccccacagtggatcactgagttaaagttttattaacaatgccaggcgcagtggctgacgcctgtaatcccagcactttgggaggccaaggcaggtggatcacctgaggttaggagttcaagaccagcctggccaccatggtgaaaccccatctctactaaaaatacaaagttagcccgggcatggtggtgcatgcctgtaatcccagctgttcgggaggatgaggcaggagaatcgcttgaacccgggagacggaggttgctgtgagccaagatcgtgccactgcactccagcctcggtgacaagagcaggattctgtctcaaaaaaaaaaaaaaaaaggttattaacaaactgtaattagtcggtcgcctgtccttaaacttgcctgtcacttctccttaactctaggttctcctttttgcttctaacctttgactcttatttttttccacagccgtcatggaaatgatgagtcagaagattcagcagctcacagccctgggggcagctcaggctactgctaaggcctgagagtttttgcagaaatggggcagagggacaccctttgggcgtggcttcctggtgatgggaagggtcttgtgttttaatgccaataaatgtgccagctgggcagaatgttggtcttttcttggattaagcaagggactggtgatgagatgggggtgtggtcgagagtgtgggccccgtctcagagcctgatgcgcaggggtgatgcgatgcgcctcttggaggctccatcgcagggccctttgaccagctggaagaaatcctaggctgggagtgtgctgctgctcactctgcagagctggttgccaagggaacggttggcaagcggaagtggggctgcgctggcgcttcctcttccgggtcggcgctcctgcctccctgcagggagctgcttatgggacaccrmttcctgcgcggcctcttaacgctgctgctgccgccgccacccctgtatacccggcaccgcatgctcggtccagagtccgtcccgcccccaaaacgatcccgcagcaaactcatggcaccgccccgaatcgggacgcacaatggcaccttccactgcgacgaggcactggcatgcgcactgcttcgcctcctgccggagtaccgggtacggtccgcgaaaagtgaccctgggactgcgtgcatgcatgcctccggggtggatggcattccgccaacagggtcactccgatagcgcccggcagcccaagcacccttcctacccttcctgcctccctgaagtccagcattaatcccctacccggcgacacccggcagccccttcacccctgtgtacctcgcaggatgcagagattgtgcggacccgggatcccgaaaaactcgcttcctgtgacatcgtggtggacgtggggggcgagtacgaccctcggagacaccgatatgaccatcaccagaggtaggttctcagataccatttatttaacttccttgacctcagctttcctctgtgctccaattcagccatccactgccgtagtccgcgtcagcgaaaagaactgcttcatcactgaaatcaaactcccactaggactacatcatccttccggccctgcctgttcttcacccatctccctggcctgggacctcctttggttcccagggagtccctcaggccccttatctcatctccttccttagccaaggctttttttccatcagcaacttcatcaccccaactaaataaacccatctgtgattaatccattctggtgcccttgctgctgcacctaactgctgggcccacatgattgtggcagttggtgacagttcagatgtgtgaagttttctacttcatttacacccttccaaagggaaatccttcttgctcaagggtagcctattccaatccttttcttctccctcaagcctctaccgcatcaaactgagtgtccctgcctctcttcaaaagaagttgagcatttcctcagtctcccacctcaaacatcctcagctccctcctaccaactaagggaaatttcttcccttctattggaggttaatcctctgtcctgtttccagtctattactttcttctctgggattcttttttcttttctttttttttttttttgagacggagtctcccactgtcgcccaagctggagtgtagtggcacgatctcggctcactgcaacctctgtctcccaggttcaagcgattctcctgtctcagcctcccgagtagctgggactacaggcacccaccaccacacccggctaatttttgtatttttagtagagacgggtttcaccatattggccagagtggtctcgaactcctggccttgtgatctgccccgccttggcctcccaaagtgctgggattacaggtgtgagccactgtcggcctatcctctgggatttcatgtcacagttccactagtgtctctgcctctccttccctacagcctaaaacccttctcaagtatcttccatcttgaaaagaaacacaggtgtaaaaacaaaaccctccctcaattataccacaccacgagaagtaattatcttggagagagggattatgatgttttaagtctctctccttttttctttttttagcatacatattataaatgatgtcaggaagaaaccctcccaatatttacagcctaagctctcacccttgcttctcagccacccttcaaaaaacagctgaccgtggcttcacctgttcctttccagttcattcccctcaagcccactctcccagtgtcttctctggaactgctcggcagaagggcaccagttacctcagcaccaaaccagggagctggtaaagggtctcaactgatctctttagcacttggcattattgaccacttccttttatcaaattgtttttaagatggagtctcgtctgtcacccaggctggagtgcagtgatgtgatctcgactcactgcaacctccgtctgctgggttcaagtgattctcctgcctcagcctcccaagtagctgagactacaggcgcccagctaatttttgtatttttaggagagacagtgtttcactatgttggccagtctggtcttgaactcctaacctcaggtgatccacccgcctcagtctcccaaagtgctaggattgcaggtgtgagccaccatgcccagcctcattttttttatttttactttttttgagatggagtttcgctattgttgcccaggctggagtgcagtggcactcagctcacttcaacctccacctcccagattcaagtaattctcctgcctcagcttcccaagaagctgggactacaggcgtgtgccaccatgtccggctaatttttccattcttagtagaaacagagtttcagcatgttggccaggctggtctcaaactactgacctcaagtgatcacgccttggcctcccaaagtgttgggattagaggtgtgagccactgagcccagcctgtatttactcaatatttaataataaaagtcagttaacaaatggagctccctaggtaattctgagatggactggtatttagaaatcatggctgtagtttctgcttccctaacatctgttatatcttttctctattttctgccccactgctgttcaaattcttgccttctttattcacctgaaccattgcaggtaatctccttgcatctgttctccatgctggctggtgcaatgctgtaacatgcacctgcctgcttaaaatcccccaatgacttcgattacccacagataaagtccgatggtctggccctgcctgcccttccagctttttcttttgccattcacttctcacacctgagctgcctttgctgaagttccatcaagacacttgtctctcagccatcattcatgttgttctctctgcttggaatgctttttctctttcaccccttgtctatctggtggacacccactaattcatctttcagaactgacctgaaggctctcctctgaaccctttcctcatcccttccttcctttcccttgtctcgtctagtgagagtactcagggggttgtgtttgtcggcctccggcagatgaatctgaaagcaaggacagtgtcttggttttttatccttaatgtctaataaaacataaaatgtggcagataggaagcattgagttaaccattgaatgaatgcatggagactctagccaaggtccctcacctcagccccacctccctatgctcctcaggtctttcacagagaccatgagctccctgtcccctgggaagccgtggcagaccaagctgagcagtgcgggactcatctatctgcacttcgggcacaagctgctggcccagttgctgggcactagtgaagaggacagcatggtgggcaccctctatgacaaggtggggacctgaggacagagatgccccccacatgcatttccagcaggccgcctgggagcagtgctcacacagcactcagcactgggcctcgggtcagggttcctggcctatagcaggcccaacactcatcctctccctcagtcaggctcatctcacaagggaatggtgatacctcccctgtctacatcctggggtggttgtgagaagtggatgctgtaatatatggggaagggctttgaaaaccataaagcagcatggccccgtctttttattgacacacacaaacagcaattgctcagcacctttgggtaaacagaggggaggctgcttatgtgtggaagcagatggctcagaggttctggctgccctgaaggttgaggggagtgtatgttaggcaccactgtagttcactagtggcacataaattgggaagctcagctgagaagagttttattatgaaactgtctttggattccaccagtgtcccctgcaagcagcttcctgctcttagggaaagaatatggctagtggccctggcatgcaagtcaggtcgcacagtactgaggacacttacttgtttacaagtcaaagcccaggttcagtcagctgtatttcttgcaggtaggctgttgaattcagttctcagtttttttgttgttttttgttttgagacggagtcttgctctgtcgcccaggctggagtgcagtggcgcaatcttggctcactgcaagctccgcctcccgggttcacgccattctcctgcctcagcctcccgagtagctgggactacaggcgcccatcaccatgcccggctaattttttgtatttttagtagaggtggggtttcaccgtgttagccaggatggtcttgatctcctgacctcgtgatctgcccacctcagcctcccaaagtgctgggattacaggtctgagccactgcacccggcccatcagttctcagttttagcttgcccattttctgccctctgtaactatagagtttttggaatatcaagattttagactgcctgggtcagttttcccttccactgctgaagggtttctaaacaactgactaaatttttgttgttgtttttttttgtttttttgagacggggtcttgctctgtcatccaggctggagtgcagtggcacgatctcagctcactgctacctccgcctcctgggttcaagcgattctcctgcctcagcctcccaagtaggtgagattacaggcgcctgccaccacgcctggctaattttttatttttagtagaaacggggtttcaccgtgttagccaggctggtctcaaactcctgacctcaagtaacgcacccaccttggcctcccaaagtgctgggattacaggcgtgagccactaatcccagcaacaattgactaaatttaacccgtatttttttttgagagactgttgcccaggttggagtccagtggtgccatcatggcttgctgctgctttgaactcctgggctcaagcagtcttcccacctcagccccccaagtagctgagactacaggtgcatgccaccatgcctggctaattatatatcttaatttttttgtagagagggtcttgctatgctgcccaggctggactcaaactcctgggctcaagtgatcctcccacctcagcctaaacccatgtttttttttttttttttttgagacggagtctcgctctgtcgcccaggctggagtgcagtggcgggatctcggctcactgcaagctgcgcctcccgggttcacgccattgtcctgcctcagcctcccaagtagctgggactacaggcgcccgccactacgcccggctaattttttgtatttttagtagagacggggtttcaccgttttagccgggatggtctctatctcctgacctcgtgatccgcccgcctcggcctcccaaagtgctgggattacaggcgtgagccaccgcgcccggcctaaacccatgttttaactgagcatcaggttgggrtccaaaccaagaagagctgggyataggagttactttctcagtgctctgagagtagcacttttctacataccacaggtgtactgttatggaggcctattttgtagggtaattttgcataaagtttctgccccgagactcttgaggcattatcctaccatttattcagacccaggagacaactgctgatgtcatgaggcacattatgggcttccctggaaccctaacccagcaaccagcttttggtgtctagtctcacactcattttctcccacttgacttgtgttctcaaccagagccgctcctgcacctcattaaccgtgtcactgaatacctactcaccccacctggagatttaccagccttcagccacagggacccactcccacagagagcctctagcacctagagaccttccttgttcaaaagttagcagtcccctccctacacgtgttggctttggtttgggctttgtgcagcagaatgagcatggattagaaatcaggtgatstgaattccagtcacagcacaacgagctgtctgagcttcagcgagctgctgaacttgccaattctcccttttctcatccagttaatgttgagagatcctcacagggctgaaagagtgtgtatgaacatactttgaatcatgtaagatttcacataagtagcaggtagcctcaagaaggtttcccctgctgctgccttagatgtatgagaactttgtggaggaggtggatgctgtggacaatgggatctcccagtgggcagagggggagcctcgatatgcactgaccactaccctgagtgcacgagttgctcgacttaatcctacctggaaccaccccgaccaagacactgaggtaaggtggcctgggaggagacccggagacctgtaagaaccttgggtggggggaaaatgggagcatttgctcctcctaagccctagcaaattccaagtttgggccagcatcatggttctaattctcatcattcccaggcagggttcaagcgtgcaatggatctggttcaagaggagtttctgcagagattagatttctaccaacacagctggctgccagcccgggccttggtggaagaggcccttgcccagcgattccaggtataggccttggaggaggcattatggcttgaggattactgactgccaatcaacaggaactcctgcttcttctrccctaaaccctggagtgcagtggcagacaacctcaacctcttaggctcaagcagtcctcccacctcagcctcctgagtagctgggactacaggcacacaccacctcacccagctaatttttgtattttttgtagagacagggtcttactttgttgcctaggctagtctcaaattcctgggctcaactgatcctcccacctcagcctcccaaaatgttgtgactacaaacatgatcaccatgcccagcctaccttaaaccttctagctatgctctccctctttcaggtggacccaagtggagagattgtggaactggcgaaaggtgcatgtccctggaaggagcatctctaccacctggaatctgggctgtcccctccagtggccatcttctttgttatctacactgaccaggctggamagtggcgaatacagtgtgtgcccaaggagccccactcattccaaagccggtgaggccctagggaaccactctgcagaccttcaggcttgtctcagccttgttaagagaargctgccaactctgacccctgctgtactccctctttctgcccaggctgcccctgccagagccatggcggggtcttcgggacgaggccctggaccaggtcagtgggatccctggctgcatcttcgtccatgcaagcggcttcaytggcggtcamcvcacccgagagggtgccttgagcatggcccgtgccaccttggcccagcgctcatacctcccacaaatctcctagtctaataaaaccttccatctcatactgacccagtccttgacttattcttgccctacaccattccagaaacttgtgaaaagtgaaacaactatttatgtgtaagaccctgtgctagatatattttcttcacagtaacttctcagccttgcttcccaaatcatttgaaaccacagtttctaggattaaataacgtgaccaaattcacaagtggctaaaaagtgacagaacagggccttaacccaaagtccatgcttttttcccctactgtaccccactgcaactccctggaaaagacagactggtaactgagtggaaaacaaaaggaaaacttatttattcttagaggtgggaatgtggggagtggggcagaacaggtggtggccytgggagagggtcccaaggggcagaggttggggatgtctcagtaaagaggggcaggtcatgaatagagcctccacccccagcrgggggttcctgggcccgcccaagcactgggctaaaacgtggaaactgggcattgacaaagtacagcgggatgtgggcaattcrgcctgtggaccagccctgcagagaagggaaagaaaaggatcagagtctgggcccaaagaagggccacctggcagagccatacagcagccaaggccctcagcttctccatccaactcctggaagccccagcagcctggcgcactcaccacactgagcagggcccctttgttgaaggaaggatggaaagtgatgagctggggctgggctcctggctccccctggataatgccactagaagaaaaggtgagcaggcaaccggaggcaagaagggagctgaatgtagtgggatgtgggtttgtttgtgcaggaaggctggtgagaagtccagacctaagggcccacatggcacttaccagggaaggagctcaaacacagggctgtttcgagtgygaaaaaggaggatgactggtttaccatcctgtacccttggctttcctgtaagaaatggatccagggataggggaggaactctgaaggcagagtcccaggacatgggcagaggagaactccaggccagggcacggcctcattagattaactgggaagatggctgtgggctgagcccttcatccttgcctctcacctttcataagcacagccagacgttccccactggggtcccagaccatggagtgagcctctcccccaagcctgtgggtaaggacaggttaggagagtttcagtgtggtccctcccacctgcttttcactgccactccctcaaccactcagctcacctctcctcaccatctggtgtctgtattgttgtctcagacagatctgccacaatcgttgctgactttgcacctccaacgcacccctttccctcacctgtggacaaataagagcagagaggttcttgcaagaaacaggcctctcactggtcccccgccagctcaccaaaggcatcaacacctcgaaatctcctaagcttctatatttccctttatccctcagagctgcatcttaccaaaggttgctgcctccctctgaccaccccaaatactgaagtgttgccctaactcaccacaacgttctggaaaagacagggagtaaatcagtggctctcccaatacagtgaacagcagtcggctgccatctgggctccagcagccagtctggggtcagggagcaaaaggcaggagaaggtatgtctatagtagaatgcaggagggaaagtagaggtggccaggtttgggagcatcaggggcccattggaatcatctcctccccagtgtctgtgaatcagagtcccctcttacctgacagcgccctgatagagtaggccacctctcacaagtccacatctgggcctcccagactctgagccagagaaaagcaaattacagctcaggacctctaagttctaaaagttggacctacctcccttgacagagcttccaggagctaagtgcctttctctaggtccttgccctccctccatccttgtcccactcaccraaagacagctgaaggagtggtagccaggattttgctgccgtctggggacyagagcaggttggtcaccccacctcctcrraaccagggaagggggacacaggtctctgttgagacatcccatacctaggagagtggggcaggagataagggaaaactcaagcaccccatcatctcacagtgggctggcctctctaatgtacaaagagccagaaacgagaggaagcgggagagggactgtgaaacatgaggcacgggttcatgctgacaattacagacagcggaattttaaacctcacgagtctgatggcaaagctcctctctgggtaagtttaagactgaatggaccaaggtccctcctccttcccccaagatgtttccacaaccgagtgaggaacacttttgccaggactgaaatgtgcatgaggggcagggacccactcacccggatagcagcatccacgggtgaagctgagagcagccgccccccactgggggcccaggccaagctggtaacaggtgtatgcccagggtgagacagcacttrggcacagccagaagagggtctggaggggaacacagaggatgtggagtcagaagatgacaagaagccatccccaaaattctatttctttgcctcctgctaaaacctcctatcctgatggcccactctgggctcaaatccaggttgtgaaaaaggaataaggattgtgaaagttaaaagaaaaaaacagcgaaggggaaaaacgaccaagtcaccacgagcaggtcaacagagaagaggtaatctgcaaggtctcaggccagggtgaaagagtgctttcacgagataggccatgaggcaaaacctaaccagtaacctagaaggtactgcccctggggcgatatcaggccctaccccagaacacagctctccgcccacaggccatccagcctggccatccatctatccaggattaataatctatgacattacttcaaggttccaaccttttctctccagttatctaacactcctcagaacacatcctgtgctcccaaacagccctcctgccttgccttatcaaagtacctcccaactctgcagctcccgcgtttgctccttatcataaagatgctgcaggctgggcgcagtggctcacgcctgtaatcccagcactttgggaggccgaggtgggcggatcacgaggtcaagagatcgagaccattctggccaacatggtgaaaccccgtctctactaaaagtacaaaaaaattagctgggcgtggtggtgttcgcctgtagtcccagctacttgggaggctgaggcaggagaattgcttgaacccgggaggcggaggttgcagtgagccgagattgcaccactgcactccagcctggcgacagagcgagactccgtctcaaaaaaaaaaaaaaaaaagatgcagcatgtggctcggcctccatcaccagcagggaactacctgagggcacctgccatgtgtctgcagctgtgtatttccagagccatgtgcctggcctgacagacgaaggctactacctgaattaatgccacctctctttccacctaactataaccaccttcagctccagtgaagtcttagtcatggatgtacaatttaattctcttgaactttatgataaatcacagctgcctttgcaggtgggttcagattcatctcattcttttcagtggctccattgtataccactcaatagatgaactataatttattgagtcatgcctctacaaatggacatttgacttgtttgtaattttttattatacataatgctgtaaaaaatatttcctgggccaggcatggtggttcacactccaggatggagtgcagtgacacagtcatagcacactgcagcctcaaagtcctgaggctcctgcctcagcctctaaagtagctaggactacaggcgtacaccccacgcccagctagtttttttatttttattttttgtatagacagcatctatgttgaccaagctagtctcaaactcctaggctcaagcgatccatctgcctcagcctccgaaagtgctggaattacacgcatgagccatcacgcctggccttgttttttgttcatttatttaaaaaaatttttttaaatcgagttccgctcttgtcacccaggctagagtacaatggcattatctcagctcactgaaacgtccacctcctgggttcaagtgaattctcctgcctcagcctcctgagtagctgggattataggcgcacgccaccacacccagctaatttttgtatttttagtagaaacaaaaaaaaccaacaaccttccaggcgtggtgtacgcacctatagtcccagctacttggcaaggggctcacttgagcccaggtgttcaaggctgtagtgtgcaatgattgagtctgtgaatagccactgtattccagcctgggcaacataatgaaaccccatctctaaaaaaaccaaaaaacaggccagttgcagcggctcatgcctgtaatctcagcacttcgggaggccgaggcaggcgcatcacctgaggtcaagagtttgagaccagcctggccaatatggtgaaacccctgtctctactaaaaataaaaaattagccggtgtggtggcacgcacctgtagtcccagctacttgggaggctgaggcaggagaatcgcttgaacccaggaggcagaggttgttgcagtgagctgagatggcgccactgcactccagcctgggcgacagagtgagattccatccccccccaaaaaaaatctgtgatcacgtgtttttttcttatagtacctattgtcaaggtttaggtatcagggttacattagctttataaaaataaatcaggaagatcctgcaacaaaaaaaagggaggacaggccgggcatggtggctcacgcctgtaatcccagcactctgggatgctgaggcgggcggatcacgaagtcaagaggagaatcacttgaacccgggaggcagaggttgcagtgagccgagattgcaccactgcactccatccagcctgggcaacaaaagtggaactccatctcaaaaaaaaaaaatctcattattttcttctacaatccactttggtaacttatattttgctagaaaatcaaacatttccacagggcacggtggctcacttctataatcccagcactttgggaagccaaggcgggcggatcacaaggtcaggagttcaagaccagcctggccaatatggtgaaaccctatctctactaaaaatacaaaaattagctagtgcgtgcctgtagtcccagctacttgggaggctgaggcagaagaatcacttgaacccgggaggctgaggttgcagtgagtcgagatcgtgccactgcactccagcctgggcaacaagagtgaaactccttctcaaaaaaaaaaaaagaaatcaaacatttccttcagattttcaaatctgttggcctaaacaagtccacaatattcttttataattcttctattttctcccgtatctatatctttccacttctgaaaatagtatactttggttttctttttctccttaattaggctaaccaagaggttttcttctttattcatatatatacgtatatacacgtatacatacacgtatatatatatatacgtgtatatatatgtgtatatatataacatatatatgtgtgtgtgtgtgtatatatatatatattttttttttttgagacagagtcttgctttgttgcccaggctggagtacagtggcgtgatctcagttcactgcaacctccgcctcccaggttcaagtgactctcctgcctcagcctgccaagtagctgagactacaggcgagcaccaccacgcccagctgattttttgtatttttagtaaagatggggtttcaccgtgttagccaggatggtctctatctcctgacctcatgatccacccgcctcagcctcccaaagtgctgggattacaggcgtgagccaccgcgcctggccttttttttttttttttttttgag

SEQ ID NO: 95134 - DNA, 29172 bp, Homo sapiens
cctatggaagaggaagctgagtctcagagagttcaagtgcttgactaagatcaatgactgaaaaacctaggctctgtccactctatcaccagctcccaccttgtttggtccccagggaaccaagtcacagatggtagatatccaggcatcgctggggatttcctgtgtgcctctgacagcccacggcactaaggcctcttccagtccttcctgtccctggagtacccccagggtgctccaactcaccagctgggtgggcctgggcagagagccggcgggaggccatgtcgctgcrcacagaggaggccaggtctacatcggagagggagagctcagagagggctgaggccacactgcttgtgaggccagccatggagaagaagaggtctgtgggtgaagtgaggagtgtcagggacagccgaccccagcccctaggctgctgcacccacactagctgcccctccaaccacggtctgaccccacacccaccagtgttatccaggttgagaagggggttggtaagggggtctgggctgaggggctcagccactgcccctgcctgcagctgctggttcaggtcctgctcaatcagccacaggtcttcggcacctagcgggcggctcttgttcagcttgtcagccaggccctcgtggtctgcaggggaggagacttcagtctgggctggctggccctcccagccaccccacccccatgccacccaggggcctcacctgtaaggctcacggcgctgagcagttcctgaagttgctggagctgcctcggggtcaggagcaggtgcagggagcccagctgtcccgccacctccaactgggggccaaggaggyagccatggagcctaggcccaccacccagctcctctaagagctaccacccgcctgccctcgccctgggaaagcaggatgctggctaccaaactaaactctgttaccaactagctctatgaaccaggccacaacttgacctctcagcctcagtttctttttttcttctttttgagatggagtttcactcttgttgcccaggctgcagtgcagtggtgcaatcttggctcactgcaacctctgcctcctgggttcaagcgattctcccgcctcagcctcccaagaagctgggattacaggcatgtgccaccacgcctggctaattttgtatttttagtagagacggggtttcaccatgttggccaggctggtctcgaactcctgacctcagatgatccacccaccttggcctcccaaagtgctgggattacaggtgtgaaccctgtgcctggcctacagcctcagtttctttagctgccaagaaggaagtaaatcccccacttgacatccccactgtgggctgtagataatcagccttgctgaggaggaggagtcttgagatggggtactcaccccctccccaggggcctggggacccaccttggggccagggaaggcctcattttgcttcaacttcaccatcagctccatgtaccctgagcagctgccgatctgcaaggggggctctggaggctcttcctgggagacgggaggatacaagagggaaaggttgagaaaatggagtcagagatggtcagaaaggatgggaggggctcaatgggctcaagggagaggagacaggggctgtgggaatcagagcccgctcacctgtgccgggagctcctcgtagtgcaggcggacccctgccagctgcagcagcttgtgcaggaargcaggcggctgatgcacrtccaccggcggcgcctggcttgggtcccgcactgcctcatcacagtactccagtctggagagtgtagggtcagcccgtgccctggccaccccaggcctggagcccctctctccacacagtgctctgctctaggggcacggggtcagggagcctagcctgcagagctgccccatcacacctaggccgtcctgaaccaccatgtccagcccggaggctcaggccagcccttgctcctcagaccctcagcatctaacttggttcttggggcctcggccactctgggcctgtatcacctggcctctggacaccagtccgggctcacgatgcagcccacctccccaaccctaccaccaccgaggcccatccagatccaccctgcctcttcccaggaacctaggctgcgggtggggaccatccagcagcccccactccccatcttcacaccagtccaccccagatcggcctgcccttacctctgcacacggacctcgacggccacaccacgttccccatcacccggagagtgctccaccctcacgayagtgtccaggaaggtcactttgatcctccgaagcactgaggagttggggaggggtctcaggtcaggtagagcagcaaaggggaggcagaatttcccatctgggcaccagggtggccgtgccgttgtctggagcccctgttctgtgtgccactgaagggcaggagacagggcggccaggaggggcctgctcaccagtctcaatggtctgggcaaacatctccagcccctccaggggctgtggtggctcagagggctccggtagcccatcccgcagacactcctgggccagctgcaggcttgtggtcatgcatgaggcccagctctgtgagtcggcagcccctggcgctgtagggagaaacagggtctcaaggcaggcaggcccagtcaggtcctggacgccccagcccactctccccacttgcctgcccccagcctcgccctgccctcacctggaccccggcggggctgcaaggtgagctggaggccggacacgcgcactgtgcagtggtcggtgagcagagcagcccagggcacggccacctcgatggagcccacgaagccttccaccagctccagcggtgactccattgactccagcacctcgttcacagactgggagcaagcaagagacaaaaccagctcagggaaaccccaaatcccacaggctggcacagccttatctggccatagtgccttggagagcacccttggcttgccctgtccctccacgtgttatctacaaggtcccacctatgctcatgctgtcccctactacaggccagcccccctaccccgtcacccaaaggtgcctaatccttcaagccagagcagatgtttccctcaccacttaattcaagataatatttaccgagcactttctacatgctgacactgagactagatgggtaaataaaatgtcttcattccccagccaagctaggctccagccagggactcagagcaactaggatgaaactcaagaggtgagcaggtgcttgggggtggtgagggggctggtgggggggccgtggggaagacgcctaacccagcctgggccgtcagaggaggggcaagctgaagaataaagggaggggggataggcgctggtagaaggtggtgtgttgcaggcacaggacaacatgggcacatgtatggcagagtccagaatacccatgttcaccctggatgagcagagttcaaagggacagtgtccaagagaggggctgacctaatgccagatgggaccccccccccccaccaccaaccccaaacacctagtgtagctgtgcctctctgtgaggcacaaggctgagcccctggctaaaatgtccatgctggagttgtacccctgccaacctggaagctcctggagggctgtaccccacctgcctcccccgtcaccccaggtgccacccagaaagggcctcagtaaactggttggatccaagaataaaaaagcacatggcagagcagatgggagtccaaattcctcacccagagacccacagctcgggaaactgaggcctagagacaggactaatctagtcacccagtatacaacagggactgagactgggatgcgggcctctctcttttcatgccacttcagaggccccagatactcagtttctttgggggccttcaaggcggggcctgcaggctgagctgggagggaggaggggctggttatcaagaaagcgcctgcattccaccagggccctagagaagccaattcaatccccaacaagagggcagggaacaggagtaggggcgttttctggagctgaaagtaaaaaggggaagcctagggctgggtatggtggttcatgcctataatctcagcactttgggaggctgaggtgggaggatcccttcaggggttcaaggctagcctgggcaacatagcgaaatcctgtctctataaaaataaaaaaggggcagcctagagacggccttagaggctgaggctaaggttagaggtcagagagggcttcctacaccagaattcacagacagcaggccactggggggtgcccccagttcagggcccacgattatcctaccccacatttgctcaccagggcctggcctacccccaaagcctagctcttctgcccagattagcagccccctgagtccagccacaaaactgagaagtccctgcctccatgcccacccctgctgctctggacctggtggatcgaccaggacgcgcctctaattggtggctccttcaaagctccccaggtcagctgagctgtgagtcagggctcctcaccgttcccagcctcaagcctctgaccttacacctcttggcctccctagcatctcccttggcctcctcccggcttgaagccagatctccccacctttcctccagggcctccctccaggcagggacactgagccgggggggtcggtgggagatgtaggtgggggccatccagtccctccctagacacccacttggcccatcccactctcccaaaagcaggaagtaggcagcgacccaggcacacgaggtgttgatcaacactggtactgacgtactgacgcggttgttgacatacacatccggtggtttgttgatcccacctacgggctcaggaccgtggggtcaagaggtcagggcacatgatccacaggtgtcctcgccagggctccggacccctaccagcttcccccaccagctgcgcaggcccaagtctgtcactgccctggcccagctcagttcctacgctccctccccagcccctcctcagcccgagagccaacctccttaactcagcccccaaactcgacgagtttgtcttgcattctccagacaggtgatcttgccctctccagcctcagtttctcctcccgtggagacagaaaccccttcccgctcagtttctggctctggtaaggaactgaagaggctagccggggtgcctctgacgcctgggagagggcaagattcccctggcctctctacgcccggtgcctgatcccccagcccgatcctgccgcagggagcctcaggtcgctgcgctcccaccctccgcaccttcctggactcgggcctggctcctcacccagatttccaggtggatgtctcgcagggcaacgctgcccttgtacagatcgaggctgagctggtccaggctgaggtgctcttggaagaagtgacctaagtagtggtgcagcaagtagcggcagacccgctctttcacacagtttgaccatggccacagccatcgtgacatctcggagaccgccgggcctgggccgcctccgcttgccgcccgccggcgatccccgtccggctccgctgttcactagagcccccggctcgccccgccgcttctctaggcgccaggccgcgccyccggacgcccagccacgccccctacgctcactgtcattggctattgcaaagggcgaggcctactgattggctgcgcggggcggagccttcgggcgcgaaaaagggactgggctctctgcatgatatagggctctcaatcatgatttacgcytgcgtraagtactgtgtgggaggacctttaacctcccctctacaggctctgggaaggctgttgctccaggtgccggcccctcaaaggaatgcgcatgtgctgattcgtccaaccactttaagtggttggggaggatttaaagggacagtgtcccatcaaacttcgtagaagccttccccagaggagtaaactcagtgcgcgatcttaagcgcgcatctgtggaaacaattaagtgagtaaacattcgcattttgcaaaatcttttaccatcctttatctcattgagccytcttaataatcgctcaaggtagggattattgccaccgctttacaggtaagaaaacagattaagatacgagaaagaccctgcctcaaaaacaaacaaaaataaataagggctctgaatccatcaccaaggaaggtcttttttcccytcctcaccccggaatgctcagagggagattaactgaccctcccttctctctgccgtcggtcaggccttaggcacctctctgaaataataatagcttttcatatctctagtcctaaaatcaaagaatggattctgcctcctttaagcaggggggcattgtttttgtacrgcctttgagctaagtatggtttttatgtcttttaaatggttaggggaaaaatcaaaagaagaatgaacttttcatggcatgtgaaaaatcatatgaaattcacattccagtgtttatacataacgttttagtgtcacacagtcttgctcatttgcttaagttctgccccgggctgctttcttgctacaagagcagaattcagtacttgagacagaggcctgcaaagcctaaaatatttattttctggcccttcacagaaaaagtttgccaaccgctgctctgtagggggcagccacacaaaacctcttacatcatgggcgacttcaggaacagccataggtaattatgtttcttttcttttctttttgagacagactctctctgtcacctaggctggagtgcagtggcacaatcttggctcactgcaacctctgcctcctgggttcaaatgattctgctgccttggcctcccagagtagctgggattacaggcatgcaccaccgcacccagctaattaccgtgttgggcaggctggtctcgaactcctgaccttaggtgatcagcctgccttggcctcccaaagtgttgggattacaggcacgagccaccgtgcccggcctatgtttctattttatttattttttttgagacagagtcttgctctgttgcccaggctggagtgcagtggtgcagtctcctctcacgcaacctctggctcctgggttcaaggaattcctgagtagctgggattacaggtgtgagctaccccacctagcctgtgtttctattttaatcttacttgggagctggactcttacattctaatgccaaaactcagcctgaagcaagggcaaccgccctggcccaccgggcagggacctgtattccagtcccacccatgggtggtttcttctcctcttgtgaccctcagttttatcctatgtaactggggttgggttagtaagtggagatagttcattacctggaaggagcaggctccattcagggaggcaggctgataggacagccattcagaaagtgcttatgggccaggcacggtggctcaygcctgtaatcccagcactttgggaggccaaggcgggtggatcatgaggtcaggaaatcgagaccaccctggctaacacagtgaaaccccatctctactaaaaaatatttaaaaaattagcagagtgtgatggcgggcgcctgtagtcccagctactcgggaggctgaggcaggagaatggtgtgaacctgggaggcggagcttgtggtgagccaagtttgtgccactgcactccagcctggctgacagagcgagattctgtctcaaaaaaaaaaaagaagaaactgcttgtggaaggaatckagagctctgccttcttccatggcaggctgggggcagtactgtgctcaccaactgattattacattaataataatataccgggttgggttgctcactcctgtaatcccagcactttgggaggctgaggcagaaggatcgcttgagcccaggagtttgagaccagcctgggcaacatagctgaatccctgtgtctacaaaaaaaaaaaaatgtttcaaaaaattagccgggcgtggtggtgtgtgcctttggtcatttgagcccaggagtttgaagttgcagtgaagctatgaatgcaccactgcactccggcctcggtgacagacggagatcttgtctaaaaaaaaaattaatagtaaatataattgccaccatgaattaagcctgtgtgatgtcctaggccttgggcttgttactttacgtgcacgatctcatctgctctgctgttcaccatatgctcatgagggaggttctattaatatccccattcttaagggagaggagaccaaggctacgtgcctaaatgctgyggagcgaatgaatgaaaaagcattaagattcagaaatcataaaaagaaaaaagaggcttggaacagtggcttacacgtgtaatcccagcatttttgggaggctgaggtggccagagtcacttgatcccggggggcagaggttgccgtgagctgagattgcaccactgcactccagcctgggtgacagagaagactccacctcaaaaacaaaaaaaggaaagaaaaaagaaaaaacaccacttctcctccttccaaaggtggtggggatagaaggggatattctcttggtccaagaaaagttatcctttctaggcccctggagccactctgggagtttgctctcctccagtgagggagaccccagggtcaggctgcactcacatctgtctgttgtaactgaactggtgggcacatccgtctcttaggggttggtgcctgcaggtccattcctgagccccagttcccagtgccatgtgtgtaccacagcagaagattagacaggactgagaggacacaaagatacttccccagacaagctcygtagaaaaccaactccagagacagtcattctccaacctagcctcggagtaggagctaaaggagtgagcaaaaaatcctcgcacagtaaaggggacgatattctcttgggaggaaatggggtgttgggaaccccatgggacattctgcaacgaagtcccaagccccactttaggtccagcagttattttttttttttttgagayggagtctcgctctgtctcccagcctggagtgcagtggcgcgatctcagcttgctgcaacttctgcctcctgggttcaagtgattctcctgcctcagcttcctgagtagctggaattacaggcgtgcaccaccacgcctgsctaatttttctrtttttagtagagatggggtttcaccgtgttggtcaggttggtctcgaagttttgacctcrtgatctgcccgcctcggcctcccaaagtgctgggattacaggtgtgagccactgcgcccagccttcggtccagcagttctatatatatatatatatgtaattttttttttgagccagtacctcattcttgctcaggctggagtacaggggcatgatcacagttcactgcaacctctgcctcccgggctcaagcaatcctcccacctcagcctccccgagtagctgggactataggctcgtgccaccatgcccagctaatttttctattttttgtagagatggagtttcactatgtggcccaggctggtcttgaactcttgggctcaagcaatccacctgcctctgcctcccaaagtgctgagattacaggcatgagcccctgcacctggcctaggtccagcagttctaacaaatacactggccctgggcactgcatttaggggcttcttctactggacaactggattccagtcaagaggtcaggggaagtttggggtcaggattcctccccatagagagaaaatggggagggccaggctttgcccaggcsggggggcatccttcccaccttagattaggtgaaaactcatcaggcaaactgtgtgcttcagacctcaggggccctgaaggagtatctccctycccccagggatggcccaccctctggggtgagaaagggatcacagaggtggcccgggggctgcggcttttgactctgtcctgggtggagagcttgggttttatcagagggaagggctttcatggaggaagagaggccatccctcaaggatgggtggagctggagggaggagatcccaggcagctggcagggaactgggtgtccaggccagaggagctcctccaggtagctcaggggcagccaggagaacagggggatctggaacacacctgaaaaagcaaacttcatctataaatacatggaacttcatctataaatacaatactgttggattgtacaactgaaattggtgacttttttttgttttgaacatacatctktcgttgcatataacacaacgtgatgcatttcgtttaaattgtggtaaaagccacacatggtggctcacacctgtagtcccagcactttgggaggccaaggcgagaggatcacttgagttagagaccagtctgggcaacatagcaaaaccctgtctctacaaagaatacaaaaaattagccaggagtggtggcatgcgcctgaggtcccagttactcgggactgaggctgaggtgggaggattgcttgagcccaggaggcagaggttgcagtgagccaggatcgcgccactgcaaaaaaaaaawawaaaaataaaataaagccgggtgcaatggctcactcctgtaatcccagcatttaggaggctgaggcgaatggatcgcttgagctcaggagtttgagaccagcctgcgcaacatggcgaaaccctgtctctaccaaaaaaaacaaaaattagcctggcatgatggcgtgcatctgtggttccagctacttgggaggctgaggcaggaggattgcttgggcctgggaggtggaggttgcagcagtgagctgagatggtgccactgcactcaagcctgggtgacagagtgagactctgtctcaaaaaacaaacaaamaaaaaatgttcaaycttgcatcctccaagtgacactgtgcctattttgagacccagttcaaatgccaccacttcagaagtcttttttttcagccgggcacagtggctcacgcctgtaatcccagcactttgggaggccgaggtgggcggatcacgaggtcaggagatcgagaccatcctggctaacacggtgaaaccccgtctctactaaaaatacaaaaaaactagctgggcttggtggtgggcgcctgaagtcccagctattcgrgaggctgaggcaggagaatggtgtgaacccaggaggcggagcttgcagtgagccgagtttgtgccactgcactccagcctgggcaacagagcgagactccatctcaaaaaaaaaaaaaagttttttttttcttccaagagtcttatccctctcctctactcttcagtgccccatttctcaaatggaacatctctgttttttgttttgtttttgagacagggtctctgtcacccaggctggaatgcgacagcacaatcacagcttactgcagcctctaactcctgggcttatgtgatcttcccacctcagcctcccaaagtattgagattacaggtatgagccatcacacctggccttagcacttcctttatataaaacaccagtcctctgtggtcagtctagccttgagaccagggcactggtacccagggggcttgtggagatgggctgtagccagctgggaggtggaagcctggcccctggccccaacttttgatgacacgctgtgtgacactgggcaaggcgcttctcctctctaggccttggggtccttgcctggctgcagaggctctgtgggcctgccctccctcagcttgttcagggatgcagaagagcctgggaggtgggcaaggasggagatcatggattcccattggacagacagggacaccaagggccggatgggcaaggcctgccggaggttcctgagcaagcagagcacttgctgggtctccagtgccggagtcctggaccccagcctggtgaactgcggccctcggtgcaggcctctgccttctgttgctttggtaggcggacacctcttgcgcacccaggcttcctctgcaaccgggaggatggctgggtggttccgctggagcactgagtggtcaccaagacccaaagcaagatggggcagactctgaaaaggcccctagtcccctccccgacctcattatctggtctcatcaccctttcctactgctcaccatggaccagctgctcatccaggcaacatttcagggtggagatttcacagcagtgtagcgggatggagttcagggctataaagagtgttggggtccaggatcctaggacgggggcccaggactgcaggctgggaacttttggttagcatgccaaactcctggactcccacctgtgccttgcatgccagcagcaggattttgagcaagagacactgacccacccagcacatcttagggtccaggggggctgaaaggtccatccgggaaggccaggctgcctgggatgaggtggcagctcaaggagaaaacctcctcctctcgggctttgccactccaagactggccctttaaacyggagaccatgatgtcaccatagacagcaagggacgggagggggactgcaggcctgaggatggactgcatctcccagcaggcttgggtgcaccacacccctcccagcaagcactgactcatcgcagacttttaactagtccagtgctggtttccaaggggtttctgaagtgtctggtggttctggggtaagggtgaggttcctggggggatggcctagggcatagaaggcccaggccaaatctgtgggcctagcgtagcttgctgcgactccttcctgtcagtgtcctggcatcaccctactttcctggtgcaaactcctaagccctcckctttccctatgcagcctcccttctagaatccaggcttcccgcccccggctagagcccatcccactctgctctctggcttcaaaagcttcggccttcacccccgagtctgccctcaggggtgtcccctttggtctggcagctcactttaaacggcgcggggactacatctcccagcggccccgggccttcctgacgcagccccccctttcagcccgcggggaggtgcgggccgggtggggggaggtgacttgatgtcatcctgagcagctgggcggcgggtgccggtgcgcacggagccgagccggggctcccgttgcgctgcaccgcgttgggtcggagtcccaggacttcagcggagatccgcgcgctgcgacggccggtgcagagcccgccgagcgcccagtcccggcccggggctgagttgggggcatgctctagccgcccccccggagcccgggggttggcgaccgaagtctaggttttcgagaagtgagtgtcccccaccccatgaggtttggggggccaggaaggaggagctgaggtgggggagggtgccaggttctaggagcggggtggcatcgggacagcacctccagtcttggggttgtcccaagtggccgggattagtggagcagcgatgcgttccattctgaaaggggcagggatgacgatcggggctccattctgagtcggggctggcttgggggataggccctattctgggaggggttgttttggaggctttctgtctgagagaagggagggacatgtccaggatgggagggggctgcacccctattttagggtctgggcaaggataggagggaaaagacctgggcactccacgcagcctcccggctctcctgaggaactgatgggctttctctgtctctttcttgctgatctttctgcctgacttcgttttcaaaagagccagggtgggaaccctaactggactcttcgggacccccaggaaggatctgaggcctgagccatcctcctttctaccctgtctgccccccaggactgggcagttgcaggaggccctgggggggggcccaggactgtggttgtgccccccccccaaaggccggacaggatgggaccaagttagtctgtccagtctcacccagcacctcccaggcccagagagaacccccggggctctgaaagcttgccctgccgcctgaccgccatggagacgaagctgccccctgcaagcacccccactagcccctcctcccccgggctgtcgcctgtgcccccacccgacaaggtggacggcttctcccgccgttccctccgcagagcccggccccgccgctcccacagctcctctcagttccgctatcagagcaaccagcaagagctcacaccgctgcccctgctcaaaggtgagctggctgctggccactgggggaaccgaacccccgaggggaccagcagggccatggggaggggtgggaggcagcgggcagctgccaagagagagagtttggatacccctccaggctaggttctccgccatcagaactgaccccagccctccagccctctctgctgacacatggcctgactggcctgtcatccttrgaggtgggacatccgaaggtggtgccaccctaggggcagaccaaggccaagggtggggcccatagcctgggttccagggggccactatcagcccagccagctgccagatccctggagcaggcgcttggcagggttccctgggatcaccacataggtcccttccccagccttgggccatagggccagactggccaagcctgaggacaccgtagagatccttggccctgaacccctccccatttctggcccttagaacagggtgccacctgagagggaggcagcagctgtttggggcacctgtggaaagctgctgcatccaggatttgtgatcttgctttaaaactcaggccatcatactctctgagcctggattaggaggaagaaaagcaaccctcaacccccaggaatggaggaagggacagtagttgtttgctgtctgcaaggagcaggagatggcacaagagcatggggcctgggggcagcagaggcagccgtggagattaggagggtctgccccacccacagctggggcagctgggggagctggggcccaggcccaggatgccctctcctccccagatgtgccggcttccgagctgcacgagctgctgagccggaagctggcccagtgtggggtgatgtttgacttcttggactgtgtggccgacctcaaggggaaggaggtgaagcgggcagccctcaacgagctggtggagtgtgtggggagcacccggggtgtcctcatcgagcccgtctacccagacatcatccgcatggtgagcacctgccacccaggctccgagggccggccgagagggcgtgtgagccccgtttcctgtccgcaggacccctgcgtggagaataaccctgtactcatcggcttggcctcagtccacgwcttccttccccccgacctgctgctgcccaacacccactgaatgcctccgggcctgccccacgtccacacctttgcttatgcttgcctgagacctggagtgccctgccccacaccccataccatccatggcctggctcaggtgccgcctctgccaagaagccgctgtcaataaccaagctggaaatctcycttttcctgcccgtagacctcacagcttctagccttgttctccccactggattgcacctgcctagaaggcagggatgtgtcccattcacysctgggttcccagcccctggcccagggcttgcacgaactaggcgttcaggtgatgattgcccaaggaatgaactgcttgctggggcagatgctgaaatcaacccattagaactttgaatgagggccgggagcagcagctctcatctgtaatcccagcactttgggccaaggcgagaggatcacttgaggcaaggggttcaagaccagcctgacagtgagaccgcatcactacaaaaatktaaaaatttgccgggcatagtggtgtgctactgtagtccagctactcagaaggctgaggtgggaggatcgcttgagcctgcctgggaggttgaggttgcagtgagtcgagattgtaccactgcgctccagcttgggcaacagagcgagaccctgtcttgggaaagaaaaaaaaaaaaaaagctttgaatgagagactccctggcttctgtcttcaagggcttttccttaatgaaccccaactctgccactcagatctcagtgaatatcttccggactctgccgcccagtgagaaccctgaatttgaccctgaagaggatgagcccaatcttgagccttcgtggccacacctgcaggtctgaagggttggggaagacagagatccaagtttcagaagagatccaaggcatggggagagggcctccttagcccctagacagttggatgagggccatagggtggaatgagtgggtgaggctgttactgaactcwcctttttgtctgtccccctcccccagctggtatatgagtttttcctgcgtttcttggagagcccagacttccagccctccgtggccaagagatatgtggatcaaaagtttgtcctgatggtgaagtggggagcccaggctgggtggtaccacaaggcaggggcaggctctctgaggggccagggataggatggaagcaacctggggtggacctttccccygaccctgaccctgaccctgactctggttcccacagctcctggagctatttgatagtgaggatccccgggagcgtgagtacctcaagaccatcctgcaccgggtctatggcaagttcctgggtctccgggcctacatccgcaaacagtgcaaccacatcttcctccggtgagtggctgctgcctgcccagcagagacctggggagggtgagagggctgttagaagactgcggcaaaggccatgtgcggtggctcacacctgtaatcccagcactttgggaggccgaggtgggtggatcacctaaggtgaggagtttgagaccaacctggccaacatggtgaaaccccgtctctaataaaaatacaaacattagccaggcatggtggtgggcacctgtaattccagctacttgggacgctgagacaagaattacttgaacccaggtgaaaccccgtctctactaaaaatacaaaaaattagccgggcgcggtggcgggcgcctgtagtcccagctactcgggaggctgaggcaggagaatggcgtgaacccgggaagcggagcttgcagtgagccgagactgcgccactgcagtccgcagtccggcctgggcgacagagcgagacggatgaacccaggaggtggagtttacagtgagccgagatcatgccactgcactccagcctgggcaacggggagactgtgtctcaaaaaaaaaaagaaaasaaaacaaaaaaaaagaagactgcagcaaaggctcctgggctgcaggggcccttgtagaacttctgttttccaagccctttctcagtaacgtattacatattgattatacaaagcctgtgaagttgacagagaatgggtatttatttccattttacagatgagaaagtagaggccaagagagatgaaatggtttgcagggactgggtcagtccaggggcctaggagctaaatcatttgacccttatcatgccaggccataaggacccagagagagattctttctgcaaacatgcactgagcaccagcacccactgggcatcaaggctcacgtggccttgtagttgagaccatggctctgaagctgtatggcctacatttgagtttggttccaacgtttgggtgaactttggcaaattacttaagctctctcctagtttgctcgtctttaaaatgggaatgctggctgggtgcagtggctcatgcctgtaatcccagcactttgggagttggaggtgggcagatcacttgagatcaggagttcaagatcagcctggccaacgtggtgaaactccgtctctactaaaaatacaaaaattagctgagtgtggtggtaaacacctgcaatcccagctactcaggaggctgaggcaggagaatcgcttgagcctgggaggtggaggttgcagtgagccaagattgcgccactgcactcctgcctgggcgacagagcgagattccatctcaaagataagataaaaatggggatgctgcttgtactaactcagggaccattatcgaggtgacatggggccttgcctgcaaagcactcagcatagctcctggactgaggccgggactctgaaacattagttgttattagctacaaaatgggtgagccatgatccctgtcctcctgcaccttggagttcatkagattccctgcctattaacattggggttgttttatttaaccgctgagtcttgatttcttcatccatgtgatggatttcttaagccccatctccctggataattctgagacttacatggtacggagtagatgtgctaagtgtttgtcattctcttggttgactggcaagagagccttgagcttgggactcagtggcagaggtggctgggctgagaagggcatttcagtgtggggggrcggggatctcaatggggcctggtttgggatgttgggaagggagcgcagcctctgggttgggggagagttggatgagcgtgccgtgcaggtgagggtgggcaggcaggatgcctaagggggcactgggcctaccctgcttgctttgagcccacctgcgttcttctcttgcaggttcatctatgaattcgagcacttcaatggtgtggctgagctgctggagatcctaggaaggtgattctccctgggcctcagctggagctcaggattctggaaggagggactggggccaggtcacctgagccctcttcctctcttctgcctcctcctyagcatcatcaatggctttgcgctgcccctgaagacggagcacaagcagttcctggttcgcgtcctgatccccctgcactctgtcaagtcgctgtctgtcttccatgcccaggtgaggcccaggcctgtccctgctgcagcaggagctccagacagtcagggcagccagtgggtcctggaggtcagatcctccagggatcctatctcaccttctttgtctttataattctgttccatctaccttagaaaattcccactggcgctttaaggctaacctcagatatcagctctgtgaagccaggcttttcttctctaccctcccttggcagaattacattcttctccatctatattcccaaatatttggatacacaaatctattatgggagattttgatacacaatttttttttttgagacaaaaccgtactctgttgcctcagctggagagcagtggtatgaacatggctcactgaagcctctacctgctgggctcaagcagtcctcccttctcagcctcccgagtagctgggaccacagatgtatgtgccacatgcctggctaattaaaaaaaattttttttttgtagagacagtgtcttgctatgttacctaggctggtctcaaactcccaggctcaagtgattctgctgcctcggcctcccaaagtgcttggattacaggcgtgagccaccacactagccatattatggaacctttkgcaaaatttataaagatgagtttgttgactgtccccactccccgcgagatcagagttgtattcccagcacactgaatgtgatgcctggtacatcctaggcaggtgataaatgcttggtgaataagaaagtaacaggccgtgggtgagcagtatttggcattctgtcctggacagcaagtccttggcgcctggtgccttcctgacctgtcttccttccctccacctgtcaccccctgcagctggcatactgtgtggtgcagttcctggagaaggatgccactctgacagagcacgtgagtacctctgggggctaaggcagcctctcacctctgcaggcgtgactcctgtctcatctcccacaggtgatccgggggctgctcaaatactggccaaaaacctgcacccagaaggaggtatgaagaagggctttgatgcccgccagagggaggctgggagggctcggcctctagaaggcagtcaggtgtgtgtatgtgtagggggagatgtgagctgctgcccctctgtccctactcccctccccaacccacccaggtgatgtttctgggggagatggaagagattcttgatgtcatcgagccctcccagtttgtgaagatccaggagcccctttttaagcaggtggctcgctgtgtttccagcccccatttccaggtatgaggcaggacaggcggggatgggagcagggctggcctggaaaggttgggtagctgacctaataaagctccctttgccctcagtttctcctccaatcccgggtctggtaatggggagatgctggacttagggtcaggagacctagggtgaagcctcggacctgccttccactggctgaggggccttgagcaaatcactgcaccactctgattctgattaagcttccgcagctgtaaaatgggccaacaacctcttcacagggtggggataaggatggaagagattgtgagtgtaaacatgtttggtaaactgaagtgtgatccagaatgtgatggaggactgttatcacttttccccttttgctagtggccttagatttcattagactcgytttgggatgcagccaggcttccccgcaccaacccagctaactaactcatgttctgctgcaagcatgtgcagacttcctcccgttcttatgggccataacccagtggaagtcaagtcttcctcacagtgattctggcacttcggttcattaaacacctaaaagtctagtatctcatttgattcttataacatcctgttgagataggtattattagcccattttacagatgagaaaactgaggctgggaggttaaatgcctctcccaaggtcacatggcatagtagagtctgtagtggttaggattcaccccgcagcattggattccgtatctagaactcttttcccttcaacactgttgcttcctccagggctcagataagccctgaaggtggggtgtgtgaaggtcagggggcctgggcgttgaggtagtgatggacaccagaccttgcacacagagagaagccactgccagttaatcactctgccatcttgtctgccccaggttgcagagcgggctctgtatttctggaacaatgagtatatcctaagcctcattgaggacaactgccacactgtgctgcctgctgtgtttgggaccctctaccaagtctccaaggagcactggaaccagtgagtgccaggccatgacctaactcacagaaactgggaccagggccagccagtccagacccgaccccagggttactcctagctggagaatatcagagaaagcatcaaaagatggcccaggggtggtgaaaaggacaggaaagtgggcagtgcttgtgttcaggtggaatgctgtatgtgaagggcagggaaagggagaggtgggcaaaccaaagctgtttcatctcctcatccctccttgacactgccaagaaccatcgtatcactgatctacaatgtgctcaagaccttcatggagatgaatgggaagctgtttgatgagctcacagcctcctacaagctggaaaagcagcagtgagtgttgggggctgggcgtgggggaagggagaagagcagggaggartcagacccccatggctggagggaacccgaggactaccccaaactctgtctgatcagatgctgcaagactgtccatgctcctgccatcctatgcctgactgtctgcccctgtatcctcccgtcattcttcgagtagctcagacttgttctgactccctgtagcttcctacagaagccagaaccactcaggccccacccgtcatcttctcygtgactgcaggctgggatctgtctgtcctctgctctcttccctcagtagagggyttttatggagtcacagaacaaaaatggttccatgccttccctttgccggtggggtggtagtgagggagtctggactgtgagggagtctggactgtggggggccccaggaaagggagctgcctcaccctctctccccagggagcagcagaaggcccaggagcgtcaggagttatggcaaggtctggaggagctgcggctacgccggctacaggggacccagggggccaaggaggcccccctccagcggcttacaccccaggtggccgccagtgggggtcagagctagacagcacctcagaaggggaaaagctaaacccagagctgtcagtccctctatcccttctcctgtccaggggcccagagagaaacacacctacccctggccttgccagagtggcttctgaggactccctgcccagcccagctttcactggggggagacgaggagaggcaatggtggtcttggcaacagaatgctcagcccctcgtggcaggacttgacaagggcaagcttgaccaggaagctgccatcagggatcttcccctgccccgcaaagctaggctccagctgcaggcgggctcccaccctctgctcctggccttgggcaagggcactcagcgcctcgcctgcccctgccttggccaatgcgaggtccttccttatccccaccatggggtccatggtctatttattctcgcccagctcaccctctacacagacactgtcctgggtgcacactcctcccttccctcgctgtgtacttccttgtcccctttttatttattgggcagggggagggggagggcacaggcaagaagagattcacagtgtcctggggtaagggggggttcacagtaatcatggtctactcctctttccgtggctgggggtagacttaataaagagagaaattcaagaactgcttgctttatttaggggtaagggcaaagagggaagtaaaatgatgaaagattggtttaraagggccaggcagaggcagggaaraagcaraaactcccctcttctcaggtgacagtcacaaaatcttacaaaggatcaaagctggaacaaccctccccttatttaaaaaaattccatagcaagtaaccatcagggctggagctccttccagtttttgaatcttgaacacaggtttcccccamcagaaygtcaagccctgtgacccaggggaggaaggaggggagaggatgggctagtagcgagagaggcgacacatgtcacactggcaggccctggccgtgaagatctcgagctcctccctccggctccccacacactgcagctgtactttgacctgcgggagaggggagtccgtgctgcagtcccctttctcagggctgtctaggatctccatctctctggtcttcccgcgaccccagcgtccatccaccgggcccgggccctcctcaccttcttcaggccactgatggtgcagcactgagagacggaggtgatgttgtgtcggtaaccactggccaccagcacagagtaccgagaagggaaggcgctggactcacagtggcccacacaggcctgtgccacgtgggagccctggcaggtgccttggcggtcacttcgcactgtcacattgaaggctagaaggagataggcaagcagtagacggcgcctctgccaaggtttgcctcgccccagctcccgttgcctgtgcctcagtgtggggccctttagggtgctgcctgccccaccgtccactcagctctttgctcccacccagaacctccactgctcctagccctccggtcccagaggtactcacggtgcaagtggcagcctgggatgactgcctcctggccccaggcttcagtgactgccaggaccagcagatagaggaccagggtttgaggggacgccataggcatctgaaacacagtggggagatgtctctacgtgggtgtgcaggtgggatggcgagttctttaaatactgcattccaggtgagtgagccagggctggctggtctgacaggtgaggtgtgcctgaatggtgctgccttttccctgtatctgcctttgtgtgtgtgtgtgtgtgtgtatgggtgtgagtgtgagcagctgtctctggaaaggacctgtgtgtcagccctctgtgcagtgattctcccttccctggaattttcttcgccatctggagcgcaaacatcttcctccctccatctgccccatcttggcctgcagggccctcgtccacattcccagaccctccccagagctcctcctgcctcagcgagctcaccacttccgaggcccaggaacagagcggcttgcagttttcctgtgcctcctgctggtctccagcttggtgctggctctccaggcttttatttgccagcattttggagccacgccctcttggagatcggctttcaaaccagcctcccctgcctgaagcctcagagcgatcccacctgggggatcttgctctttgaggtgcggtcctcggagagcagctcctgctgctttctgcttctttctgtccaaaaagctacccacagcccaggcctcgataagtcagatgtggagagaagcctaggagctggtggagtgtgcagcgtgtgtgcagctgacgacacaggggtcaagactcttggctgagttgtggacacctgggttctctttgctctgtgaccttggacagaacatttccctgttcagggcctgatcacccctaactttattattatttattactattattttgagagggtctggctctgtcacctaggctggagtgtggtggtgttatctcggctcactgcaacctccacctcccagcctcccagactcaagccatcctcccccttagcctcctgagtagctgggaccacaggcacaccactatgaccagctaacttttgtatttttttgtagagacaggattttgccatgttgcccatggtggtcttgaactgctaagctcaagtgatccgcctgcttaggcctcccaaagtgctagaattacaggcatgagacactgtgcctggccacacccctaattttaaaaccactaaactcagtcctgcttgcctttttctaactgcaaaggaaagggattggggaaggagattcttagggacaagggaaattataccagtggaggtctcctgagatgtgcttggtggcagggccgggggtttgggggttgctgtctgtttcagagttgcatggccacggtatcagtggatgattcgcatcctgtgctacagagtaacgttctgagctggagtgctcccctagccctggaataacagggacctgactcctgaaagggcctgaagttatcaaccccagcaaagctgatctatttgtccaactctggttttatagatgaggcaactaaggctcaaagaaagaaagttactaaaagtcacccagctagttaatgttagggctgatttcaaattcaaatctgctgtccatccatggtgctaaactacacttgagcaagaatgtggcaagctggagaaagacccccaggcagcagtggccagaggggttggggcaaggtggagagccaaaggaagcctgtggtgattctgggcagccccgctttggggtcattgcctcactgatctgctcagaaagagcagggccagtcacagactgctagagctagaaggcactttataactcaccaaatcctaccccctcattttctggatgagaaaataagagctcagcggaaaacaacttcccaaagcttcactgtaagctagtcagagtcagggcgggcactcacagctccagatttggagctgtgcttcttagcagctttgtaaaacaggccatgtttgggacagtcgagtaaaggctgtaaacgcaatttgagaggaagtgatgttactaatgtcactaatccttaaattcccacaccctacggtttccccatcagcccccatcccctcaagacctgggtccttgtttgccaggtcctccgcagcagtccacctcttctcttctccccaccaagggtgcaggcagcatagcaacaggacgcagcgggaactcagcagttcagcccctgctctcccactcttgaggggcaccctctggcatgtgacagatgatggcttctgtttaaagcatttgggtgacaaggctcattaccttatgaggtagcccattctaatattggacatctctaacaggtaaaaagtgactcctttgttgtgagctaaaatgagtttccctacatttccatagatcattttggttctccacggccacatgaggctaaagtgtctattacagatcagtcctttagttgaaggcagctcaggtggccaggccttctccaggggtgccaacctggattgacttccagttaatctgataaacgaatctgcattactgtcaaacagttaaagggatagagaggtgggaaacattttgtctatggagaggcaaccatttggggccaaactggaactggggaagaggtctcttgggtgagcagggctcaggacagtgagtcttgaaagaccccattccctaacctctggcacaaactcacctacccaaagtgatcctgtgaatagtaaccaggtagacctagggaagtttcatgcattttctctgtatcttgagggaagcatttgttctcttttactctattccactaaattcaatcaataactcttcataaataatttattgtcattaggatcctaagtgccgaagacaaaaggcctaaaccggccctcaggacatgaacattttagaaagttccattcttaatgttttaaattgggggaaaaaatctattataaaggggcaaaggacacgataaaaccacagaggactcagcatggggacctcattccccacgactgaagtgtcataagaaaaggatagagttggaggaagaatggctcgggaggagtcactacaagagatgatcctctttccagcgctgcatttggaaggctcaagagtggctgctcttcctgaagaaatatcgaaacgggaagagagagctgcaagaatgagaacagagtaggctgagactctatgaggtctccttcccttctccccatttcccattagtgcttcactagctagggcatttttgctctggggaaccattgaatggaaattcaagactgaatagcatttgaaaaggtacccaaattagattatactcaggagggggaaataaagaaacagaattgcaatgggatggcagagagagagagagacagagagagacatttgctaactgtcctttgcaaacacaacctagattcagaggggagaatggaaatgtttggtaaccaaatcatctgaatggctcaagtaaactaagaatagactttgttcaagttaatgtttttgtttggttggtttttttgagacagagtcttgctctgttgcccaggctggagtgcaatggcacgatctcagctcactgcaacctctgcctcccaggttaaagtgattctcctgcctcagcacccccagtagctgggattacagaacatgccaccacatccggctaattttattttattttatttttttaatctcggctcactgcaacctctacctctcaggttcaagagattctcctgcctcagcctcacctccacctcccaggttcaagcgattctcctgcctcagcctccctcccaagtagctggtatcacaggcatgtagcaccatgcccggctaattttgtatttttagtagagatgggcttcaccatgttggccaggctggtcttgaactcctgacctcaagtgatccacccgccttggcctcccaaagtgctgggatcataggcatgagccacccggcctggcccaagttaatgtttatggggcttggctttatcctggacacatcagggtggaggtgggttgtgtaaaaataagtaaaacacagtctttattaaatgcacaattagggcttttgttcttaatctcatttccatcatctatcctagacataagtgagaagcctctgtaagtaatctgctttcttttctattctaatttccctgaaagactcaatgagccgctctgagctggatctcgagtctgatgccggacagaagctgtcttaccttagaaacccaaagaagccggtggctgctcgctccttaggtggaggtgagttgtgctgcaggggtgggacaattcgccctggcaggctgtgtccccactcagaatctgtaaggaaaacaatcaggcaggagcaagatgtttgtccataggccgttttcatgtgagtagaaggccaaacacccagtatgagccagaggcagtctcacgccaagagttctttaaagccagatgaattgtttgttctgaccttcccaatttcatctcagctcagtaagatgctattctgacctcagagtattttcagtcaagctcctgggatatttacacagctcaagttccagccatgcactctggctggtatgtcttcacataaaatgacaagttgttgaaggactcactggcctacatccctgtttctgtgataactgcagtccacactgaatcctcatgctgggtaaaagatcagcaagtagggagggcaatagcttgacatgcattcccagcccttgcaaagcatccatttgcaacttcaatattaactctaatgcctcaaagggaagagatcattctccaacagtacagaaaagggaaacacaaccctctcaacatttctataaagtttatcacctcactcggaaatgttttgaaatagtgagagcataacttcactatcagaagcagaggaagggcatgccctacctcccttcactccttctgggagctggggggcttctattactctaggacaggcccccagaccagaggatggctaacaagcacctccacgggagcaaggcacattacccactgagggcacccagactcagctctgtgctgctctacatatcagagaactacaagggaaagggtgattattaaaggagaataaatggaaatttcccaggacctaccttgtttctggacatcagtgatatcagaggccagagtctcctgcaatccttgttgggtttttctttccctattctgttaaaaagaagaccaagaaaagccttaaactttcctcctacactgcatggcaatctgaatgctatttgctggtgaactgatttcatatcagcactggggcctggcttctgactgcctagacaggttctatatttctttccatttctttccataggactgtccttttttcttttctttttttctttcttttttttttttttttttttttgagactgaatc

SEQ ID NO: 95135 - DNA, 14073 bp, Homo sapiens
gaggggacacttcctctagaggccttgcttggcctcagccagcccagataatagcccaggagcagaggaaacaggcagcagagtgacagagacggagctgggcttccccgatagcagggagctgcctgggtagcgtggggtgcacagccagtggggtgggctatttgctaccaccaccccctatttactaatggagacactcattagctcacaggtgccctgtaggaagctccacgtctgttttctcatttgtatgatgagaggataaagaggtggtatccgggaaagaaaggggctttgtgttatgcgtgtccatgaggacaacactgtacccccgagtttggcaggagaggagaggcaggcagtttaccagggcagctcgaggtgcagtcagcctccttccctgcccccacctgggacccctgaaggggtggcaggttgtgggagagaaccacagtgacagaggttggtgggcagcacgactcgggtaggctgagcacctgcaaccctgggcagggaggctggctcccctcctactgagtgtctgttctcacagacgtgaccacaagcacccagcccctccaccttcagcaagcagctccctggatgcaccctccctcccaacacatctccacctccacctcctgggcattgctgtcatcatgggtcctgctccctgctgcccatctggtgcctctcccagcctcccagcttgggggctgcacacggtagcccatggccaaggtgcctgtagggtggaaggcaagctgctcatcagcttcagagagcccactgacctccaggcatcctctcttgtccccaacattccccccctactcctgctacccaccttgctgcggcagcatgggattgtcccaccctccacccctagggctatggggctcacccctagggctatgggcctccctccgcctcccacttgaggcgccactcccactgcctcaagggtcatttgctctatgaggccctgctttgaccttctccctgacctctcaagagtgtggcctgcctgagtcagcagtgggggctgacccctggggaccactacgcaggaagtgcctgggagccaggtattgatgtggttcatggcagggcagctccacgcggtgatggaatgcggactccctgtaggtggctgagaggcagcagcagtccacacctcaccaattcttgtgagggctgttaccacacctggggtgggcaggcaggcagcatcgcgcagggcacagaggccccctagactccacgcagtggggcctcaccatcacaggcgtggcttccctgcaccaaggggcagaggcccaggagcagggcctgccgtggcaatggcccccatccccacaccctgctggtgtccccacttgaggcccctcacacccagccaccactggtcaggcctcaccagcatcttctcccctccacagctcacctagactcttcccccagggagccctcctggaatgagcaagtgctgtgccagagcccctctccctgtccatcagatggtcctaaagtgacctgagctcttcctgggatgagggtgtgcccaggagggggtcaagtctgaaaggatggtggggctgggccccggcaggaatgctgggagccaagcttcccgccatggggtttccagactaaatggcatcaggcagcacccagagagcargtacaaaggccacactgtgcgccacatgccatcggccaggcctcgccctctgtgctgcctctgtggggagcgcttcttcccttcctcttcagattgctggctccttctcagtgctcagtaacacctgcctcaaggctgggcacagtggctcacacctgtaatcccagcactttgggaggtggaggcgggtgatcacctgaggtcaggagttcgagaccagcctggccaacatggtgaaaccccgtctctaccaaaaatacaaaaacttagtcgggcgtggtggcagacacctgtaatcccatctactggggagtctgaggcaggaaaatcgcttgaacctgggaggcagaggttgtggtgagccgagatcatgccactgcactccagcctaggggacagagtgaaactgtctcaaaaaaaaaaaaaaaaaaaacttcccttgaaaggccctccctagctcccccttaattaagcaggaccccctacattctccctttcagcccatctgcgccctcaccattctcacccagtctgtgatgatgccagaatgcctggcgctcagcgaaacagccattcataaccaaggagatggccgcaaaccacaagtgtttattgcagaaatctggccaacattccaattgcagggccccagcacagggctgggcaggtgaratagggaggggtggaggaagtaatctggcccagggcctcaragctgtgagatgatattgggtgccaggctgcaggtgaggcctgtgccatytggttccacattcagggccttcactatgccatcctgtaccaccatggagaacctgccggaaagaggggcccagccagctgcatcagcctgggcttggaggctgggcatggagacaggcagtgaacagccaggggcccaagagaactccagagaggactccccccacagaggactctcccccacagaggactcaccaccacacaggactctctccacacagaggactctccccacagagaactctcccccacacaggactctctccccagaggactctcccctacagaagactctccccacacaggactctctcccacacaggactctctccacacagaggactctccccacagaggactctcccccacacaggactctcccccacagaggactctctccacagaggactctccccacacaggactctccccacagacgactctcccacacagaggactctcccccacagacgactcttcccacagaggaccctctccacagaggactctctcccacagaggactctctcccacagaggactctctccacagaggactctccacttttacctcttgagacgtcgattcccaaagatggacaccagcgaatcatctagtaataagtctgtctcctaagaagagacagagaaaagtgtcagaaatccttgaagaggccaagggcccccactgctccccgcactgccatgtccctgtggcggtcaggggaacactcaccttcccaaaggccccagtgggatcagccaggagccgaacctgcagagaaagtaaaggtcacaagaagaatatcctacctggtcctgactccctgcaggcccctcacctcaccttgccttccgccttgtgggctcggccccactcgccagtcacaaaggcatcattaacactcagacaggccaccacctggactcccttggccttcagagcctcagcctgctccacaaaccctggcaggtgtgtctgaggaaggggaacaaagggtcggcaaagggataactgcatctgacccccagcccaccctttatctccaggccctcctcagtgctctgcctcaacacctttgatcagacaatgagagctgtctaaaccattctatttcctttttgccttggccactaggaagctcagaatgaaacctaatgccttatggtccagacgtgaactttccatgggcagatctatgtcttatttatctgagtcccaagcaccttccacagtgcctgtcatttagcaggaccaacaggggtgttggatttaattgtagtatgtttttctccaacattcctggtactgttccctttttgcagtctctacttgttttcttttttttttttttcattttgagacggagtctcgctctttcacccaggctggactgcagaggcacgatctccactcactgcaacctacgcctcctgggttcaagcaattctctgcctcagcctccccagtacctgggattacaggcgcccgccaccatgtccggctgatttttttgcatttttagtagagacagggtttcaccatcttggccagactggttttgaactcctgacctcgtgatccacccgccttggcctcccaaagtgctgggattacaggcgtgagccaccgcgcccagctctacccagctctacttgttttgtgatggcactgaaatgctttttaggagtcctatcaggactatgtggaggacttaagagcaacacaaaagatcccaggtcctgatcttcagaaggggaagggcctcaccttggaacatccaggggtgaaggccccaggaactccaaacagcacacccttcttgcccttgaacagctctgccaggttcaccttgttccctggctccccttcaaacacctccactgctgggatggcatctcccacctagaaggaaggactccagggtaaggggggtgagggagccggggcaaaccagaggcaggaaggtgaacagagagcctggcagctgtgcctgcaggaaccggggctgaaacccagcaggatactccagccctgtcagtttccaagggccctccctgcccgctcccactgggttaccccatatcctccaagtttcaaggtggccctgctcctcttaaggggccattggtgacaacagagaaagggagggaaggtttccccatgtgtcgcaaagggttgcataacatgctgtctaggttacaggaaaggagtggaataaaatggacaggggctagagggctgtatttgggggtgaggaggagtccctgacaacatggagggagaggatcttggccaggtctgagggtcccaccctcaggaggaggaagaggaagggcagcggcaggtggaacgttgggggagggtgtccaggcccctacacccaggaggtgtagaacaaaagaaggaatcttttgaagggggaaggatccatccccagagtacttgagggcttcatgggaccagagtgggtagggagagagagtcagaggtgagggcctctgaggagcccaaaggttgagagcaggatgaagtagaaagggaatggggtctcacaaggtttgggaggagaagggggaaggtccaaggccctggggacggttccaggaagtgagtgaaagacagaaaggtgggaattcgccatggggggaggggaggtcatggagtgggatggggtaagcccccgcgggggcgctaagggacagctgtttcagaagataggggaaatcaggccgggagtggtgtctcacacctgtaatcctagcacttcgggaagccgaggcgggggggggcggggggggttcacctgaggtcaggagttcgagaccaatctgaacaacggggtgaaatcccgtctctactaaaaatacaatagctgggcgtggtggctcgcatctgtagtcccagctactcaggaggctgaggcagtagaatcgcttgaacccgggaggcggaggctgcagtgagcagagattgcgtcactgcactccagcctgggcgacacagaaagactccgtctcaaaaaaaaacaaaaaacaaaaaacacaatgcctcgggactgtcccgggaggtgaggcccccacgattggcgagaaaggtgggcagccacgagggccttctgaagggatgagccgggcgggcggaggggaggggtctggcaggcaggaaataaggcgatactctcagactagcgggacggggattgccatgggggtagtgggggatgtcaggcccggccgggccagcggtcaccttgattggggccatggctgcagcggctctgctgaaactgcggaccccgccagacgcccactctccttcactgcaccgtcttgctgccgctgccgcagactgaccgccggccccaccgacgagtatatagcccgctgagcgtctcagggcgcacacgccagctagtcccatacccgccccacggccacttccactccgcctcctggctggtgccaccgcagcaggcggggcaccgctagcggcacagcggcgacaccctgcggaaggcgggcctgggccgcctccactgcgcaggcgcgagcggccacccgcagaacagagcttccgggacccacgcctcgtttgcactgggtgctggacagccgacgcaactacaaatggggcggagctttcggcactggagcagctaatttgcatataggaatgaggtgcggctcggcttccatgggcctaatttacagatagggcggtatttctgccccttaaccgaaagtgggatacagaggacgacggtgttaggcgcctgtgtaggagtaaaatgtgtttattttgcattcaacragagctcctgcattgcagctattttgcatatgatttgcatcttacgaagaatttgtggcaaaaaaaagctgggcgtgcgccgtaggaacctcctgctgagacgcttccggtagcggcgcgtgacccgacaggtctttcacctacctacckcagctcccacaaacacgagaagttccagcaagttcgccacttccggttctcctggctatccaatagcatcgagwggagcatcccsggaagtkaggcagcggaggacgacctttttccggttccggcctggcgagagtttgtkcggcgacatgaaactgcttacccacaatctgctgagctcgcatgtgcggggggtggggtcccgtggcttccccctgcgcctccaggtacccgccggcggcagtcttcccttttcgggcgggatggtgggccggggtccagtgcttgcctaaactcctccgccctgcaggccaccgaggtccgtatctgccctgtggaattcaaccccaacttcgtggcgcgtatgatacctaaagtggagtggtcggcgttcctggaggcggccgataacgtgaggatccttaccccgccccagcatatcccggggaatgcggggcgggcacacctcagccgggctgaggcgggagttcgggatgcccggagataattttggcctcttgcccacagttgcgtctgatccaggtgccgaaagggccggttgagggatatgaggagaatgaggagtttctgaggaccatgcaccacctgctgctggaggtgagaagcggcccatcacttgcttcccgggccacctgcctcccgcactgaggctgccagtgctcagctctgtccctccctgcccgcaggtggaagtgatagagggcaccctgcagtgcccggaatctggacgtatgttccccatcagccgcgggatccccaacatgctgctgagtgaagaggaaactgagagttgattgtgccaggcgccagtttttcttgttatgactgtgtatttttgttgatctataccctgtttccgaattctgccgtgtgtatccccaacccttgacccaatgacaccaaacacagtgtttttgagctcggtattatatatttttttctcattaaaggtttaaaaccaaaagcggtttctctttgcagcaaatatacattaaaatagagtctctgtacagycaagggctctgggccctggcttgccccatgtccctgcgcctccctggccaaacccaaaaataaatatagtgttattgctctgcagggcataraggcagtgctctcctaccccctgaggaggctcgttgggagctgatggggaagccctggccaccccaggggtccaggggctggagtctgcttggagttattgcttcaaggggggacactaatgcccaatgcaaatgatgagaggaggagcgaagggggcatgggcctttgctctccaagtcccactctgctttgaagagggggtaggattaagcagcagcaaaagcatcacccactgggagactctggcctccatccccttccctccctgagataggtttctgcctcccacgcatcccgtgcagccccctatggcttccgcaaggccccctacactctgggggcacgttatggcttgcaaggggcagcactgtgcccagagcctggacacacgttcccagcttctgacaccccctaggagggggaggagagggcgtggggcctgttcccaggggctgatggcattgccctggccctgccagcaggctgtggcactgcccagaccccagctccgccccagccmttggggctgaccccatgctaggcaggtcctgccagaacccccaccagtcccaccccttgcctcagtccatcatggcctcgagcatctccaagaacagcttgtgcatgggcaccttgccctccagcttcaccccatagaaatgggccagcactttgcccgctgtctggcggaggagcggtagcgtgagcagcagcctgcccgcccgccgccgctcagcaccccctccrgggccagcccggccggcttcatactccagcagggcctcgtgcagagcttctcgcagctgctccacagcctcggcatcttcgatgtgcacagagtctgcaagaagagaggaatgtggtgttggcctgggctatctctggcaagggcactccccgtatcttgagcactgctggatggggcctaaggaagagccaaacgaggatttgttgattggctgactgagaggcaccactcattgctgcggctcgtgggccaggaccccaccctctctccctcaactgtggccaccttgtaccctccccaccttccctcccactaaatgacctttctgcattagtgtggcactagggctcaaaatcctgtgtgcagtttggagcctgcacttggcttgctttttgacttctagcaagtcattgttcttccctaagcctcagttttcgttatctgcaaaatggggctgtgctaccrtcactgagttaacctgaagaccttacggagacacctcacctgtcagtgcctgccccagactcacctgaattggcaagggccaaggcctttagtagaacatactcctctcgctccagccgcagggcctgcagccgccgcactagttgcagcagggcagcccccagttcccccaggccagctgcccgtgccccctcttcatccaggactaagtcctcagcgaaggccagctcatcctgcagtggcagtgagcgctgggccacacccagcaccagcacctccatccacacgctctgcagtactgacatctggtcagacagcgacagcgatgagaagcctagggggcagcggggagcgggcctggctgagcaaacgcaccagagccgggcccgttcagggcagccccgggtcacctgggccctttacctgggatgctcttggcccagctgatggtgaccacaatctctcggtcaaagaggtcacagagggtagccacggctgggaggtgcccatcagggcctgcggggtcaggcatggcatagagcttctcaggctcaaccaccagcagatgagacaccagtgcattcactggggctgctgtgacaattagaggacaagagtcaggagcactcgaatctgtcaggcctcaggggtcaagcatcttcccacagtggctccccctgtggccttcctcagtagcagctgtccagtgacttccctccagggaagagcgctaactgtctcccagggaaagcccgtgtgtttgtggacaggctgtgagtgttggaaaatcgtccctgttcccagttctactacttttcctgatgcaggaaaaggcagtttcacatgtcttggggaaatgagtgagtgaagagacgaaggggaaatacaggtcccagtgcccaaggtaactatgatgccacacataggcctccggtttcgtagccccaggtacccacagtgctctcacctgtcttccgggggcctccagcgactgccaggggcccagcagggaaggggcccgggaagggcagtgggtccacctccggccgccgcttgtacttctgccgcccaccccggacgcggtccaggcgcactccttgaattgtgggacagataggactgtgactgtggtgctgtgggcagggtggggcttgctctccagagctgtcctccccgagtccactcaccagaactcccaggcctcacccccacctggcccgggtccccgactcccccagccctcgcccagcccctgcccagcgctcaccctccttgagcatgcccacccgcaggcacttggtgaagcggcaggcctggcaggccttgcgtctccgcttggtgatctcacactcgttggaggcyggacagctgtactcgatgctccctgccaggaagaggcagggctccagtggcggcctcccggggctgggaggggacccagctgacaggagagccctgactctccccgggcaagcacaggtctgggggtatggggaggaaagggagagcagggggccatgagcaggcagggaggggagtggctgctgggcgggggagccctgcctggatgagggaggagctggaccaggcagcggggctgcatctcagccccaagcctcatctctggaccacactgccctcatctgccgacatcaagggccacaaggacctctgcattgctaaatccagtggtcaattcttagtcctcatgttacttggcctaaaaggaggatctaaggctgttgatcacttcctgctcctagaaacactgaaacactttcttcttttgcttctaggacagcatacactctggttttcctcccaccgcaccagccactttgtggtttctgagcatcttcccaagctcttccatccagactgccagggctgtccttggagctcatctccaatcccatggcaatcttccccagccgtggggctctcacgtttctacctctagcctggacttgctgtgagctccagacccatctctccagctgcctccttgacatcctgcatgtctagaaggcatctcggaccgaacacagcctacgtggactccacgtgttcacttgcccaagaagaaacctaggcagaatctctggttcctctcacaccccacatccaagccaccgacacattctggtgggctttacctcctccaaggtccagaatccgcctcctgcccctggcaactacttccacccttgacctgatagtcactgtcacctcgcccctcgcttggctgtccctgcttgctccagtctgttctcgactcagcagccaagagggtcctattaagcctccattacatcctgtacctcctcttctcaaaaccctctggggatttcccttctctgagtccaagccaaagcgaacctacgtcctcctaggcctacgcccctgcttcttgcctccttttgacctctactccttgctctcgcctcctccatgttcctcaaacaggccctgcctggagctctagtcctgaagtccacacaggctccctcacctccctctgctcactgtcaccttgaagatcttccctggccaccctgtgataatgccaaatccctttgcagagtcctcctggcctctgagccctgcttctggtttctcttcagccctcagcacaacagaccacgctgcatatgcactcacctatcttgtttattacgcctcccccttcagtggcagctccaccggggcaggaactggccccagcactagcaacgaggcctggcacatggtgggtgctggcagccctcccggcctcacagggccccgcaacgaccaaatgacacagctagacagcaggcccgcagcacatttctcctcgcggtgcattttctcctaccccctatttgcgcttctgcactcagctcaagacaccacggccgggcacggtggctcacgcctgtaatcccagcactttgggagaccgaggtgggtggatcacctgaggtcagaagttcaagaccagcctggccaacatggtaaaaccccgtctctactaaaagtacaaaaattagctgggtgtggtggcaggcacctgtagtcccagctactcaggaggctgaggcaggagaatcgcttgaacccgggaggcagaggttgcagtgagccgagattgtgccactgcactccagcctgggtgacacagtgagactccatctcgaaaaaaaaaaattagccggrcatggtggtgcatgtctgtaatcccagctgctccggaggctgaggcaggagaatcgcttgaacccgggaggcagaggctgcagtgagccaagatcgtgccattgcactccagcctgggcaaccagagcgaaactctgtaccaaaaaaaaaaaaaaaaaaaaaaaaaggccaggcgcagtggctcacgcctataatcccagcactttgggaggccgaggcaggcagatcacgaggtgaggagtttgagaccagcctgaccaacacggtgaaaccctgtctctactaaaaatacaaaaattagctgggcgtgtgcctgtagtcccagctactcgggaggctgagggagaacaatcgcttgaacctgggaggcggaggttgcagtaagctgagatcgtgccactgtactatagcctggcaacagagtgagactctgtctaaaaaaaaaaagaggccgggagcgtaatcccagcactttgggaggccgaggcgggtggatcacgaggtcaggagatcgagaccatcctggctaacatggtgaaacccagtctctactaaaaataccaaaattagccgtgcgtggtgccatgcgcctgtaatcccagctattggggaggctgaggcaggagaatcgcttgaacccgggaggcggagcttgcactgagccgagatcgcgccactggactctagcctgggcaacaaagcgagactccgtctcaaaaaaaaaaaaaaaagacaagccctctggagcctcagaaccagcacctccccttcctgcacataccacagcggtaataagacaagtctgtgcaactcactgttgcccagctctcccctctgccaggatgtaaactgcctgagggcagaaacagccctgcttcagccccagctatgtccccaaggcctggaacactggccaggacagcaaagaacaggtctgtgccgaacagggactctggctaccacatacctttatgaccttgggcaagtcccatacctaaccccttgaaccctcagtttcccagctgtaaaagtgccccacagagttgggtcgtgagaattaaaggggataatatggtcaaaacatccagcatggttcatgacacctaagtgctcaatatacaagtcctattcacagccagcacacaataaatatttgtcaatagtcaacatacagtgaggggccccagggtaggtaggagatacccgcaccctggccggctggctcactgttcttcagagcgggaagggtgcacaaagtttaagattggtggattttggccaagttaaaacttgctggattggcggggtgcagtggctcacacctataatcccagcactttggaagcccgaggagggcagatcgcctgaggtcaggagtttgaggccagcctggccaacatggtgaaaccccatccctactaaaaacacaaaaattagccgggcatggtggcaggcgcctgtaatcccagctacttgggaggctgaggcaggtgaatggcttgaacccgggaggcagaggttgcagtgaaccacgactgcaggccgttgcactccagcctggacaacaagagcaaaactccatctcaaaaaaaaaaaaaaaaaaaaaaaaaacctggccaggagcagtggctcacgcctgtaatcccagcactttgggagtccaaggcaggtggatctcgaggtcaggaaatcaagaccatcttggctaacacgctgaaaccccgtctctactaaaagtacaaaaaattagccaggcgtggtggcgggcacctgtagtcccagctactcaggaggctgaggcaggagaatggtgtgaacccgggaggcggagcttgcagtgagccgagatcgtgccactgcactccagcctgggcgaccacacgagactgtctcaaaaaaaaaaaaaaaaacgtgctggaatgtcacaatcagtcattcagcgtctgtccaaagttcggtgttattagtaataagcagaggaagcagtctaacattgaagagctcagctctggacctatactgacccaagttcaaatcttggttctgccatttcctagttgtgagacttcaacaaagtttcaaatgcctctcttagtttcagttataacagtactgacacctt

SEQ ID NO: 95136 - DNA, 26371 bp, Homo sapiens
  misc_feature (1)...(26371): n = A,T,C or G
tttggtgtggttgtgtctggggagaggttcgtgggggcctggaggggagcctgctattgtaggtagggggccagaagtccagaccctcgcaggctgagtgagcggctggctggactgagcctggtgcatatgggtcgagtgggatggtgcatgcttgctctggcaagggctgcgattggggtgagagactgcagaggtgggactgggcagtggggagacagcagctgtggccttgaggttgaatgtgccgttcggtggtggcggcggctgggcggagggacatcagagctgttcttgtgtctggtaccttcccctcagcccttccaggggcattggtgacaaagggcttactctgttaagcccagagacctcgaggctgaccccagggtagtcctgcccacccctccactccccatcaccagccccgcccacccgccccccaccaccgtaccgcatgccaagcaaggagcaggcgcccctcgcccccatcccaaggcagcagccgcagacagccgcggtgtgcccccgcgcgtgtgaccttgggcttctttaccaccccagatacgacgactaccaccacgagcgctggcacagggtccatcccgccatggcaacagcagcaggcggctgccgcagcttctccaggagcccctcagatgcaaggcaaccccactatggtgcccctgccccccggggtccagccgcctctgccgcctggggcccctccccctccgccgcctccaccgcctggttccgccggcatgatgtatgccccgccccctcctcctccgcctcccatggacccttctaactttgtcaccatgatgggcatgggggtggcgggcatgccgcccttcgggatgcctccagctcccccaccgcctccaccacagaactagactkgttttttaagaaaatatatattatatakagagagaattggtctcgtttaaacacgccgaacctcaccatatggagccagacattgggaygcacgcatgtgattgtgtgtgcacgcatgtgtgtgtgtgcacgcactgggctgggccaagcgactgaggattcgcttgggaacgggcaggtggtagtaggggcgccagcttgggctctcctggcgccccgtagcatcgagtgtcttctttgtcttctttctctcctcacccaactccctttgcctctccccaaaccgggccgccaggatccctccccgcggcggcgatggcccgagccatgagagtgaggactttccgcgcccattggtgacccttccaggcagacagcctcagcaacgcccctggtggacaggatggttcggcaaagcagcctgagttatttttgtggacggaatcggaacacgctggctccatatcgtgaaatttttattaatttttttytttttcctttgttacttctttatcttttcctttcttcagactccgtccaaggagatgctctccccggtcttctgctgcaatttagattcctttcccttctctccagttctccttcccttaccaaggagaggggagcaaatggttttgggcaagggctttggccattcatgtcaagctggttgtgggtttttcaaggtgccatagccacccccaaakatgtttgtttaaagcgtggggttttttaatctctgccacccttgtcaagggagtcttgtaaagttgccgagggtaggttcatctccaggtttcgggattcccatccgtcctggcgatcctgccagcagtgggtgggcagcctgagctccstcgggctcgcctgccagcctggagttcttcctgtgctccttgatcacctgagctgcctcagattccatttggtcctctccttcctggaaggcttccttttwtgttttkttttaatcccaaatgtctgaatgttttgcagtgtgtaggggtttgagccccttgttcattctccttcctttttcctcccgcttccctctccatgaagtgattctgttgacaataatgtatactgcgcgttctcttcactggtttatctgcagaaatttctctgggcttttttcggtgttagattcaacactgcgctaaagcggggatgttccattgaataaaagagcagtgtggttttctgggtctgcttctttattttctttttaatgcctgccccgcccggtttttcttttcacataaacttcctctaccaccagcagcagcagcagcaccaaaggtgccttaactttcgttcagcaccaggtccgggggggtgagactgtgggtggttaattagggaagcccaccacctgcctcctgtgtgtggctttggtggtgggagctcagtgtgtgggtggctccacagtctcccctttggtgactagttaacatcgctgagaaccaattttgcccctccttgttcactgctcatttttctagtctctgtcctttgaaggctttttcctggggctcagacgtccacgtttgatgagctccagtggtgatttgtgcctggaagctgccacctaaggccctgggcctggggaggcatcaacactaaaggtcaagccaactaatcctgcctgtcaggcacagagcagctaaaattaaaaccgccaagtggcttttttccttctctgctggtgacttgcagcctgccagcgctgtaggctttggcgggggtcggggggacaggataaagtgccccatcttgtgctttgcaagcacttttcaaagggtcttctgctttttttccatgtcttgggcggcgagtgggtagttactgttagggttccagaaaaatccatgtggagtctccaccaggtagtgaggtcctctcctgggcagaggtgccttagagctgccctggttccacctgcctctccttccttcagggcggctgagggacagtaggctcccccagcatctggctgctggggccagcaactggcctgggctgctttccagctgtgagctagggctggctactgctgtttactggggtgtctggtcccccgtccaggaggcctgtgctttgctatgggtctgccaggcttgaggagccctcagaagcaaggcaggctcagtgcgtttccccagccaagccctaaacttcggctcaccaaaaggaggacatcttttttgcctttgtccttaagtggcagaatgggggcagggcctggggcctggctaccctctttgaccttggcttcacctcattgcttctcccacaagcttggtttccctggtgggctcattgggtggttaattagctctttgaagctctggaagcggcaaagtggcgctatgtgggttttagaaataaaatcaataaatgacttaaccacagcttagctatctcctccgcttctctcccccaggccagctccattcctgtgctccctccctttctgctccctgccgtcagcttttgttaaggttttggagaggaagtggctgactaaggcatcagtctccaaggtgctagaggccctgaaatggaagagacagcaggaaggcttggccctctgaaccgtggcaagcacttgcctctggcagaatcagagagagaaaggcctgcccacctgtcttaagacacctggggtgggaaagcaagccatttactccatcacattgtgacagggctgtgcttgccccaccccctctcctcacgttcatttctgctgctgtagcagcactgtccccgtccctcaaggcctggcaaggcctggcaagaggaatgccagtggggaaaggtcagcytcagggctctgttactgaggttcagccaagggctctggagaaacccaggattggtccaaggaaggaggccgggtttctagttagaaacttagacayaaataacctcgagtgagttcaggttgtaaaagtgcttcagggttcattaaacctgcatacacaacaccaaggaggggcggaggaagcagggaaacagatgagatcgtgctgcccaggtgtgatcatgctgggctggggcatgcagtgtcaccccgggacaaagcctggaaacagtggggagtgatggcatgacaaagacggaaagaagccacagaaaaggtagttggagaaagttaaaaatttcccagtaaaaatgttcctgagagcaagcgccctgggtgcaagaggggagagtagctgggaaaggatggaatgaacttggccttccctgcctgtaagatgtggatggtctatggggatcgggtcctcagtggcaggaacataaagtcttgcaggaaataggggtcaatgcaaagaaggtgtgtgtggccaaagcaggctgccacgattgggctgtgaggtgacggcatggttaacaagctactgcctgcctggcagtggactgccaagaagtctcagctctactcacagcaaccctccaagggacaagtgcgggctgtgaagaaccttggatgccaggccaagctggagtccaagctgtgcttagtggaggatggggatgaggcccaggagctgaggctggggtgcaaactgtgaaaggggaagagaccagacagctgccagcattgtttttttgtttgtttttgagacagagtctcgctgtgtcgcccaggctggtgtgcagtggcgtgatctcggctcactgcaacctctgcctcccgggctcaagtgattctcctgcctcagcctcccgagtagctaggattacaggcatgtgccaccatgcttggctaatatttgtatttttagtagagacggggtttcgccatgttgatcaggctggtctcgaactcctgacctcaggtgatccacccacctcggcctcaaagtgctaggattacaggcgtgagccaccgcgcccggccagcattgttttttaatggtttatgaaacacttcttaagagaaattggaaattaacagaaaaatgtaaggaaaagttgtttgcatccccgtgtctgtggaggtgtattttggtgtttttttcccgatcttttttctctacttggaaatgtggcaggcaccacagaagacagtgtgcccgtgccttttgggggcaggggtagagcagggcttgggagcctggagacctctgtaggacttgaagtttggcccacatactaagccggtgattccagggctgggtctgccatggctcagaaagtgatcggaggccgggcgctgtggctcatgcctgtaatcccagcattttgggaggccaaggtgggcggatcacctcaggtcaggagttccagaccagcctggtccaacatggtgaaaccccgtctctactaaaaatacaaaacttagctgggcatggtggtgggtgcctgtaatcccagctactcaggaggctgaggcagaattgcttgagcccaggaggcggaggttgcagtgagctgagatcatgccattgcactctagcctgggcgacaagaatgaaactctacctcaaaaaaaaaaaaaaaaaagttctcagaaacagcttggctttctccgaaccaggctctcaatagtatcctgcagctgtccaggcttttgacctgcttccttggccttcagaacagaacacccagctcttcccctccaccggcccaccacccgggaggcccaaacagcctttgaactagcacaaggtcctggttcctttctcttaaagaacagcaggatccgaagcctgccctcacaagatgaggaggcagcagctgagaggcagggatttttttttttctcattggagagtctaaatttggtgaaggaatccaaagctcagaaaggtaaagcaaccagcttgaggtcacacagcaagtcagtgctggggccagaacacagcagtgaatgggaggatagccaaagcctccagggaagggctcaaagctgtggggctatgcacacaaatggggtgaggtcctcgaggtacagattaggcacccattttataggccaggtcacagagctggtttacaaaatcctgctcagagtgtggccccaggtggcaggaagaagtgaaagaaggcctctaatcacttcctaagcagtggaatcacagggagaacttactgtcattaaaccagtatgatgatggagtggggaatgcctcagtttctcccaccgccgagggcctataggactacagttcccagggccccgtgctgcaggctagcggcctcccgccaatgctggccagtaacctgagcatccctctccaaaaggtcacttcagggctccttgagggacagcaacagggggagcctagagctgctcagcttcggtgggggtggagtgagggctgtggmcctgcctcacacaacctccctcacaccacccctgcaatgcagggtcgtgggcccctttctcaaagacatccagtggcctctgctagttgcacctcttccgtcaggggacactgacttggctcctgcaccacagcctgcagggggtcctggttccttttgccacaacacatggcctcccatcctggttcagccacygacagacagctccccaatccagcactctgcctgctccttcttgtatccaaccctccaaaaggcagggacaagggacagaagaccatgtgcaaggcctggaggaagtgggtcagcacaggcctgtgaacaagccaggccagtcttggcggcccaagtggagctcacctctccctcccctctcctctcctccccttgccctcaaaatagctccctgagctgccaggccaagaccctcccattgcaggggaggcggggcgtgctgcccagagccaggctttaaatccccttgaggctggggagctccactccttggctggaggcagtgctgaggccgccgtcccctctaccatcagtccagtccggcccgccctcctgcagccatgtcccggcccctgtcagaccaagagaaaagaaagcaaatcagtgtgcgtggcctggccggcgtggagaacgtgactgagctgaaaaagaacttcaaccggcacctgcatttcacactcgtaaaggaccgcaatgtggccaccccaygagactactastttgctctggcccataccgtgcgcgaccacctcgtggggcgctggatccgcacgcagcagcactactatgagaaggaccccaaggtgctgctggggagcctggggtgggggtatgggctgaaggcgctgccngggagctggcgatcttgacttaagtggctgcccctcgtcactctaggttcttgggggtggagaatccaggggtgccaggcacaaggggtgctgggacaatctgagggagaaacctggggcaggagtgggggtcagggagctcagagcaggtgggctggctgcaaagggtcagtgcccactcggagaaggttggagtgggtgctggtgggcaggacggcgcctgtggcctggctgggcccaggtggaaggacacatcagttgctgcatgtatgcgcggtgtgcctgtgcagcaggcggggctggggcagctggggcggcagagatcaagtgtccggtggggtcactggtaaatgtcagcaacctgacacgcctcggtggggagtgggggaggggcgggcagacggcccasgaggggacccaggaaactgggagaccaggcactggcagcatcctagtttctggtgcctctgggtctccttgggattgaggcttgagggccaaggggaactggacagtgcaaggatgggaggtgacagtctctagcccagtctctagccactgtgtgaccttgagcaaatgacttttttctctgggccttggccttgccctcctgctcttggaggcgcttccacatgtcctggcacctgctgggctgtgcagggggaaggggtgcccattctcccgagtacctcagtccctgaagtgggtatggccagcgctatttcccagatgaggagactgaggccaaagagagtgatttgtccaaagtcagaggaatgctgggaccagaaccttaaccgctgggccccaaagcctgagacagggagaaacaaattggggacagggatgggactgctgagcagggcaggcgggccagaggtccaggcgtggctgggcctggctgagtgttggtgtgtggccctgaccccattccctgcccatccgtctctctgggcagaggatctactacctgtctttagagttctatatgggacggacgctacagaacaccatggtgaacctggccttagagaatgcctgtgacgaggccacctaccaggtgtgtgtggggtggggcaagccgtggggactgggggattccactgctgacacttgaccctgaccactgtcaccctcactcctccagcygggcctggacatggaggagctggaggaaattgaggaggatgcggggctgggcaacgggggcctgggccggctggcaggtaagaagacagggccgtgagggtggagtgggccgatggggtcctccttgctgggtccctgacagccacctccctgcacacccccagcctgctttcttgactccatggcaacactgggcctggccgcctatggctacgggattcgctatgagtttgggatttttaaccagaagatctccgggggctggcaggtgagcagccttggctctaacttgtggggtctagtcaggatggggaagacccccacttgtttatcatctctggmaaggtccgaaacagccccgcaagctctgtggaaagcatccttgctgctccccaccccccgacccaaagccagctggtgcccctgaaacaggtggtccgtgtcccactcgatagcccagcagaccaggggcccacctcagagctcctgacttatacttggtgtagggtacaccggcccacngcccccaccctgccccaccgtgcactgtgagtgcctgtactgatactgctggcctttctccctgacctgccttgggtgcagatggaggaggccgatgactggcttcgctacggcaamccctgggagaaggccyggcccgagttcacgctacctgtgcacttctacrgccatgtggagcacaccagccagggtgccaagtgggtggacacacaggtgaggatgaagctgggggtcaggggagcccaganaaggggagggaagagaaggaagcccagagaggaagcaggacccagtgtattttacacctgaggatgctgaggctcagagaggttaagtgacttactcaaagtcacacagctgaagccaggagagactggagacagggacacaggggagccagcctaagtgcagagtctggaaggggagagaggctgccctgctcccccagtgtctccccatgacctggctccactccacaccatgagatttatcaaaggaccatcttggcgacttgagtctgccctgaacatctcgacagcagcagcccagaaasggggacaggagaaaactggagccttccgaaaggaattcactcatcacacagcaagttagagggatcctaaaaccaaaccaaatctagacacagtggctcatgcccgtaatcccagcactttagaaggccgaggtgacagtatggcttgagttcaggatttcaagaccagcctgggcaacatagagagaccctgtctctacaaaaaataaaaaaaatagactggggcagtgggtcatacctgtaatcccagcactttgggaggccaaggtgagcagattgcttgagctcaggagttcgagaccagcctggacaagagggcgaaaccccgtctacaaaaaatacaaaaattagccaggcgtgatggtgtgcgcctgtagtcccagctactcgggtggctgaagtgggagaactgcttgagcccaggagcctgggtgacagagccagacctcgtctcaaaaaaaaawtttaaaaaattagccagggtgctggtgcatgcctgtagtcccagctactctgaggcttcagtgggaggatcacttgagtccaggatttaaaggctgcagtgagctatgattgtacaactgcactccagccagcctgtgtgacagagtgagactgtttcaaaaagcaaaaagaccaaaaactgaaaaccttaaaaccaaaccaggtgtacaaatcccagtttaggccgggcgtggtgacttacacctgtaatctcagcactttgggaggccaaggcaggtggatcacctgaggtcaggagttcaagactagcctgaccaatatggtgaaacccagtctctactaaaaacacaaaaacattagccgggcatggtggcacgtgcctgtaatcccagccactcaggaggctgaagccagagaatcgcttgaatccaggaggtggaggttacagtgagccaagatagtgccactgcactccagcctgggtaacagagtgaggtcccatctcaaaaacaaacaaacaaaaaacaaatcccagttcaggcaatcttcctgctgaagcttcaggtcatcagcccccagatgggctgcagataaaccactaggctttcagaactgagcatttgtttgttgtcctccaggttaagatgcagtgggggctgctggcagtccatgccaggtgcacgtggcaactggcacaagtggctgtggctggaaggcaggagacctggctccctctggtgctgccagcctggctgtgtgctcggggatgggtcccttccctctctctgtgtcaactcccaccctgcaccaatcagggtgactgaatgtggggagggagggcgatgccccttaaaagggctcgcttagaggagtgaatgtacccctggcaccgtggtagcagacaattattgatgtttgctagttatggaaggcggggcagaattagtcaccktgaattagccctgtggtcaaccagagatgagacctttggatggacttgacctctgtgaccccttcagcctggccctgggttcccccagccctctcatgagtccacagtgtcctctagcttttgctcaggccaggctggccagcccagcccccattgctgcagagtggtcgccaacagagcccctcctgggttccgggcttatcacctgcctccttccattttcctcaccaccgtctgcccaggcagggcttatgggtgtcggggaggtgttgagggtgtctttgctctagatgcggtccagagagactatggggtttgctcatggttacccagctcatcgatgctagacaaggacaagagcctgggtctgcagagtgcagggataaagccttgagtcccagccctgaggggagggaggcaattgccagggctggccagctcctgacaggattgcccccsrcaggtggtactggccatgccctacgatacgcccgtgcctggctatcgcaacaatgttgtcaacaccatgcgcctctggtctgccaaggctcccaatgacttcaacctcaaggactgtgagttcatccactggtagccagcaaccccagcttgcccgccggccacgcccagcgcaggccttaccctgtccccacttttgtccctcagtcaatgtcggtggctacatccaggctgtgttggaccgaaacctggcggagaacatctctcgtgtcctgtaccccaatgataatgtgcgtcaccccctgggctgggggctggaagcctgagtccttggcagcaggggtcagggagagctggggaaggacacttgctggtgccctagtcacacccagggcatattgctggccttgtgcatcctgtgcccccacctcaagtcttttgagtgcaaggacacctgagtcctgaggaaactgggttagcgaagggcactttggaggggctgttccctggcgacacccacaacacactcggttcttgtacccctcttcctgacactgtctctcgccactagttcttggtggaggaaaggcccctgggtcccagagagggggccggctcagggctcaggggtcccggtatgggtgggagtccctcctggccacacccaccgcagctttaggccatgcccccaccgccctgactcacgctgcctcatgctgtccccagttcttcgaagggaaggagcygcggctgaagcaggagtatttcgtggtggctgccaccctccaggacatcatccgtcgcttcaagtcttccaagttcggctgccgtgatcccgtgcgcacgaacttcgatgccttcccagataaggtaccatgcgtgtggagggcgactctgtgaccggacagtgtgtgctaggcctctccctccagcctcggcctgcctgccccatgtaatagataagggagyggagactgggagtgtgggagggtcagttgttcaggattcacaatccacaggctcagaacctgggcttccctcctcctcccgccccactccccccattcctcccacccccatgagcaccggcctgcctctgcccacagcccagtcacagaaccgtgctgggctctctgggggcctccaaatggcatagggcagtgaccatagcatggaatgtggtttggagcccagactgacccctccccctaccccaggtggccatccagctcaatgacacccacccctccctggccatccccragctgatgaggatcctggtggacctggaacggatggactrggacaaggtgggcttcagggcccctctgccccatctgatgctctctgcctcggggttcccttcccagtttgggagcgtgggaggatatgaatggagtgaagggatcagagcctgaggccagagggaccgtcctggaacctggcactgcagtgggggggcccactgggatgcgtagtgtgtgaggagacccactgggctgaggtcagcatcctgactgcccaccccgtgtgccaggcgtgggatgtgacagtgaggacctgtgcctacaccaaccacacggtgctgcccgaggccctggagcgctggccggtgcacctcttggagacgctgcygccgcggcacctccagatcatctacgagatcaaccagcgcttcctcaacgtgagtccggaggcttgggggatggtgtgggggtgaggggggacacccagtctgggcctgggagtcggggcgtccagccagggccctgagactctggggcagtgggggcactgggcagagctctgggggtgtggggctggggactggggatgggggttcctgggtctggttctagctctgggctctctgggcacagcgggtggcggccgcattcccaggggacgtagaccggctgcggcgcatgtygctggtggaggagggcgcagtgaagcgcatcaacatggcacacctgtgcatcgcggggtcgcacgccgtcaacggcgtggcgcgcatccactccgagatcctcaagaagaccatgtgagccccgctttccagatcccgcccctctctaggccccacccactcmacgcctctgtcacacagaagccccgcccttcaccgaccactctctggtctctgggccctggcgcctttcacaggtggcgtcattcttacaagcacagcagccccttccagtgccgccctgtcctgagatgacctcctcttacacacagcacccccaaccttccccaggtctgcattccctgccccaggcccctttcagcaagacaccagggtaggggccccagggcagaggccttcattgtacaggggtgagtggtgaccctcgtccaacctcatcctgcagcttcaaagacttctatgagctggagcctcataagttccagaataagaccaacggcatcamccctcggcgctggctggttctgtgtaacccygggctggcagaggtcattgctgaggtgagaggccaccgtagggccagtagagtcaacatgggtccctgcagggatcagctgggtatggtcgtgtaggtggttcactgcatcagggctcccagctgaaggctgaaatccctcctgcactgtgttccccaagcctcgcatccacctggaggagggacaccatcttawttgcatgagggtgctctgtgtgctaatggaggccctggctgtggaggtgaacacagcagagggagtcatccatgggtcacatctgaagtgagcctggaagggggcagatatctggtagggaaggcgcaaggtcatgctggcgttaggaaaaggccaggaagccaggaaggcctgctggggtcaggtggggtcagccatcagagctcaaggacgggaggggaggaaggtgcatggatgccccgtgccccatctgggcggctggaggaggaggggctgggagggcccccagagcagcctgctgggtgaagggggcttggctgacctggaaatggccccttctgtgttgggaggagggaggacatggggatgggcttggctgagagccgtcttcccatagcgcatcggggaggacttcatctctgacctggaccagctgcgcaaactgctctcctttgtggatgatgaagctttcattcgggatgtggccaaagtgaagcaggtggggagagatgcaatgtgggacagctgtgctgtgtggagagcgctggaggggccagatgtctgggtcaggcgtggcaaatagagctcatctctcctgccagcccaggccgttggtggaagttgcctggagtctgtggtgggaaggcatcatctgacctcacatgaacagtgctgacattgattagcaatgtctgccctggtacaggagtggacagaagtagccagtgagcctcctggtagccatcctcctggggctgactggagtgtggactgtaggatttcctgaggctgtggcctgttggtgagcccttccccgtctctgcctccagkaaaacamgttgaagtttgctgcctacctagagagggaatacaaagtccacatcaaccccaactcactcttcgacatccaggtgaagcggattcacgaatataaaygacagctcctcaactgcctccatgtcatcaccctgtacaaccgtgagtggcagccactctaccctgtctctcagtgctcccccgtgttcctgyggcatagtacatattgcccaaccaacatctcctttggacttgggactactcttgggacatggaattatccccatttcacagatgggcaractgaggctaagagagcatagcaagtgattgttcgagtcaggcctacggtgtcccagcccagcctctgtcaggagctactacccagagggaaaggtaggcccactggatccctctcgtttctccacaggcatcaagagggagcccaataagttttttgtgcctcggactgtgatgattggagggaaggtgagargccaggctccagccctgggctcccgtcctttgatatatccaggttgaggtcagcccagctgagttgcaggatagggggtggggggccaggcagtagagctgaccccagactttgtcccctcaggctgcacctgggtaccacatggccaagatgatcatcagactcgtcacagccatcggggatgtggtcaaccatgacccggcagtgggtgaccgcctccgtgtcatcttcctggagaactaccgagtctcastggccragaaaggtgggtgctgccaacagggaccctagggaggctctgactagttcagtctcaggaagaggtatcagtcgtctcttcctgggatacttgtacttgaaagaagaatctggagagggcaatgcttaaaccatgaggaggccaggcgcagtggcccatgcctgtaatcccagcactttgggaggccaaggtgggtggatcacctgaggtcaggagttcgagaccagcctggccaacatggtgaaaccccgtctctactaaaaatacaaaaattagctgggcrtgrtggcasgtgcctrtaatcccagctacttgggaggctgaagcaggagaatcacttgaacctgggaggcggaggttgcagtgagccgagatcacgccattgcacttcagcctgggcaacaaaagcaaaactccgtctcaaaaaacaagaggaaacaaaacaaagcaaaaaccccatgaggatgccctctaatggtggaatttcaggcagtacagggtgaaattaccttcaaatctgcaacagaggtggggaaatccaggttggacctagatggtcaagaatcaacaagaggtagagggcagtgggggtgcggtgtgagagggaggcttggctggtgaagactgggagtttggggtggggcgactctgagtccagctatgcctggggccagcctaatctgagagtccccagctggtgtgagggtcttccctgagttgacttgtccccctgctgccaccccacagtgatcccagmtgcagacctctctgagcagatctccactgcgggcactgaagcctcaggcaccggcaacatgaagttcatgctcwacvggsctctgaccattggcaccatggacggggccaatgtggagatggcagaagaggyrggagaggaaaacttcttcatctttggcatgcgggtggaggatgtggataagcttgaccaaagagggtatgggggtcagggttcacgggcaaaagacacccaggtgtggctgctggagagtggtgctgggagcaagcggcacgtctggaaagactggtccaggcccagcaaggtcttggtcatggccagcaggattctgggaaactttagagggcgcttacagcaaataaggttaatgaaattggaaaagaaagaagtaatatagaactgaaggaaaaggaagagaatattatatcaaccctaagagataatattgtttgggaaatggaagtaaaaaaatccttgctctacgccgggtgcggtggctcacacctgtaatcccagcactttgggaggccaaggcgggcggatcacaaggtcaagagatccagaccatcctggctaacacggtgaaaccccatctctactaaaaatacaaaaaattagccgggcgtgttggcaggcgcctgtagtcccagctgatcgggaggctgaggcaggagaatggtgtgaatccaggaggcggagcttgcagtgagccgagatcgcgccactgcrctccagcctgggtaacagagtgagactctgcctcaaaaaaaaaaaaaaaatccttgctccctgaaagccatgggcaaaagggaaatatgggcacagtagttacaaggggcctatggtcagaaacagttcttcagagaagacattatcctggcattacattaaaaaattttattttattttattttaatgtatttttttttttgagacggagtctcgctctgtcacccaggctggagtgcagtggcgcgatcttggctcactgcaagctycgcctcccgggttcacaccattctcctgcctctacctcccgagtagctgggactacaggcacctgctgccacgcctggctaattttttgcatttttagtagagacggggtttcaccatgttagccaggatggtctcgatctgctgacctcgtgatctgcctgcctcggcctcccaaagtgctgggattacaggcgtgagccactgcgcccggccttttgttttgttttgagatggagtcttgctctgtcacccaggccgcagtgcaatggcacgatcttggctcaccgcaacctccaccgcccgggtacaagcgattctcctgcctcagcctcctgagtagctgggattacagatacccaccaccacgcccagctaatttttgtatttttagtagagacggggtttcatcattttggccaggatggtctctatctcctgacctcaggtgatccaccctcctcggcctcccaagtgctgggcttacaggggtgagccactgcgcctggcctatttatttttatgtttttgagacagagtcactctgtcacctaggctggagtgcaatggcmtgattttggctcactgcaacctccgcctcccaggttcaagtgattctctcacctcagcctcccgagtagctgggattacaggcacccaccatcacgcccaggtaatttttgtatttttgtagagatggggtttcatcatgttggccaggctggtcttgaactcctgacctcaagtaatccacccgcctcggcctcccaaagtgctgggtttacaggcgtgagccaccgcgccctgcttgaatcctgatatcttagcattggagagagattttccatgttattagtcttcaaaaatattttaaatgtttgtataacattccatcctatgagcatgtcacaacttatttaatcaattccatgtggctggacactaaggttaatttccggtttgttaaatattactgtgatgagcaaccttttaatgtctacgtccacatctgatgatttccttaagataattatcagaagggtgatatttctgagttaaaaagtatgagttcttaaggctcttgatacagattgccaaactgctttccagaaagtttctcccagtttacactcccacaacagcttcccagarttggcattaaacactgaaagaagtgtctcctgtgaggcttcactagaaagctggctgtcccatgggcaggagggagctgtgagatgttgtgagcatggtcccgcatgctcagaacgaggcctggaagaaccctctggctgcaggatggagacagtgctggagggggcaggtgggggaccactgtgggggctgacaccataatgcagggagagttgcctgagagtcgcacaagggactagagagtcgcacgagggattagagattttgtggggagygctggtttctggttggaacggttaggttttgagactggcctgtggagcgctttgagccgtggtgggggcgctgagggtcagctgaagggttatctttttttttttttttgagatggagtcttgctctgttgcccaggctggagtgcaatggcatgatctcggttcactgcaacctccgcctcccgggttcaagtgattcttccacctcagcctcccgaggagctgggattacaggcacacgacaccatgcccggctactttttgtatttttgtagagactgggtttcaccatgttggccaggttggtcttgaactcctgacctcctcagatgatccgcccacctcggcctcccaaagtgctgggattacaggcgtgagccaccatgcctggcccagttgaagggttgtacctgttagctgctcttgctgccccagggcaaggccggatatggacttgggctactggaggagaaaagccattttggagcaaacaaactggttaagagacagcagtggcgtgtgggagaaaagagcttgtttgggggccttggctctaacacttagctttctgtatcctccgggcctcagtttcttcattcacaaaggagggatgaaaagctgagcagagaaggggagttgcagggaggccctgcaggggcgatgtggcagccctggggagcagcaggctggacctgggttttgaccctggggcatgggacttctcagcttttctctggaagaggagccaggaacccctttccggggagctgaccacagctctgtcctggcaggtacaatgcccaggagtactacgatcgcattcctgagcttcggcaggtcattgagcagctgagcagtggcttcttctcccccaaayagcccgacctgttcaaggacattgtcaatatgctcatgcaccatgaccggtgagctggttggcccgggaatcactcaggtggggccgcagggcagatcgaggctcaggtgtgtggtggggaagccggacgcgggtcctggtagttggagccaggcgcctttggaagcagcatgaccctctaggtccccggctgtccactgggacagggcaggcttggcccttgacctcatagaacttancctagccccctaaaggaatagcacatgcctatcctttcccctccaggtttaaagtcttcgcagattatgaagactacattaaatgccaggagaaagtcagcgccttgtacaaggtgaggggtcctgggccaggggttggcagggctttggtggccctggttgggatgaggcagaaggtggagatcctgccagcagagtgaaccagagcttccctttgacctgcagaacccaagagagyggacgcggatggtgatccggaacatagccacctctggcaagttctccagtgaccgcaccattgcccagtatgcccgggagatctggggtgtggagccttcccgccagcgcctgccagccccggatgaggccatctgagcctccagaccagaccccaaaccagcccttgagtctgtcacactctcttgggccagccccagcacctcatgcagagggtggggtactggagttagatctctaagcccctcctggaaccctcattttccccactctcaatgtcccagtgtccagcgtgactaaggacacgggcccccttccgtcctcgggctcccggtcccctcctatttatggggtctgaccaactgcacccactccctaataaattcattctccttgggagcctccttactcctctttgttgggaaatatttttagctcttggcgggctcaacagcagccgcgcagtcacccccttatcctccaccctcggcaggtgcgtcccacggcgggacggtgatgggaggtggagggggcgacccgtgggggcggggcctaggcctctccagcccctttcctggcgtcaccctccacgcctctcttcccagtgccgtgtccatactaggtcagcggccagcctcgctggccgggggcggggcgtctgcctgggtggggcccaccggggctgggagccgggacttgggctgaggcttcccggaccacggaggatccgcgctgtcgagggcaggacccaggagggggaggaagcagaggatgctcggcgccttcttggctccgcccttagccccgccctactgcggcgtttaagggtctcttagcaggtggctacactggatccaaagtcgggggagtgttacggcagggaacactcgcagaccgcctagtctaggccctcattatggggaaactgaggaacagaaaggtcctgtttctaagtcttacattaccaagactgaggtgcgggggcggtcctggatcccccgccccaaggctgggaggggcacgcctcggaagggaggtttggggtcggtggtttcacagtgagtgtgtctgaagccaaatggtcggaaaccgttacccgctctcctaggcccggctagtggggaccccaaccgcctgcggctgcccctcccaagttcctccctgttggccaggcatccaggtctccagtctccgagctgcggagaacccaccgccacatgcggctgcccctttccattcgaccctgtggggagccaggcttccggggccccgttcctcctgtgtgaactgggccccccgcccccattcccagacatcaaggccgcgtctccagatagccacgatttcattcctcgctccccacaggtccctctccccaaaatattcccatcttgtcctagcccatcccccagactatctcaaggaccagctgtccccacgcccccgacctccactaggcctgtgccacccgctgcctgcaggaagacgcccggtcccgggccgggttagccccatgggaacggtttgtctcgaaaacaggaacccgagctgggggctgggcggggcgccccttccccaccgcagtccgcttcctgcccctcccggcttcctccgcccgacacccaggcagggcggggggcactggggcgtccgcggttgggggaggggctcttcgtttcggtcccccctccgcgtcccgggcggcggggcctccggtcgcccgccctcggggcagctagtggcgcagccccccgcccgcggccctggcctcccgggcggcgcggcaggggaggggttaagctgccgcagggaccgccgcgtgcggggcgagagggagcccccggtgggggtggcgcagccggcggtgcggagctccgcgcaggggcggaggggggagggggcagcctggcgcgggggcgggggcggggcggcggggagcggggccgcggcgtggagagcgggcgggagccgcagccgcagcgaggccggcgggcgggagcgcacggaggtggggtcggccaggccggtgcgggctccttgcggcaggtcccaagagtgagtgggcgagcgcgggcggggcgccaggcgaaggagggcgcggcccccagcgactccccccccgcccagggcggcgcgggcgggctgggggcggcgagcgggtggggagtctgcggcccgggtctgggagagggggcagcggccacgagagctaaggcgcgctggatccccggagggcggaggacctccacggtgcacccagcttttcccagccaccttccagcggggccctcccccgcgtacccccatttggcagatgagaaaattgaggctcccagaggccaagtgattctcaaggtcacacgaggaagcggtagagccaggcggggacggctctgggtggctcttaggaaaagtccgcctgagaactccgtacaggagctcccctgtcctccagcctgggggagtgagtatgtgtagggccggggtacctttccgtggggcaaggctctgccaaaatctgggagtgaggggagtcagggagctggggccgcagggcgggccctgcaccgcaaatgggaggggggcgacggaatgggcgtgcgcacccatgggggtgtgtgcatgtgtgtgggagtgtacatgcgtggagaggcactgccttgcgtgtgtgcacacgtgtgaggatgtcagcgcctgtgtggccgcgggactcaaggctggcctggctcaagtgaacagcacgtccaggaggcgacctcgtccgcgggtttgcattctggggtggacgagctgggtatgtgtgcctgagggtttcttcgtgcaggtgtgcacagggtgtgggtgccattgtgtgtgagagacggaggatgggaggccggtgcctgtggcccggtgcgtgtaagtgcggacgcctgcacctccacttaggtccccggcctccgacgactaacttgggtgtggagtgtttgcccctgccagggtgcgtatgaccccgccagtgaccggagttgctaatggtgtcatgcacccaccggccacccttggcgcgagcgcccccctctggacaccctgctccgtgcgcgctcacagttcgcctgtgcggggccggggccagggtcaggagccggggatagggaggaagagggcctgtggacaagctgagccgggacccctgggacctttgcggaggtggcctgggagcgctcagttcccaggctgaggcttcccgctgacgcctcctggccgcagcgggctccccccgccccaggaatgttcctctcccatccagtccgcctcccctagggcaggccccctgggggctgccgcagccccgcctcgccttcctgggctcccgggagggggcgaggcgrgcaggacgcctgggttctctccccccacctcccataccagggagaaattcctccgaggtcccctcaggctctgggttcccaaaataaccctgcgggggaagggaggctgtggagggagggaagcgggaggggcgcagagccgagctgcggggtgctgcaggtgcctctggggagagggcgcgaggagaaggcgccctgcggggggctgggcgccagccagtcctgggatcttggttcgtccccatcctcgtgaagcccctcggccttcccgcgactccgagggtgggccggaagcctctctgcgggtccgtttcccaactggcgggttgcaccatcccgggccagaccgtttaaccccgggagtggccgcgggggacaactccgcccctgtccagcagggggcgtgcccgccccgccccgtttctgcccgcggggccgctcccccgcccgcgactccgcagactcccgctctgcctctcccgggacaggggttcggtccgagcccggtgggaggctcccggagcgcagcctgggcccagcccaccccgcgccggcggccatggcaggcaccctggacctggacaagggctgcacggtggaggagctgctccgcgggtgcatcgaagccttcggtgagtggctcgggagggcacacggagcctgagcctagccccgagtctgagcccgggtccctgcctcccaggcacagtccagggcacagccctgacccggacccaccctgctccgcagcgtgcagtctctttaacgaaagcctcctccgcaacgcagggcagagagatgcacgcccttcagacagatgaggtttcccttctctagccttccccagcggcggcgaagggagggccgggtcccggactctgacacttgaggggcattatctgtctcccggggaatccggaggaactcgctatctccggcctgggagctgtttccggctaatggggggcggcttatctggtgaaggggtgccccttccccccaagcgctcaggaaatgacctctggattcttgaccccggggaacccaggctccttccgccccagctggttcccctccggacgatgggcggctcgggcgctcccctcctccagtcctcagggcgtgcctatctctcgcccaccacacctttcctctctaatttgcctcctgctctcggagtcctgggcaagcaggaggtgggcggggtcgagcgtgcacccgaaggaccgatacctggcgggttgcggggtgaggatgaggcatggtagctgcggacccagctcagccacctgtctttgacccttcggagtcagatgactccgggaaggtgcgggacccgcagctggtgcgcatgttcctcatgatgcacccctggtacatcccctcctctcagctggcggccaagctgctccacatatatccttcgccggccttgccaaggcccccgccgtcggagcccrtgcgcagcccctctgcccagcccaggtgcagaatgagcctcgctcctaagtataggccactccttatcccagagctcaggcgtcgtcccagcctccaactagggcctaggctctgccccctccttgctcctagcgactcggtcctgtccccaggctctgtccccagccgaggccttgccctccttctccctagagtctagggcctgcccctgcttcaggcttgggtgcgccccgtgcatctctctctcccagagcccaggctttgctttcagcctccctcagcacctagtcctccacccccacctccaacccctcccagagctcaagcctcacccccagcatctccgcagagcgcaagccccatccctagaacgtgtctcctagaaccaggccccgcccccagcctccctccacgcaggcctccctttctagagttaagcggcctccttaaccctctccttcacctaccaacaatcccggaaggacaactccaattccctgcaggtgaaaacgtgccacctggtcaggkgagtctttcccctggggctctagcccctcccctttctcccttctctctggcttcaggctggcctggaggagggggcagggcgctgtttctgggagtgggtttgaaccctggcttgtccgggtgggcagtgctgccacaggctcaccccttcctgggtctgggccttaattttcttttctgcgcagtgcgggtggttgtctcaagggtctaatgtacacttggagtggcgaaggaaagagctggaaccatagtttgagggtctttttgcttaggtgactataatctcaaatagctccttgcagcctgctgggtgatggtgggggaagggctatcttgggtgactccccgctcctccaggtactggatctccgccttcccagcggagtttgacttgaacccggagttggctgagcagatcaaggagctgaaggctctgctagaccaagaagggaaccgacggcacagcagcctaatcgacatagacagcgtgtgcgtggggggagcacagagggctgggggggcactcagtatcctataccatctgtgcttaataaatgtctgttgaactgaatgagtgagggtcatgttgctctctcgcttaaaaaccttccatggctccctattgccttcaacatgcctcctctgggcagcttggcgttcctgcctcatcttccactgccaccacccatcccacacacctcctcctgtagctgcgctgggtcggctccccgtcggctgagctctcgagtcctttctcatcatggtgctctgctcatatcatcccccttgctgcctcctccgtgttaccaagactcagttcaggcatgaagtctccgtgggctctgagggttcggggctcttccggggtagaatttgtcgttcccacctctgttttccatggcactttgtacagactcctgtacaaagacctctgtacatgtgtcacgctgttttgtgatcatgtgtttctgtgtctgtctccctcagtagactgtgagctcctcgagggcaggaaccgtgtcttactcatctctgta

SEQ ID NO: 95137 - DNA, 22269 bp, Homo sapiens
  misc_feature (1)...(22269): n = A,T,C or G
tgtaccctcatacatcatgtccctgtctggaatgccctgctgtgactgaccatctcctcacccccgtcatgacaacatcccactcatccatcaaggctccattcaaatatcacttcccctgtgaagccttccttgactaacaccacctgctccattaacgtcctttcagcaaccacagcactctatatggattcgttgggtggtcttatcacactctttgtttttctttttctttttttcgagatggagtctcactctctcgccccaggctggaatgcaatggcgcgaccttggctcactctgcctcctgggttcaagcgattctcctgcctcagcctcctgagtagctgagattacaggtgcctgccaccacgcccggctgattttttgtatttttagtagagacagggtttgaccatgttggccaggctggtctcgaactgctgacctcggatgatccatctgccttggcctcccaaattgctgggattacaggcatgagtcaccatgcccggccatcacactgtcttgacttagtttatgtccattttgctccatagattatacatttctccaaggtaaatttaaggtcctcctgatttctgaaacctcagtgttctgtccttggtaatagtaggtactcagtaacatgggatgataagttaaacccagcttgatttattcttggctcttaaatcttatggttttagagggacagtagtttggatgttgaaatgaaaaaacgacagtcctggctgggcacggtggctcacgcctataattccagcattttgggaggccgaggcaggcagatcatgaggtcaggagatcgagaccatcctggctaacacggtgaaaccctgtctctactaaaaatacaaaaaattagccgggcatggtggcgggcgcctgtagtcccagctactcaggaggctgagggaggagaatggcgtgaaccggagaggcagagcttgcagtgagctgagatggcgccactgcactccagcctgggtgacagagcgagattcagtctcaaaaaaaaaaaaaaaaaaaaaagaaagaaaaaaagaaaagaaaaaaggacagtcctatggaaagaaatggaaagaaatatagaacctgtctaggcagtcagaagccaggccccagtgctgatatgaaatcagttcaccagcaaatagcattcagattgccatgcagtgtaggaggaaagtttaaggcttttcttggtcttctttttaacagaatagggaaagaaaaacccaacaaggattgcaggagactctggcctctgatatcactgatgtccagaaacaaggtaggtcctgggaaatttccatttattctcctttaataatcaccctttcccttgtagttctctgataygtagagcagcacagagctgagtctgggtgccctcagtgggtaatgtgccttgctcccgtggaggtgcttgttagccatcctctggtctgggggcctgtcctagagtaatagaagccccccagctcccagaaggagtgaagggaggtagggcatgcccttcctctgcttctgatagtgaagttatgctctcactatttcaaaacatttccgagtgaggtgataaactttatagaaatgttgagagggttgtgtttcccttttctgtactgttggagaatgatctcttccctttgaggcattagagttaatattgaagttgcaaatggatgctttgcaagggctgggaatgcatgtcaagctattgccctccctacttgctgatcttttacccagcatgaggattcagtgtggactgcagttatcacagaaacagggatgtaggccagtgagtccttcaacaacttgtcattttatgtgaagacataccagccagagtgcatggctggaacttgagctgtgtaaatatcccaggagcttgactgaaaatactctgaggtcagaatagcatcttactgagctgagatgaaattgggaaggtcagaacaaacaattcatctggctttaaagaactcttggcgtgagactgcctctggctcatactgggtgtttggccttctactcacatgaaaacggcctatggacaaacatcttgctcctgcctgattgttttccttacagattctgagtggggacacagcctgccagggcgaattgtcccacccctgcagcacaactcacctccacctaaggagcgagcagccaccggcttctttgggtttctaaggtaagacagcttctgtccggcatcagactcgagatccagctcagagcggctcattgagtctttcagggaaattagaatagaaaagaaagcagattacttacagaggcttctcacttatgtctaggatagatgatggaaatgagattaagaacaaaagccctaattgtgcatttaataaagactgtgttttacttatttttacacaacccacctccaccctgatgtgtccaggataaagccaagccccataaacattaacttgggccaggccgggtggctcatgcctatgatcccagcactttgggaggccaaggcgggtggatcacttgaggtcaggagttcaagaccagcctggccaacatggtgaagcccatctctactaaaaatacaaaattagccgggcatggtgctacatgcctgtgataccagctacttgggagggaggctgaggcaggagaatcgcttgaacctgggaggtggaggtgaggctgaggcaggagaatctcttgaacctgagaggtagaggttgcagtgagccgagattaaaaaaataaaataaaataaaattagccggatgtggtggcatgttctgtaatcccagctactgggggtgctgaggcaggagaatcactttaacctgggaggcagaggttgcagtgagctgagatcgtgccattgcactccagcctgggcaacagagcaagactctgtctcaaaaaaaccaaccaaacaaaaacattaacttgaacaaagtctattcttagtttacttgagccattcagatgatttggttaccaaacatttccattctcccctctgaatctaggttgtgtttgcaaaggacagttagcaaatgtctctctctgtctctctctctctctgccatcccattgcaattctgtttctttatttccccctcctgagtataatctaatttgggtaccttttcaaatgctattcagtcttgaatttccattcaatggttccccagagcaaaaatgccctagctagtgaagcactaatgggaaatggggagaagggaaggagacctcatagagtctcagcctactctgttctcattcttgcagctctctcttcccgtttcgatatttcttcagraagagcagccactcttgagccttccaaatgcagcgctggaaagaggatcatctcttgtagtgactcctcccgagccattcttcctccaactctatccttttcttatgacacttcagtcgtggggaatgaggtccccatgctgagtcctctgtggttttatcgtgtcctttgcccctttataatagattttttcccccaatttaaaacattaagaatggaactttctaaaatgttcatgtcctgagggccggtttaggccttttgtcttcggcacttaggatcctaatgacaataaattatttatgaagagttattgattgaatttagtggaatagagtaaaagagaacaaatgcttccctcaagatacagagaaaatgcatgaaacttccctaggtctacctggttactattcacaggatcactttgggtaggtgagtttgtgccagaggttagggaatggggtctttcaagactcactgtcctgagccctgctcacccaagagacctcttccccagttccagtttggccccaaatggttgcctctccatagacaaaatgtttcccacctctctatccctttaactgtttgacagtaatgcagattcgtttatcagattaactggaagtcaatccaggttggcacccctggagaaggcctggccacctgagctgccttcaactaaaggactgatctgtaatagacactttagcctcatgtggccgtggagaaccaaaatgatctatggaaatgtagggaaactcattttagctcacaacaaaggagtcactttttacctgttagagatgtccaatattagaatgggctacctcataaggtaatgagccttgtcacccaaatgctttaaacagaagccatcatctgtcacatgccagagggtgcccctcaagagtgggagagcaggggctgaactgctgagttcccgctgcgtcctgttgctatgctgcctgcacccttggtggggagaagagaagaggtggactgctgcggaggacctggcaaacaaggacccaggtcttgaggggatgggggctgatggggaaaccgtagggtgtgggaatttaaggattagtgacattagtaacatcacttcctctcaaattgcgtttacagcctttactcgactgtcccaaacatggcctgttttacaaagctgctaagaagcacagctccaaatctggagctgtgagtgcccgccctgactctgactagcttacagtgaagctttgggaagttgttttccgctgagctcttattttctcatccagaaaatgagggggtaggatttggtgagttataaagtgccttctagctctagcagtctgtgactggccctgctctttctgagcagatcagtgaggcaatgaccccaaagcggggctgcccagaatcaccacaggcttcctttggctctccaccttgccccaacccctctggccactgctgcctgggggtctttctccagcttgccacattcttgctcaagtgtagtttagcaccatggatggacagcagatttgaatttgaaatcagccctaacattaactagctgggtgacttttagtaactttctttctttgagccttagttgcctcatctataaaaccagagttggacaaatagatcagctttgctggggttgataacttcaggccctttcaggagtcaggtccctgttattccagggctaggggagcactccagctcagaacgttactctgtagcacaggatgcgaatcatccactgataccgtggccatgcaactstgaaacagacagcaacccccaaacccccggccctgccaccaagcacatctcaggagacctccactggtataatttcccttgtccctaagaatctccttccccaatccctttcctttgcagttagaaaaaggcaagcaggactgagtttagtggttttaaaattaggggtgtggccaggcacagtgtctcatgcctgtaattctagcactttgggaggcctaagcaggcggatcacttgagcttagcagttcaagaccaccatgggcaacatggcaaaatcctgtctctacaaaaaaatacaaaagttagctggtcatagtggtgtgcctgtggtcccagctactcaggaggctaagggggaggatggcttgagtctgggaggctgggaggtggaggttgcagtgagccgagataacaccaccacactccagcctaggtgacagagccagaccctctcaaaataatagtaataaataataataaagttaggggtgatcaggccctgaacagggaaatgttctgtccaaggtcacagagcaaagagaacccaggtgtccacaactcagccaagagtcttgacccctgtgtcgtcagctgcacacacgctgcacactccaccagctcctaggcttctctccacatctgacttatcgaggcctgggctgtgggtagctttttggacagaaagaagcagaaagcagcaggagctgctctccgaggaccgcacctcaaagagcaagatcccccaggtgggatcgctctgaggcttcaggcaggggaggctggtttgaaagccgatctccaagagggcgtggctccaaaatgctggcaaataaaagcctggagagccagcaccaagctggagaccagcaggaggcacaggaaaactgcaagccgctctgttcctgggcctcggaagtggtgagctcgctgaggcaggaggagctctggggagggtctgggaatgtggacgagggccctgcaggccaagatggggcagatggagggaggaagatgtttgcgctccagatggcgaagaaaattccagggaagggagaatcactgcacagagggctgacacacaggtcctttccagagacagctgctcacactcacacccatacacacacacacacacacacaaaggcagatacagggaaaaggcagcaccattcaggcacacctcacctgtcagaccagccagccctggctcactcacctggaatgcagtatttaaagaactcgccatcccacctgcacacccacgtagagacatctccccactgtgtttcagatgcctatggcgtcccctcaaaccctggtcctctatctgctggtcctggcagtcactgaagcctggggccaggaggcagtcatcccaggctgccacttgcaccgtgagtacctctggnaccggagggctaggagcagtggaggttctgggtgggagcaaagagctgvgtggacggtggggcaggcagcaccctaaagggccccacactgaggcacaggcaacgggagctggggcgaggcaaaccttggcagaggcgccgtctactgcttgcctatctccttctagccttcaatgtgacagtgcgaagtgaccgccaaggcacctgccagggctcccacgtggcacaggcctgtgtgggccactgtgagtccagcgccttcccttctcggtactctgtgctggtggccagtggttaccgacacaacatcacctccgtctctcagtgctgcaccatcagtggcctgaagaaggtgaggagggcccgggcccggtggatggacgctggggtcgcgggaagaccagagagatggagatcctagacagccctgagaaaggggactgcagcacggactcccctctcccgcaggtcaaagtacagctgcagtgtgtggggagccggagggaggagctcgagatcttcacggccagggcctgccagtgtgacatgtgtcgcctctctcgctactagcccatcctctcccctccttcctcccctgggtcacagggcttgacrttctgktgggggaaacctgtgttcaagattcaaaaactggaaggagctccagccctgatggttacttgctatggaatttttttaaataaggggagggttgttccagctttgatcctttgtaagattttgtgactgtcacctgagaagaggggagtttytgcttyttccctgcctctgcctggcccttytaaaccaatctttcatcattttacttccctctttgcccttacccctaaataaagcaagcagttcttgaatttctctctttattaagtctacccccagccacggaaagaggagtagaccatgattactgtgaacccccccttaccccaggacactgtgaatctcttcttgcctgtgccctccccctccccctgcccaataaataaaaaggggacaaggaagtacacagcgagggaagggaggagtgtgcacccaggacagtgtctgtgtagagggtgagctgggcgagaataaatagaccatggaccccatggtggggataaggaaggacctcgcattggccaaggcaggggcaggcgaggcgctgagtgcccttgcccaaggccaggagcagagggtgggagcccgcctgcagctggagcctagctttgcggggcaggggaagatccctgatggcagcttcctggtcaagcttgcccttgtcaagtcctgccacgaggggctgagcattctgttgccaagaccaccattgcctctcctcgtctccccccagtgaaagctgggctgggcagggagtcctcagaagccactctggcaaggccaggggtaggtgtgtttctctctgggcccctggacaggagaagggatagagggactgacagctctgggtttagcttttccccttctgaggtgctgtctagctctgacccccactggcggccacctggggtgtaagccgctggaggggggcctccttggccccctgggtcccctgtagccggcgtagccgcagctcctccagaccttgccataactcctgacgctcctgggccttctgctgctccctggggagagagggtgaggcagctccctttcctggggccccccacagtccagactccctcacagtccagactccctcactaccaccccaccggcaaagggaaggcatggaaccatttttgttctgtgactccataaaarccctctactgagggaagagagcagaggacagacagatcccagcctgcagtcacrgagaagatgacgggtggggcctgagtggttctggcttctgtaggaagctacagggagtcagaacaagtctgagctactcgaagaatgacgggaggatacaggggcagacagtcaggcataggatggcaggagcatggacagtcttgcagcatctgatcagacagagtttggggtagtcctcgggttccctccagccatgggggtctgaytcctccctgctcttctcccttcccccacgcccagcccccaacactcactgctgcttttccagcttgtaggaggctgtgagctcatcaaacagcttcccattcatctccatgaaggtcttgagcacattgtagatcagtgatacgatggttcttggcagtgtcaaggagggatgaggagatgaaacagctttggtttgcccacctctccctttccctgcccttcacatacagcattccacctgaacacaagcactgcccactttcctgtccttttcaccacccctgggccatcttttgatgctttctctgatattctccagctaggagtaaccctggggtcgggtctggactggctggccctggtcccagtttctgtgagttaggtcatggcctggcactcactggttccagtgctccttggagacttggtagagggtcccaaacacagcaggcagcacagtgtggcagttgtcctcaatgaggcttaggatatactcattgttccagaaatacagagcccgctctgcaacctggggcagacaagatggcagagtgattaactggcagtggcttctctctgtgtgcaaggtctggtgtccatcactacctcaacgcccaggccccctgaccttcacacaccccaccttcagggcttatctgagccctggaggaagcaacagtgttgaagggaaaagagttctagatacggaatccaatgctgcggggtgaatcctaaccactacagactctactatgccatgtgaccttgggagaggcatttaacctcccagcctcagttttctcatctgtaaaatgggctaataatacctatctcaacaggatgttataagaatcaaatgagatactagacttttaggtgtttaatgaaccgaagtgccagaatcactgtgaggaagacttgacttccactgggttatggcccataagaacgggaggaagtctgcacatgcttgcagcagaacatgagttagttagctgggttggtgcggggaagcctggctgcatcccaaarcgagtctaatgaaatctaaggccactagcaaaaggggaaaagtgataacagtcctccatcacattctggatcacacttcagtttaccaaacatgtttacactcacaatctcttccatccttatccccaccctgtgaagaggttgttggcccattttacagctgcggaagcttaatcagaatcagagtggtgcagtgatttgctcaaggcccctcagccagtggaaggcaggtccgaggcttcaccctaggtctcctgaccctaagtccagcatctccccattaccagacccgggattggaggagaaactgagggcaaagggagctttattaggtcagctacccaacctttccaggccagccctgctcccatccccgcctgtcctgcctcatacctggaaatgggggctggaaacacagcgagccacctgcttaaaaaggggctcctggatcttcacaaactgggagggctcgatgacatcaagaatctcttccatctcccccagaaacatcacctgggtgggttggggaggggagtagggacagaggggcagcagctcacatctccccctacacatacacacacctgactgccttctagaggccgagccctcccagcctccctctggcgggcatcaaagcccttcttcatacctccttctgggtgcaggtttttggccagtatttgagcagcccccggatcacctgtgggagatgagacaggagtcacgcctgcagaggtgagaggctgccttagcccccagaggtactcacgtgctctgtcagagtggcatccttctccaggaactgcaccacacagtatgccagctgcagggggtgacaggtggagggaaggaagacaggtcaggaaggcaccaggcgccaaggacttgctgtccaggacagaatgccaaatactgctcacccacggcctgttactttcttattcaccaagcatttatcacctgcctaggatgtaccaggcatcacattcagtgtgctgggaatacaactctgatctcgcggggagtggggacagtcaacaaactcatctttataaattttgcmaaaggttccataatatggctagtgtggtggctcacgcctgtaatccaagcactttgggaggccgaggcagcagaatcacttgagcctgggagtttgagaccagcctaggtaacatagcaagacactgtctctacaaaaaaaaaattttttttaattagccaggcatgtggcacatacatctgtggtcccagctactcgggaggctgagaagggaggactgcttgagcccagcaggtagaggcttcagtgagccatgttcataccactgctctccagctgaggcaacagagtacggttttgtctcaaaaaaaaaaattgtgtatcaaaatctcccataatagatttgtgtatccaaatatttgggaatatagatggagaagaatgtaattctgccaagggagggtagagaagaaaagcctggcttcacagagctgatatctgaggttagccttaaagcgccagtgggaattttctaaggtagatggaacagaattataaagacaaagaaggtgagataggatccctggaggatctgacctccaggacccactggctgccctgactgtctggagctcctgctgcagcagggacaggcctgggcctcacctgggcatggaagacagacagcgacttgacagagtgcagggggatcaggacgcgaaccaggaactgcttgtgctccgtcttcaggggcagcgcaaagccattgatgatgctraggaggaggcagaagagaggaagagggctcaggtgacctggccccagtccctccttccagaatcctgagctccagctgaggcccagggagaatcaccttcctaggatctccagcagctcagccacaccattgaagtgctcgaattcatagatgaacctgcaagagaagaacgcaggtgggctcaaagcaagcagggtaggcccagtgcccccttaggcatcctgcctgcccaccctcacctgcacggcacgctcatccaactctcccccaacccagaggctgcgctcccttcccaacatcccaaaccaggccccattgagatccccgyccccccacactgaaatgcccttctcagcccagccacctctgccactgagtcccaagctcaaggctctcttgccagtcaaccaagagaatgacaaacacttagcacatctactccgtaccatgtaagtctcagaattatccagggagatggggcttaagaaatccatcacatggatgaagaaatcaagactcagcggttaaataaaacaaccccaatgttaataggcagggaatctmatgaactccaaggtgcaggaggacagggatcatggctcacccattttgtagctaataacaactaatgtttcagagtcccggcctcagtccaggagctatgctgagtgctttgcaggcaaggccccatgtcacctcgataatggtccctgagttagtacaagcagcatccccatttttatcttatctttgagatggaatctcgctctgtcgcccaggcaggagtgcagtggcgcaatcttggctcactgcaacctccacctcccaggctcaagcgattctcctgcctcagcctcctgagtagctgggattgcaggtgtttaccaccacactcagctaatttttgtatttttagtagagacggagtttcaccacgttggccaggctgatcttgaactcctgatctcaagtgatctgcccacctccaactcccaaagtgctgggattacaggcatgagccactgcacccagccagcattcccattttaaagacgagcaaactaggagagagcttaagtaatttgccaaagttcacccaaacgttggaaccaaactcaaatgtaggccatacagcttcagagccatggtctcaactacaaggccacgtgagccttgatgcccagtgggtgctggtgctcagtgcatgtttgcagaaagaatctctctctgggtccttatggcctggcatgataagggtcaaatgatttagctcctaggcccctggactgacccagtccctgcaaaccatttcatctctcttggcctctactttctcatctgtaaaatggaaataaatacccattctctgtcaacttcacaggctttgtataatcaatatgtaatacgttactgagaaagggcttggaaaacagaagttctacaagggcccctgcagcccaggagcctttgctgcagtcttctttttttttgttttsttttctttttttttttgagacacagtctccccgttgcccaggctggagtgcagtggcatgatctcggctcactgtaaactccacctcctgggttcatccgtctcgctctgtcgcccaggccggactgcggactgcagtggcgcagtctcggctcactgcaagctccgcttcccgggttcacgccattctcctgcctcagcctcccgagtagctgggactacaggcgcccgccaccgcgcccggctaattttttgtatttttagtagagacggggtttcacctgggttcaagtaattcttgtctcagcgtcccaagtagctggaattacaggtgcccaccaccatgcctggctaatgtttgtatttttattagagacggggtttcaccatgttggccaggttggtctcaaactcctcaccttaggtgatccacccacctcggcctcccaaagtgctgggattacaggtgtgagccaccgcacatggcctttgccgcagtcttctaacagccctctcaccctccccaggtctctgctgggcaggcagcagccactcaccggaggaagatgtggttgcactgtttgcggatgtaggcccggagacccaggaacttgccatagacccggtgcaggatggtcttgaggtactcacgctcccggggatcctcactatcaaatagctccaggagctgtgggaaccagagtcagggtcagggtcagggtcrggggaaaggtccaccccaggttgcttccatcctatccctggcccctcagagagcctgcccctgccttgtggtaccacccagcctgggctccccacttcaccatcaggacaaacttttgatccacatatctcttggccacggagggctggaagtctgggctctccaagaaacgcaggaaaaactcatataccagctgggggagggggacagacaaaaaggwgagttcagtaacagcctcacccactcattccaccctatggccctcatccaactgtctaggggctaaggaggccctctccccatgccttggatctcttctgaaacttggatctctgtcttccccaacccttcagacctgcaggtgtggccacgaaggctcaagattgggctcatcctcttcagggtcaaattcagggttctcactgggcggcagagtccggaagatattcactgagatctgagtggcagagttggggttcattaaggaaaagcccttgaagacagaagccagggagtctctcattcaaagctttttttttttttttctttcccaagacagggtctcgctctgttgcccaagctggagcgcagtggtacaatctcgactcactgcaacctcaacctcccaggcaggctcaagcgatcctcccacctcagccttctgagtagctggactacagtagcacaccactatgcccggcaaatttttamatttttgtagtgatgcggtctcactgtcaggctggtcttgaaccccttgcctcaagtgatcctctcgccttggcccaaagtgctgggattacagatgagagctgctgctcccggccctcattcaaagttctaatgggttgatttcagcatctgccccagcaagcagttcattccttgggcaatcatcacctgaacgcctagttcgtgcaagccctgggccaggggctgggaacccagsrgtgaatgggacacatccctgccttctaggcaggtgcaatccagtggggagaacaaggctagaagctgtgaggtctacgggcaggaaaagrgagatttccagcttggttattgacagcggcttcttggcagaggcggcacctgagccaggccatggatggtatggggtgtggggcagggcactccaggtctcaggcaagcataagcaaaggtgtggacgtggggcaggcccggaggcattcagtgggtgttgggcagcagcaggtcggggggaaggaagwcgtggactgaggccaagccgatgagtacagggttattctccacgcaggggtcctgcggacaggaaacggggctcacacgccctctcggccggccctcggagcctgggtggcaggtgctcaccatgcggatgatgtctgggtagacgggctcgatgaggacaccccgggtgctccccacacactccaccagctcgttgagggctgcccgcttcacctccttccccttgaggtcggccacacagtccaagaagtcaaacatcaccccacactgggccagcttccggctcagcagctcgtgcagctcggaagccggcacatctggggaggagagggcatcctgggcctgggccccagctcccccagctgccccagctgtgggtggggcagaccctcctaatctccacggctgcctctgctgcccccaggccccatgctcttgtgccatctcctgctccttgcagacagcaaacaactactgtcccttcctccattcctgggggttgagggttgcttttcttcctcctaatccaggctcagagagtatgatggcctgagttttaaagcaagatcacaaatcctggatgcagcagctttccacaggtgccccaaacagctgctgcctccctctcaggtggcaccctgttctaagggccagaaatggggaggggttcagggccaaggatctctacggtgtcctcaggcttggccagtctggccctatggcccaaggctggggaagggacctatgtggtgatcccagggaaccctgccaagcgcctgctccagggatctggcagctggctgggctgatagtggccccctggaacccaggctatgggccccacccttggccttggtctgcccctagggtggcaccaccttcggatgtcccacctcyaaggatgacaggccagtcaggccatgtgtcagcagagagggctggagggctggggtcagttctgatggcggagaacctagcctggaggggtatccaaactctctctcttggcagctgcccgctgcctcccacccctccccatggccctgctggtcccctcgggggttcggttcccccagtggccagcagccagctcacctttgagcaggggcagcggtgtgagctcttgctggttgctctgatagcggaactgagaggagctgtgggagcggcggggccgggctctgcggagggaacggcgggagaagccgtccaccttgtcgggtgggggcacaggcgacagcccgggggaggaggggctagtgggggtgcttgcagggggcagcttcgtctccatggcggtcaggcggcagggcaagctttcagagccccgggggttctctctgggcctgggaggtgctgggtgagactggacagactaacttggtcccatcctgtccggcctttggggggggggcacaaccacagtcctgggcccccccccagggcctcctgcaactgcccagtcctggggggcagacagggtagaaaggaggatggctcaggcctcagatccttcctgggggtcccgaagagtccagttagggttcccaccctggctcttttgaaaacgaagtcaggcagaaagatcagcaagaaagagacagagaaagcccatcagttcctcaggagagccgggaggctgcgtggagtgcccaggtcttttccctcctatccttgcccagaccctaaaataggggtgcagccccctcccatcctggacatgtccctcccttctctcagacagaaagcctccaaaacaacccctcccagaatagggcctatcccccaagccagccccgactcagaatggagccccgatcgtcatccctgcccctttcagaatggaacgcatcgctgctccactaatcccggccacttgggacaaccccaagactggaggtgctgtcccgatgccaccccgctcctagaacctggcaccctcccccacctcagctcctccttcctggccccccaaacctcatggggtgggggacactcacttctcgaaaacctagacttcggtcgccaacccccgggctccgggggggcggctagagcatgcccccaactcagccccgggccgggactgggcgctcggcgggctctgcaccggccgtcgcagcgcgcggatctccgctgaagtcctgggactccgacccaacgcggtgcagcgcaacgggagccccggctcggctccgtgcgcaccggcacccgccgcccagctgctcaggatgacatcaagtcacctccccccacccggcccgcacctccccgcgggctgaaagggggggctgcgtcaggaaggcccggggccgctgggagatgtagtccccgcgccgtttaaagtgagctgccagaccaaaggggacacccctgagggcagactcgggggtgaaggccgaagcttttgaagccagagagcagagtgggatgggctctagccgggggcgggaagcctggattctagaagggaggctgcatagggaaagaggagggcttaggagtttgcaccaggaaagtagggtgatgccaggacactgacaggaaggagtcgcagcaagctacgctaggcccacagatttggcctgggccttctatgccctaggccatccccccaggaacctcacccttaccccagaaccaccagacacttcagaaaccccttggaaaccagcactggactagttaaaagtctgcgatgagtcagtgcttgctgggaggggtgtggtgcacccaagcctgctgggagatgcagtccatcctcaggcctgcagtccccctcccgtcccttgctgtctatggtgacatcatggtctccrgtttaaagggccagtcttggagtggcaaagcccgagaggaggaggttttctccttgagctgccacctcatcccaggcagcctggccttcccggatggacctttcagcccccctggaccctaagatgtgctgggtgggtcagtgtctcttgctcaaaatcctgctgctggcatgcaaggcacaggtgggagtccaggagtttggcatgctaaccaaaagttcccagcctgcagtcctgggcccccgtcctaggatcctggaccccaacactctttatagccctgaactccatcccgctacactgctgtgaaatctccaccctgaaatgttgcctggatgagcagctggtccatggtgagcagtaggaaagggtgatgagaccagataatgaggtcggggaggggactaggggccttttcagagtctgccccatcttgctttgggtcttggtgaccactcagtgctccagcggaaccacccagccatcctcccggttgcagaggaagcctgggtgcgcaagaggtgtccgcctaccaaagcaacagaaggcagaggcctgcaccgagggccgcagttcaccaggctggggtccaggactccggcactggagacccagcaagtgctctgcttgctcaggaacctccggcaggccttgcccatccggcccttggtgtccctgtctgtccaatgggaatccatgatctccctccttgcccacctcccaggctcttctgcatccctgaacaagctgagggagggcaggcccacagagcctctgcagccaggcaaggaccccaaggcctagagaggagaagcgccttgcccagtgtcacacagcgtgtcatcaaaagttggggccaggggccaggcttccacctcccagctggctacagcccatctccacaagccccctgggtaccagtgccctggtctcaaggctagactgaccacagaggactggtgttttatataaaggaagtgctaaggccaggtgtgatggctcatacctgtaatctcaatactttgggaggctgaggtgggaagatcacataagcccaggagttagaggctgcagtaagctgtgattgtgctgtcgcattccagcctgggtgacagagaccctgtctcaaaaacaaaacaaaaaacagagatgttccatttgagaaatggggcactgaagagtagaggagagggataagactcttggaagaaaaaaaaaacttttttttttttttgagatggagtctcgctctgttgcccaggctggagtgcagtggcacaaactcggctcactgcaagctccgcctcctgggttcacaccattctcctgcctcagcctctcgaatagctgggacttcaggcgcccaccaccaagcccagctagtttttttgtatttttagtagagacggggtttcaccgtgttagccaggatggtctcgatctcctgacctcgtgatccgcccacctcggcctcccaaagtgctgggattacaggcgtgagccactgtgcccggctgaaaaaaaagacttctgaagtggtggcatttgaactgggtctcaaaataggcacagtgtcacttggaggatgcaagattgaacattttttttttgtttgttttttgagacagagtctcactctgtcacccaggcttgagtgcagtggcaccatctcagctcactgctgcaacctccacctcccaggcccaagcaatcctcctgcctcagcctcccaagtagctggaaccacagatgcacgccatcatgccaggctaatttttgttttttttggtagagacagggtttcgccatgttgcgcaggctggtctcaaactcctgagctcaagcgatccattcgcctcagcctcctaaatgctgggattacaggagtgagccattgcacccggctttattttatttttttattttttttttgcagtggcgcgatcctggctcactgcaacctctgcctcctgggctcaagcaatcctcccacctcagcctcagtcccgagtaactgggacctcaggcgcatgccaccactcctggctaattttttgtattctttgtagagacagggttttgctatgttgcccagactggtctctaactcaagtgatcctctcgccttggcctcccaaagtgctgggactacaggtgtgagccaccatgtgtggcttttaccacaatttaaacgaaatgcatcacgttgtgttatatgcaacgacagatgtatgttcaaaacaaaaaaaagtcaccaatttcagttgtacaatccaacagtattgtatttatagatgaagttccatgtatttatagatgaagtttgctttttcaggtgtgttccagatccccctgttctcctggctgcccctgagctacctggaggagctcctctggcctggacacccagttccctgccagctgcctgggatctcctccctccagctccacccatccttgagggatggcctctcttcctccatgaaagcccttccctctgataaaacccaagctctccacccaggacagagtcaaaagccgcagcccccgggccacctctgtgatccctttctcaccccagagggtgggccatccctgggggragggagatactccttcagggcccctgaggtctgaagcacacagtttgcctgatgagttttcacctaatctaaggtgggaaggatgccccccsgcctgggcaaagcctggccctccccattttctctctatggggaggaatcctgaccccaaacttcccctgacctcttgactggaatccagttgtccagtagaagaagcccctaaatgcagtgcccagggccagtgtatttgttagaactgctggacctaggccaggtgcaggggctcatgcctgtaatctcagcactttgggaggcagaggcaggtggattgcttgagcccaagagttcaagaccagcctgggccacatagtgaaactccatctctacaaaaaatagaaaaattagctgggcatggtggcacgagcctatagtcccagctactcggggaggctgaggtgggaggattgcttgagcccgggaggcagaggttgcagtgaactgtgatcatgcccctgtactccagcctgagcaagaatgaggtactggctcaaaaaaaaaattacatatatatatatatatagaactgctggaccgaaggctgggcgcagtggctcacacctgtaatcccagcactttgggaggccgaggcgggcagatcatgaggtcaaaacttcgagaccaacctgaccaacacggtgaaaccccatctctactaaaaacagaaaaattagscaggcgtggtggtgcacgcctgtaattccagctactcaggaagctgaggcaggagaatcacttgaacccaggaggcagaagttgcagcaagctgagatcgcgccactgcactccaggctgggagacagagcgagactccgtctcaaaaaaaaaaaaaataactgctggacctaaagtggggcttgggacttcgttgcagaatgtcccatggggttcccaacaccccatttcctcccaagagaatatcgtcccctttactgtgcgaggattttttgctcactcctttagctcctactccgaggctaggttggagaatgactgtctctggagttggttttctacagagcttgtctggggaagtatctttgtgtcctctcagtcctgtctaatcttctgctgtggtacacacatggcactgggaactggggctcaggaatggacctgcaggcaccaacccctaagagacggatgtgcccaccagttcagttacaacagacagatgtgagtgcagcctgaccctggggtctccctcactggaggagagcaaactcccagagtggctccaggggcctagaaaggataacttttcttggaccaagagaatatccccttctatccccaccacctttggaaggaggagaagtggtgttttttcttttttctttcctttttttgtttttgaggtggagtcttctctgtcacccaggctggagtgcagtggtgcaatctcagctcacggcaacctctgccccccgggatcaagtgactctggccacctcagcctcccaaaaatgctgggattacacgtgtaagccactgttccaagcctcttttttctttttatgatttctgaatcttaatgctttttcattcattcgctccgcagcatttaggcacgtagccttggtctcctctcccttaagaatggggatattaatagaacctccctcatgagcatatggtgaacagcagagcagatgagatcgtgcacgtaaagtaacaagcccaaggcctaggacatcacacaggcttaattcatggtggcaattatatttactattaattttttttttagacaagatctccgtctgtcaccgaggccggagtgcagtggtgcattcatagcttcactgcaacttcaaactcctgggctcaaatgaccaaaggcacacaccaccacgcccggctaattttttgaaacatttttttttttttgtagacacagggattcagctatgttgcccaggctggtctcaaactcctgggctca

SEQ ID NO: 95138 - DNA, 28409 bp, Homo sapiens
  misc_feature (1)...(28409): n = A,T,C or G
aacctggagacaccgtctattcatagacattgttgttaacctggagacattgttgtcaacctggagacaccatcaattcatagacattgttgtctacctggagacaccgtcttttcatagacattgttgttaacctggagacattgttgtctacctggagacactgttgtcaacctggagacaccatcaattcatagacattgttgtcaacctggagacaccatcaattcatagacattgttgtctacctggagacattgttgttaacctggagacattgttgttaacctggagacattgttgttaacctggagacaccgcaattcatagacgttgttgtctacctggagacaccatctagctggagacgccatctgtccttagacatcctcatctacctggagatgtccacacaaggctgctgcccactccccatgccaatctcaagccccgggtgcttcagaccaattggctataaattgaggttcctaacccccatatttgggtcagattaatttcctagagcagctcacagaactcagggaaacatgtttacccatttattataaaggacgttacaaaggacgcagatgaagagatgcgtaaggggaggggcgcagagctttcaccccacaagggcaccccgtccaggaacctccacggctctctgagccctgtccttttgcgacttcatggaggcttcattacccaggcatgattgattacgtcactggccactggtgaggaccgccttcagccgcctctcccctcccctgcctggaggttggggcaaggctgcaagtaccaccctctactcctgctgaggcctttctgaggacyagccccatcctgaggctgcctccaggctgccagccttcggtcaatatcagcacaaaaaggcacttgccactttggctactccagggattttaggggtttttgccaggaaacgggacgagaccaaatatgttaatgtatatttcacaatgtcacacgcacatggctgtgtgtgcagaggccaggcagggagagaggacagagcagctgggaggccccggggggcgtagacccatcctgggactaaacccccatcagatccttctggcacccctgcaaggagaaggtgtggtccccctgactttctccccaggggctcatctcgaaggaggcctcccggctgcacggctcccacaaggccaagaggaggagatctgaaatcggctccactccctcccactgcagaccctatcacctcctccactaggggtgtgagcttttggctggtgggagggcgcccgggagggtctctggaaagatgggaaccgggtgttaaagacctgcttaagcgagttatacccagaggccgtcagttcctgcccgagagcacatggcccacagtcacaggtaaactgaggcctggccctaagccctggggacctccacctgcttcgtgacgctggggacagtgtgtacgttttcctgcagggttcaggtgatggcagacggcagagggcagcagacggcaggctggcactggggggccatggaacccactggcagggacgctgggtgaggaggacctagggaccgggatgagacaagctgagggtgttgggcagacatttcttactttgtattttgatatagtaatttaaacaaacgtacacaaatgttgcaaaaatagaacaaaggactccctgtgctctacgcggactcaccagtcgctttgttctggcccatttgccggttctgtagaagcctgtagttccaggcaattgagactaagacacgataccccttcacctttcagatacgataccccttcacccttcacccttcacccttcaccctttaccccatcacttcaaggtgtgtttcctcagaacgtggaagctgtctgttacaaagtcaggaagctgacgtggatacaataatattactaatactcagcccgtgtgagcgtgttgttggccgtgtgctgtgtgtacgtggaactctctcccgtggtctcacactcagcccgtgtgagcgtgttgttggccgtgtgctgtgtgtacgtggaactctgtcccgtggtctcacactcagcccgtgtgagcgtgttgttggccgtgtgctgtgtgtacgtggaactctgtcccgtggtgtcacactcagcccgtgtgagcgtgttggccgtgtgctgtgtgtacgtggaactctctcccgtggtctcacactcagcccgtgttaggggtcactgtggcctgagcacagctggacgggagccagagagctgtccacggcaacctgcaggttttcaatgctctgtggactcgaggtggcactttttgtttttgttttgagttaagaagacgtgcacagatgtgaaaggtgggcggaaacaggacgtctccctcctgtcctggccgcacagtcctgatctgtctcccaggctggagtgcactggcaccatcacagcttactgaggtcttgaactcctgggctcaagtgatcctcccgcctcagcctaccaaattgctgggatcacaggtgtgagccaccgtgcctggccaacctcatttttaatggccttagagtcttccatggcacagggtggagactgcccattacatagaccctgagcgaggggccctgggcattcccggtccattgggtgtagaaggagctgccgggagctgttggtgggcacagatgtccctctgtgcaggagcctctgyggagccacgtggaaggcgcgtgtcctgtgctcccgggcctggctggtttccagagcggtgctgccagtttagactctggccgagtgcctgcaatgtcagaggggtggacgggttgtctggggctggtttgcgtttcccttacgccgaggttgaacacttcactccatttacagcaatttcactttccacgttttgtgaagtattgatttgcatcctttgcctatttttcttttaaattatacatctttttcttaatttataagatctttaaaatattagagagatcagggccaggcgcggtggctcacgcctgtaatctcagcactttgggaggccgaggtgggtggatcacgaggtcaggagatcgagaccatcctagctaacacggtgaaaccccgtctctactaaaaatgcaaaaaattagccaggcgtggtggtgggcgcctgtagtcccagctacttgggagactgaggcaggagaatggcgtgaacccgggaggtggagcttgccgagattgtgccactgcactccagcctgggtgacaagagtgagactccgtctcaagaaaaaaaaatatatatcagagcgatcagacttttcactgtgacataagctgcaattttgttttctgttcatgtttggtttttgactcctttgatggtggtgtttttttccatgtgaaattgttttgtgtcattgaatttatcactgttgtgctggtagatgtttaattcgttctctaagaagaaaaaaacagtgcttcaggagacaggttttgtggatttctggggtgtatgcttgcccctcacggcatgtgtgaagccaccagccctgtccttgagcctggctgggggcgagtggcgcagggctggatttcacctagaaaggcctttcacatcccaagagtcctgagaatcagacactttcagccctggtttctcctagtgcctctgtggttggcttttccttccgtgagagtgtttgattatttcatatggtgtaagatgctacgtagagaccgtccctcccatttttgtttccagatgctgctaatcagttgttctaataatttgtggaatgcatcaatgaattgtttttccctgaggtgtgagagccaagctttcttttcttttcttttctttcttttttttttttttttgagacagagtctcgttccgtctcccaggctggagtgcaatggtgtgatctcagcttactgcaacctccgcctcgccccccccgaccccaggttcaagggattctcctgcctcagcctcctgagtagctgggactacaggcacctgccaccacgcccagctatttttttttttttttttgtatttttagaagagatggggtttcactatgttggccaggctggtctcgaactcctgacctcaggtgatctgcccaccttggcctcccaaagtgctgggattacaggcgtgagccagtgcgcctggccgagagccaatctttcatcccaccccagactcctgagtgtgactctatttctggactctctgttctgccttggaactgtgtgtccacaccgggttcagtggctttgcagtgtgttatgtgtttagtaagtcatgccagcacccgctgggaatcctttttagtcatcatcctgggctgggtgttgggattcaagcctgtaatctaatcccggcactcaaggaggccgaggtggggggtttgcttgagcccaggagttcaagagcagcctgggcaacattgagaaaccccatctctgaaaaacatagaaaaaactccaaaatagttaactgtggtggtgtgcacctgtactgtggtggtgtgtgcctgtagtcccagcgactcaggaggctgaggggggaagactgtctgagccagaggtcgaggctgcagtgaactgtgattgcatcactgcactcccgccggggcaatggaaggagactcagtctcaaaaaaaaaaaaagccctgtccagcctttcttggtgatgtgatgcttttccaaatggacttgaaagtcagtgtgtccaccatgcgactgcaggttagtttaggaggaactcacgtctttgtgtggtgttgagcctctccatccaggaacacagcgttccacacaaattctcccagcgttccacgcacatggaccctgctcagcgcccggcccctggggctgctattgtcgagggcctgccctctcccaggagctccaacgtgattggtctgcggagaggctccctggtggttgacggcccacccagccgacctcccgaggtcgctgtgagcccccagcctggccctccccacgaggtgctggccttgggtggcagccttgcttccttgtttcaggggcagcatcactgtccgttatctactgctgcagaacagatcgccccaaagctcaggggcttaaaacaacacagatgtttattttatttatttatttgttttgagatggagtcttgctctgttgcccaggctggagtgcagtggcgcaatcttggcgcactgcaacctccacttccttggttcaagcaatgcttctgcctcagcctcccgagtaactgggactacaggcgcccgcccccacccctggctaatgggacgtttattttaaacatagacatctaacagctgggcgtggtctaggtgggagggttaggcctggggtctccctgagatggcagtaaggctggggctgggactcgagctgcaagtgggctggaggcctcagctcctctatggggcctccccacagggctgctgagggcccagagccagtccagagagccaagagccaggcgtgctgactctgggacccggcggccacttagccattcctgccatatcctggttggtgacagaagggacttggggtcccagcagcaccagggccacgggcaggtcctgcctgtcaggggacccaggcttccaggtcagctgtgcctggatttctccaggggctgatggtggagtcaccagaccatcctgccgtccagggccgggcagggtctcaccccttccgcctggcacatcatcggggcgtctctggtgtgtgaagggctggacggggcgtggggccctggaggggtgcgggaaaggacccccacccccagccgcctccgccttcgacggcgctggcccttcagggaggggcgtcctctgctcgctggcgcttcccgaggttccctcgcagcgggggccgagctgtcgctggaggcggggcagggcggggcggggcggggggcggtgaggtaatttccgcgatcagcgtcagtgcccgggccagaatcgaaactgagagctcctgggcaggctcggcagggcaggcagctccaggagggtgagcgcgggggtcccagggtggaggggcgggggcgcrggggtccaggggcggctccaggagggtgagcgcgggggtcccagggtggcggggccgggggcggaggggggggtccgggagggtgagtgcagccgggggcgcggagtcccgggagccacagacccagcccggggcagtgcagcccgtccaggaccagcaccctccgcagcaagacccagcgctgtggtctctgcacccactggagcgcaggattttggggtctcggctcccgtcctttctggatggcagactcggatgttttctcagaggggtccgcggggagtgccgggttctcatactgaagtctgcctccagtctgttgcttttaaacttactcttcttgtagcatcccagctgcggtggggacccggggacccatctcttcctggcaccctgagctctggtgggcactgtaccctcctctccgtgaggcccctccccaggtgcagatgtggagtcctcttttcctgggggccagtggtcattcaatagaaaaggaggtgctgtgtccttagaagagtcaggagcctgaggccctggggtgcacaggacccctggctggggcagaggggtgcggcctcctgggggcggcactgtgccgagggctctgccccctccagggctccacaagcagtcaccttggctccttctaggtggggcctgagacccttcaggagggagggtctggctgtgtccgggtcagtgagccctgtactccctgacaggacacagctactgccaaggcctccacttgggcgtcagggtggggagagtcccaactccttgcttggtggagaggcctctgcttgggcatcaggataggcagatccccagctccttgcctggtggagaggccgtgcttctgagctgggcctggaccagatgtcctctggcctcagtctcacctgctccttctgtcgcaggcttcgaaccgtggccaacagttccagtggactgcgtggacccgtgagctcaggagcctcagacgcctccctggagagccaagctggtgttcgaggtggcgcctccagggtccaccctgctgcccaacagccccgcggccaccagagggccgtccctggcccggctgtgtgccctggtggacctgtgtctgggctgctcccgctgcacccagcggctcaatgaaagcacctacgtcctccgtagggtggagcatgactgctcccgcgagatcctgctggcccgctttaagcaggccaccaagagcaaggtctggcgcgtggtgggctgccggcccaccttcccaaggcccctgtgctaccaagtctgccactactacagccctgggctcggctgccggcgccaccgaaaccggtgcacctttgcccgcagtcgcgaggaggccctggtctggaccttcgagcgtcagcacaacctccagcgcctatggctgaaggcggaggtgcagggcagcggggcccagggaggggcaggccgggcggccgacgccatccttacggagtttggcggccgcttcgagctgctttgctccctctgcttcaggcgctgtcccccaygcatctgtcgcgtggacccccaggggcagtgccctgagcacggagcctgcccctccctcctggcccacgtgagcgccgagggccgccgcaagcaacagtttgtggtggtgaggccgcggccccgggccggccagcctcctgcctactgcaggtttgtggggcgtgggcagccgtgctggcgtggggagtcccgctgccagtttgcacacagygccgtggagatggctgtgtgggaggccgagcagctgggtggcctccagcggggggacctgctcacaccccctgcccctgatggcgacgggygcacggccccccttggccagccccctggggcccagctgtactgcccggcctgcttggtcacctgccactctcaggaggccttcgagaaccactgcgcatcctcggagcacgcacagatggtggccttcgaccaggccctgccctgggagcaccgttccccacccccgggactctccaagttcgagctctgcccaaagtaaggatactcgaggcaggagcttggagtagggcaggagcccaccataggcagaaccagaggttcccaggagcttggagtggggcaggagcccaccacaggcagagccagaggctcccaggagcttggagtagggcaggagcccaccgtaggcagagccagaggctcccaggagcttggagtagcgcaggagcccaccacaggcagagccagaggytcccaggagcttggagyagggcaggagcccaccgtaggcagagccagaggttcccaggagcttggagtggggcaggagcccaccgtaggcagagccagaggctcccaggagctkggagcggggcaggagcccaccacaggcagagccagaggctcccaggagcttggagcggggcaggagcccaccgtaggcagagccagaggttcccaggagcttggagcggggcaggagcccactgtaggcagagccagagactcccaggagcttggagcggggcaggagcccaccacaggcagagccagaggctcccaggagcttggagcagggcaggagcccaccgtaggcagagccagaggttcccaggagcttggagcggggcaggagcccaccacaggcagagccagaggttcccaggagcttggagtagggcaggagcccaccgtaggcagagccagaggttcccaggagcttggagyggggcaggagcccaccacaggcagagccagaggttcccaggagcttggagcagggcaggagcccaccacaggcagagccagaggttcccaggagcttggagcagggcaggagcccaccacaggcagagccagaggctcccaggagcttggagcggggcaggagcccaccgtaggcagagccagaggttcccaggagcttggagcggggcaggagcccactgtaggcagagccagaggctcccaggagcttggagcggggcaggagcccaccacaggcagagccagaggctcccaggagcttggagcagggcaggagcccaccgtaggcagagccagaggttcccaggagcttggagcagggcaggagcccaccacaggcagagccagaggctcccaggagcttggagcagggcaggagcccaccgtaggcagagccagaggttcccaggagcttggagcggggcaggagcccaccgtaggcagagccagaggctcccaggagcttggagcggggcaggagcccaccacaggcagagccagaggytcccaggagcttgkagcggggcaggagcccaccgcaggcagagccagaggctcccaggttcagtggacgggggcctccctgccacctgctgagggctaaagccatgtggcctctgaggwcccggataagggaggttcatgtttgggaactgcttgagccaggccttgtcccgggagcacaggagtgggtgggacgaataaagcccctgctccctacagaggccagtatygggctgargggtcccggcctttgaactcagcacggcggctgtgcctctgtgtagccctgcygacctccctgtcccccaggcctgacctctgtgagtatggggacgcctgcaccaaggcacactcagcacaggagctgcaggagtgggtccggcgcacgcaggctgtggagctgcgggggcaggcggcctggcaggacgggctggtgccctaccaggagcggctgctggccgagtaccagcgcagcagcagtgaggtccttgtggtaagtgggccctgggagtgggtggggtggggtggggtccaggcctcttgctgaaggctagacttccacgcagctggcagagacccttgatggagtgcgtgtcacctgcaaccagcccctgatgtaccaggcccaggagaggaagacccagtayagctggacgtttgccgtccactctgaggtgagcggagaacagctccgactgggcggagggagccctggggaagtggtgacttcagcccgggcagacgtcracagcctgggtcatggagctaataccgaggcactgccgctcagcacctgcgtgacctgcagcaggtcccttagcctctctgcctcagtctcctcacctagagacagggggccaggacagtcccaccttggcagggttattctatggagtatatgggttaaaacaaggatttggccaggtgcggtggttcacgcctgtaatcccagcactttgggagaccgaggcaggtggatcacctgaggtcgggagttcgagatcagcctggccaatagggtgaaactccgtctctactgaaaaaaaaaaaaaaaaaaaaaaattagccaggcatggtggtgggtgcctgtgatcccatctwctcgggaggctgaggcaggaaaatcacttgaacccaggaggcggaggttgtagtgagttgagatcgcgccattgcactccagcctggcgacaagagtgaaactccgtctcaaaaaccaaaacaaaaacaaggattcaccagggtctggcacctggaragkgggtggtgaggcctcaagctgcccacactgccccacgggacatccacaggggccccaggagggttcagccacccccatgtagcacaggaagaaactgaggatggcagaggccgggtggcctgcttgcrttctatccaggaagtggcagggccaggacctgaaccctgcacttgggctacgctggccaggctgcctctcgggagggttggggggagccctgggcccccctcaccgtctggcctcctctccaggagcccctgctrcacgtggccctgctgaagcaggagccaggagccgacttctctctggtggctcccggcctcccgccaggccggctctaygcacggggtgagcgcttccgtgtgcccagctccactgccgacttccaggtgggagtgygtgtgcaggcygcctcgttcggcacctttgagcaatgggtggtcttcgactttggccgccggccggtgctgctacaaaagctggggctgcagctgggccaggggcgtcgcccaggaccctgcaggaatctggygctcggccaccctgaggagatggagcgctggcacactggcaaccgccacgtggtgcctggcgtggagcggacggccgagcagacggccctgatggccaagtacaagggccctgccctggccctggagttcaaccgcagcagcgtggcctcgggccccatctyrccaaccaactatcggcagaggatgcaccagtttctctatgaggaggaggcggctcagcagcagctggtggccaagtgagctgggggcaacaggagcagctgggsyagcaggagcrgctggggcaatgggagcggctggggcaacgggagcggatgggggcgtggacttggcagcggggctggcagctgtggccccatgagctgacccaggccatcctgccaggctgaccctgcggggccaggtgttcctgaagacggcattgcagacgccagcgctgaacatgctcttcgcgcctccgggagcactgtacgcagaggtccccgtcccctcctccctgatgccagacacagaccagggcttcctgctgggccgggcggtcagcacagccctggtggcccctgtacctgcacccgacaatacggtgttcgaggtgcggctggagaggcgggccagctcagagcaggcgctgtggctgctgcttccggcccgctgctgcttggccctggggctgcagcctgaggcccgcctggtcctggaggtgcagttccagattgacccgatgaccttccgcctctggcaccaggcagtggacacactgcctgaggagcagctggtggtgcccgacttgcccacctgcrccctgcccagaccttggtctgtcccacccttgcggcgtggcaaccgcaagcaggagctggccgtggcgctcatcgcgggctggggccctggggatgggaggcgtgtccccccgctactcatctatggcccctttggcaccggcaagacctacacgctggccatggcctccctggaggtcatccggaggcctgaaaccaaggtgctcatctgcacacacaccaacaggtaagcccgagcctggcctgcccccacctcacctgacgcccggcccaagtctacaccgggcaggcggtcaccccctggatgtgctccagtcctctgattctgcactccctgtagccgaccagctttgggctttggctttatcaggcccagctcagggcaccgagggtggccgggtctgctgtcaggtgaggagctgggtgcctctgccggggccctggcccaaggagagtgtcacggggaaggctgcagcatggcccacccagsacttctggggatgagtcttgtttttcgtttttatagaaacacagatctttgtcctaaccacaaggttcccctttggtttatgtggtttcctctggttcctgccaccaccacctccccaggccggggccttcccatccctgcccagtggggagtgggaggaagagcctgggacagtggccatacgtcccrggctgatttctggattgggggttctggggaccagggaggtgcaggtgtctgcagtgtcagaggagccgctgggctcgcccaggtgttgcctgaagccctccgtggcctcttgccccttggactcctgacagsagggacaccagtgtttgctgctcacytctgacagccagacaagggctgtgctcaggggcagctcggctgggcacacagtaggtgctttagcggacagcactgaggcccccagcaagaagcccatgagctcctccccctcccgcagtgccgccgacatctacatccgggagtatttccacagccacgtcagcggcggccaccccgaggccactcctctccgtgtgatgtacacggaccggccgctgagccagacggacccagtcacgctgcagtactgttgcctgaccgacgaccgccaggctttccrcccgcccacacgggcagagctggcgcggcaccgcgtggtggtcaccaccacctcccaggcccgtgagctcagggtgccggtcggcttcttctcccacattctcatygatgaggcggcccagatgctggagtgygaggccctcaccccgctggcctaygcctcgcacggcacccgcctcgtgctggcgggcgaccacatgcaggtcacaccccggctgttcagtgtggccagggccygggcggccgagcacacgctgctgcaccgcctcttcctgtgctaccagcaggagactcacgaggtggcgcggcagagccgcctggtcttccacgagaactaccgctgcacggacgccattgtcagcttcatctcgcggcacttctacgtggccaagggcaaccccatccacgccaggggcaaggttccsccccacccccggcactacccgctcatgttctgccacgtggcgggcarcccagaccgggacatgtccatggcgtcctggctgaatctggctgagattgcgcaggtcgtcgagaaggtgcaggaggcctacaacacctggcccagctgctggggcggccgygagcagaggtgcatctgtgtcgtttcccacggtgcccaggtgagcccggccagcccgggacagcccccgaccgcacccctgctgggggagggggagctctccggctgatggacgagcccccgcctcagtttccccatctgtaagagggggctgcagtatttgcctcccagggctgaggtggggctcggcccctgaggtgtctggagcttggtgggggtgccstctccttgtcgggggtggcccagtccycactgmgtcctgcgytcatccccgagcttggtgggggtgccstctccttgtcgggggtggcccagtcctcactgmgtcctgygctcatccccgagcttggtgggggtgccstctccttgtcgggggtggccsagtcctcactgcgtccagcactcatccccggccctgctgcgtcttcaggtcagtgcactgaggcaggagctgaggaggcgggacctaggccaggtgtctgtcggcagttttgagatcctgccaggtgggtgaccagcggggccaggtgctgccagctgccccaggataccccgggtggctcggcccactcctcagcctggcatcggcaggggtggggctggtcccaccgtcttgcrcacccagcctgacctgactgcgtgccccctgcagggcggcagttccgggtygtggtgctcagcactgtgcacacctgccagagcctgctcagccctggggcactggcccctgagttcttcaccgacgcccgcgtgctcaacaccgtcctgacccgcgcccagtcccagctggtggtagtgggggacgccgtggccctctgctccttcggggcctgcggcaagctctgggagagcttcatccgtgagtgygtggagcggcacagtgtctgccccgagggcctgtccatggagcaggtcgagcagggtgtggcgcagagacggcgctggcctccccgaggcacacaggctggggcagcggggaactgggaggctgccccagagccagtaggggacctggccgaggagcaggcggctgtggtgacggccatggtgaaggcagagccgggagatgaggctctgagcccagcatcccgtgacatcacggcaaccacagcgcagacggaggctgcggcagcaccagcaggagacgcagtgaaggaagacgtggtgcccggggcctgtgcggcaggagcggctgctgcagcgggcgtggagtccacggaggctgaggatgcagaggctgacttctggccgtgggacggggagctcaacgctgacgacgccatcctacgggagcttctggacgagagccagaaggtgatggtgaccgtcggggaggacgggctgctggacacygtcgccaggcccgagtccctgcagcaggcccggctgtacgagaacctgcccccggctgcgctacggaagctgctgcrcgcggagcccgagcggtaccgccactgctctttcgtgccagagaccttcgagcgggcgtcagccatcccgctggacgatgcctcctygggccccatccaggtcaggggccgcctggactgtgggatggccttcgccggggatgaggtgctggtgcagctcctttcgggagacaaggcgcccgaggggcggcttcggggccgcgtgctgggcgtgctgaagaggaagaggcacgagctggcgtttgtgtgccgcatggacacgtgggacccgcgcatcatggtccccatcaatggctccgtgaccaagatcttcgtggccgagctgaaggacccatcgcaggtccccatctacagcctccggaagggccggctgcagcgtgtggggcttgagaggctcaccgccgaggcccggcacagccggctcttctgggtccaaattgtcctgtggcggcaaggsttctactacccgctgggcatcgtccgggaggtgctgcctgaggccagcacctgggagcagggcctccgcatcctcggcctggagtacagcttgaggktgcccccgtcggaccaggccaccatcaccaaggtgctgcagaaataccacacggagcttggccgggttgcsggccgccgagaggactgccgcgccttcttgaccttcactgtggacccccagggcgcctgcaacctcgatgatgccctcagtgtccgagacctgggtcccaggtgcgaggtggctgtgcacatcactgatgtggccagcttcgtgcccarggacggggtgctggacgtggaggcgcgaaggcagggcgctgcgttctatgcccccggcagggagccagtgcccatgctgccggccagcctctgccaggaygtcctcagcctcctgcctggccrggaccgcctggccatctccctgttcctcaccatggagaaggccagtggccagctgaagagcctgcgctttgcaccctccgtggtccagtctgaccgccagctgtcctacgaggaggcggaggaggtgatcaggcagcacccgggtgccggccgtgagctgccggcccgcctggactccgtggaygcctgcrtcgtggccgcgtgctacttctctcggctgctgcgccggcaccgcctrcggtccgactgcttctatgagcagccggacgaggacggcaccctgggcttccgcgcggcccacatcatggtgaaggagtacatgattcagtttaataggctcgtggctgagttcctggtgggcagcgagtgcacgcggacggtcacgcctctgcggtggcagccagcaccccgcagccagcagctcaaggccctgtgtgagaagcatggggaccgggtgcccctgtcactgcacctcggccaccacctgcacggcggcgggggcagtccccccgacacgcggctgcacctcctggcctccctctggaagcaggtccagtttgctgcccgcacccaggactacgaacagatggtggacttggtcaccacggacgacatgcacccattcctggctcctgcaggccgcgacctccgcaaggccctggagcgctcggcgttcggccgctgcgcccrgggccaccagcagcagggcggccactactcgctgcaggtggactggtacacgtgggccacctcgcccatccgcaggtacctggacgtggtgttgcagcggcagatcctgctggcgctgggccatgggggctcygcctactctgccagggacatcgatgggctctgccaggccttcagcctccagcacgcacttgcccagagctatcagcggcgggcgcgcagcctgcacctggccgtgcagctcaaggcccagcctctggacaagctgggcttcgtggtggacgtggaggcgggctcccgctgcttccggctgctcttccccagcaaccgggagacgctgcctgacccctgccccgtcccctacggctccctgcagctggccgagcacccccacgccctggyaggccggccgggcctgcggctcctgtggcggcgccgtgtctactcagcgcagggatccagcccgcccctgccactgcctggcactgtgccggacccacacaccckggccgtggagacggccctgtggaagcagctgctggagctggtggagctgcagcgctggccggaggcggctgctctcatccaggagaagggcgaggcgtcccagcggcgggagctggtgcaggtgcagcggagccactgtggccatttcctggaggtggcccgggagctgggcagtggggacaccytgcaggtgcagctcggcrccagcctgcagcacggcttcctggtaccgagccctcagctctggacggtggcaccgggcttcagcctctgcctggagcacgtggagcggcccggagactgcttctcaggccgtgtgtaccgggccccgagggaccggtaccgcgacgtggatgagtacgcctgcgtgtgggaaccattctgcgccctggagtcggccaccggcgcggttgccgagaatgactccgtcacacttcagcacctgagtgtctcctgggaggcgtcacggacgccrcaggggcagctgcagggcgccttccgcctggaggccgccttcctcgaggagaactgtgccgacatcaacttcagctgctgctacctctgcatccggctcgaggggctgcyggctcccacggccagcccacrcccygggcccagcagcctcggccctggcctgaatgttgaccccggcacgtatacctgggtggcccacgggcagacgsaggactgggaccaggagcgccgggcagaccggcaggaggctcccagacgggtgcacctcttcgtccaccacatgggcatggagaaggttccggaagaggtgctgaggccgggcaccctgttcaccgttgagctgctgcccaagcagcttcctgatctgtgagtggcttccaccagcagaggctgggctgggggaccgccccgggcccctcacttgcaggaggggggagctcgtggggcagcagcccctttcctgggagtcctgttggttttccagtgtctgccttcacccccagccgcaaggaggaagccgtgcgtggactagaggaggcgtccccgctggtcaccagcatcgcactgggccggcctgtcccgcagcccctctgcagaggtaggtctgccccacccctccagcttcccctctggcccccagccccaccctgcatgagtgctcagggaggctgccccctctcagtgatccccagcaggttcctggagcggcagacctacaacatccccggaggccgccacaagctgaaccccagccagaacgtggcggtcagggaggctctggagaagcctttcayggtcattcagggcccaccaggtagggcccaygccgggggagccgcaggctgccttgggccacagggacccacagggtgggctacaatctcctattctctggctgcaggtacagggaagacgatcgtgggcctccacatcgtattctggtttcataaatcaaaccaggagcaggtgcagcccggaggccscccccgtggggagaagcggctggggggtccctgcatcttgtactgcggcccctccaacaagtcggtggatgtcctggcaggtgcrccggggtcggcggtgggggcctttggggagctggcacgyggggcaggactcacgtcccccaactaccctcaggactgctcctgagaaggatggagctgaagcccctccgtgtgtacagtgagcaggctgaggccagcgagttcccagtgccrcgtgtgggcagcaggaagctgctcaggaagagcccccgggaggggaggccgaaccagagcctcaggtgtgcctgctgtctttggggcttgggcggagtggggccgagctgtccagacagtcctgtgtaggtgggtctcactgagctctgcccccgtgatggccctgcgtggacagggctcactgtgtcctgtcccccaggagcatcaccctgcaccaccggatccggcaggcccccaacccttactcgtcggaaatcaaggcctttgacacccggctgcagagaggggagctcttctccagggaggacctggtctggtaagtggcaggggccagggggtggagctgcctrcagcatgggggccctggggtgacaagcagtgtccccggcaggtacaagaaggtcttgtgggaggctcggaagttcgagctggaccggcatgaggtcatcctctgcacctgctcctgtgcagcctctgccagcctcaaaatcctggacgtgaggcagatccttgttgacgaggcaggcatggccacggaacctgaaaccctcatccccctggtgcagttcccacaggccgagaaggttggtcrgcggggggtgtgggcagcatgagcaggcgtccctggcacagtctcccacctgnggtgccctgtgtgtgcagacgygggtgtcgtgtggggctggggtccctctgggtctaggggtgtcagggccaggcctgcctattcctccaggtggttcttctcggagaccacaagcagctgcggcctgtrgtcaagaatgagcggctgcaaaacctgggtctggaccggtctctgttcgagcggtaccacgaggacgcacatatgctggacactcagtaccgcatggtgagcccgccccactcagcccccagcccacctgcagcccctggggggccacaaccccgcgtggcagcctctgaccagcgcacatccttgcctgcagcatgagggcatctgtgccttcccctctgtggcgttctacaagagcaagctgaagacgtggcagggcctgaggaggccgcccagtgtcctgggccacgctggcaaggagagctgycctgtcatctttggccacgtgcagggccaygagcggagcctgctggtgtccacggacgaagggaatgagaactccaaggccaacctggaggaggtggctgaggtggtgagtgtctggtgcctgtgagtcagggagggctttctggaggaggtggctgaggtggtgagtgtctggtgcttgtgagtcagggagggcttcctggaggagggcaggagagacaccagggtccgctccacctgccccctcggctcctcaggtccgtatcaccaagcagctgaccctggggaggaccgtagagccccaggacatcgccgtcctcacgccctacaacgcgcaggcctctgagatcagcaaggcccttcggcgagagggcatcgcyggggtggccgtgtcctccatcaccaagagccagggtgaggctgggggctcgtgggtggggccgggagggtgggcgcagcggcmgcagggcctcacctcccatcccgcagggagcgagtggcgctatgtgctggtgagcaccgtccgcacctgtgccaagagcgacctggaccagcggcccaccaagagctggctcaagaagtttctgggcttcgttgtggaccccaaccaagtgaaygtggctgtcacgcgggcccaggaggggctctgcctgatcggtgagggcggggctgggctcttccagggtgggaacacaggtgaggccagggctgggctagggagctgccgactcctrcctgaccctgactccgacctgaccctgactcctcccacctgaccctgactcctcccacctgacyctgactgactcccatctgaccctgactcctcccacctgaccctgactcctcccacctgacyctgactgactcccacctgaccctgactcctcccacctgaccctgactccgacctgaccctgactcctcccacctgaccctgactcctcccacctgactctgactgactcccatctgaccctgactcctcccacctgaccctgactcctcccacctgaccctgactcctcccacctgaccctgactcctcccacctgactctgactgactcccatctgaccctgactcctcccacctgaccctgactcctcccacctgaccctgactgactcccacctgaccctgactcctcccrcctgaccctgactcctcccacctgaccctgactgactcccatctgactcccaccctcacaggagaccacctccttctgcgctgctgccccctctggcgtagcctcctggacttctgcgaggctcagcagaccctcgtgcctgccggccaggtgcgcgtctgcaggaggccaactatgccttcctgaagagccctctccacctgcaaggtgccaggactgggagggaaagtccagggcccccccaccctccccaccaccctccgccatcagcctgcctgggccagcctgcctcctggcctcaggatctccctggggcaggaagtgggtggacttggaggaggaacggcaagggccggtccccacactcttgctyctcctgggcrtctggggacaggaacacctctcagggtggccaagaggggcttccttgggaccagtgyaaggaagttctgctgtccctgggaagtctcagaaccaggaaggaaaccctgtggaggctgccctttgacctttggacgccacctgtaatcactctggatggtgtctgtggagttcaggtttattttctatttaaatgaactaaaagccagcatcctgccgggcgtggtggctcacgcccataatccagcactttgggaagccgaggcgggcagatcacctgaggtcaggagttcgagaccatcctggccaacatggtgaaaccccgtctccactaaaaatacaaaattagctgggcgtggtggcgggcgcctgtaatcccagctacttgggaggctgaggcaggagaatcgcttgactccaggaggcgcaggctgcagtgagctctgatggtaccactgcactccagcctgggtgacagagcgagaccctgtcttaaaaaaaaaaacaaaacaaaaccagcatctgttactggaacagagacctcagcccaagctcaggacaaggaggcctccctgggagagggggcctttctcccaccatcaccgcctgtgtccttcaggggctgctggagggcagcccaaagccaggggcccaccccgccccaccccaccccaccccaccctctgaaatgtgaaaagcctgcactcttcctgtgggctgcgcagtgggctcgggggttggggggtgccggggcgatgcttccaccctggactgagtgttcggggcagcctgctcggctgtatgtttctcgcacgctcacccgcttcagtgcggctctgtccctgctgccgcctccagtcctgagggaggggcttgccccaccttctacattccaatttttatatctttgaattatgtgattagatattaatttaatgataaaaccactctgaaagctcttctcacttctgggtgtttgaggtctggctggggggcaaaagtggatggtcactgtgcttggtacgcagttgtggaggctgtcgagggcctactgcagagcgctgggcgcaggggcgtggggagggcggttttgggacgcggccgtggaggccgtcgagggcccactgcagagcgctgggcgcaggggcgtggggagggcggttttgggacgcggccgtggaggccgtcgagggcccactgcagagcgctgggcgcaggagcgtggggagggcagcgaccccccctgcagggccggtgtctccggctgcctgtgtggggaggggagggccgtgcctggtgtggtggggacaagccacagctccagagctgctccggtgtcaccaggctggccaagtccaaagtccctgaggccaccagccttgactgtcctgctggtcccacttttaaagctgctccccaggaccccctggccgctgtggactggggtccctccgcacctggcccatttgtggctgcgtccacaggggctcctgtggcctcccagagccagctcgggggtcagatggtcgcgggggctatggtcactgtgggaaaagaggttctgggcatctgtggagggaggggtggagcatggagtctccaggactgtggccccgttggtgtgctggacgggccctgccttgaagaccatgtctattcttggaccgtcatgaaataagagtagttctgcaatagcttgagaagtgcctgcagagaggatgagaaggcgcctctaggaagggggacttggggacctcaccagcctgcagccagggaaggcttctgggaggaaggggcagctgcggccctgaaggtgagcggtggggggacgcaggggctggacgcctagcaaaagcagctgatcctggaggagagagggagctcagggccgggaaggcccttgaggaacaaaaggtggggcggggcatggaggggcacggctgagctgctcacagccagggatccccggtggtgctgctgcctcctcgggcgggcgtgctgatgagcactcgaggctgggcaggggatggtgggaggcatcacggcctaggagtgtcattccctgagggagccccacaagccagggaggtgggtaaggaaggccggagcccggtcacggtgatgggggtggtgaggaggggcgggggctaggaccgcagaggccccgtggagcagcttttgtcgtcgtcgttggacccgtaggtgtcaggggctggtacttcttgctccaggctcagctgtcttgggaggtccggcctgtggctccccctgggaaagagcaggagcagaaggcctggggcttggcatgttttgagccaggaaaaacactggtggctgctgcctttaaaacataaataggtttgcttctttaattccatatgtgcatttacactcttctttattagtggataaatattagaaaatcatctctcagacagagtggctgagggcgggcccctccaggggctccggcttggtgtgcagggtgaggctgtccctccagggctcgtacaccagcgtggaggtctcggccctcttgatggtgaacttataggatcggttgggcagcaggtttcggacgtcgaaggtgcaggcagccacggggatgacgccacactgggcgcactcctgctgtgtccgcgggtccagcagcctgaagcgcaactcatactgctccgatgtggctggctggatggtgacgaaccagcgcagccgggcccagtcctggtgagccgccgacgcctttcggtcaaacacgacaggcatcttggtgctcagcatgagccagatgtgcgggatcttggtggcactgacatcagacaccaggcggtgcttgacgtgtagccgccccggcaccatcatggtcaggaagctgtccatgacggcygacacgtccgccagccgccgctccaccagcgcccagtcggccaggaagggccgtgggtctggcgaccggagcagggcrtccagctcagcacggccatggtcgagctgttccaacaggtccccgagcagcaggagctggatcttggtctgagctgtgcccaccttcttcatgcgctggaacttccaggggtcgatgagctggaacaaggcgctaggcagcaccagcgggttytggtcgcccagggccaggtgcttgggcaggacctcratgtagtaggagcacttacgcagcagctgcatgcgggcgtggtggcgcttgagcaggtgcggrctcaggtccgaggtcaggaactcacgcagggcattgcggcgctcggtgtaggtcttccacgcctctggttccagcagctgctggtcatctgcctcctcctggtccaggaaggactggggattgcccagcttcatcttgtccaggcccaggcctgccacatgggtgctcattatccgggagctggggggagggctgggtgtcagctgccaggcaggctggcctcccctgggctgtggcatgttcgggggatggattcagcccactgaccccatgctggacctctgtccttcttcgggggcacaactcgatgggaagaggctgcctggagggctggatgggcagcctacagatctggacacagtttatactgaggggcaaaaacctctactgacaaccagtggcctgtgggacaggacagggaagaactaggactgcggacttctggccagaaccgcctgacctgtggccttgcaagggccccagttcctaaccctgctgctgaaaggggttgctggcacccctcggggccgtggagaggggacggcgtggtcctaagcagcacaggatccccctcggggacattcgcgggccatcctcccgctccggttctccctggggacgctccacgcctcaccgcagttgtagggcacagagacaggcctcaccaaagacgaggccagctggctggtcagcatgggaggagggcgcccaggcctgggcccggaggagcagccctcctcccacgctgtgggccctcgctgtggacccgggatcctgtccctggtgagctcatggactccacaagtgacactccatttcccagatggagcctgaggctaagaagcttggttcttgttctcatccagggcttgagcccagtgctgagccgagtctgaccctctgtccgtgggtgcaccrgctgagtgcagctgtggccccaggctctgccgcagctccctggagagcaagccgcacccctggttgctgccccggctcccagcaaccctggagatctcaggttgtcacagccacttgggccttggacgacccacaaatgagagctaagcagttgctgagttccccagggccacacaggtacgtggtgaagtcatatctgcccgggaagggttgcccttttgggcgtgaggcagatatgacttcacgagcgcactcctcgggaatccctcgagaacaggcccctgggggcagcagggagtgtgtctggggtgaggtgccagctgagagcaggaccccaggaccccaggcctaagccctgctcttgctggaggctggggcggatttcaccgctggagggaaaccgtgcctctgtgacgtgtgagggatgttttctagtctccagcagctgcccaggtggaacacccagagaggctggtcgtgaacccggaaaggtggttctgagcccctcgctgcttcctacacgccccggtcccaggcccgcttccctgagaccaccaggtgcccgcactctaccccctccaccacactccccttggctcccctggcccgggcccacctccccggccgctctgcctgccccttaccttctcgagacccccagccctcctctcccggcccccgccgccgccccaggaccgcgcccacttgccctgcctctgaagcggagccgcgcgcggacttcccagagcccagcctccctccgcactccgcgggttgccctggggaccagcggcctttgtgacgctgcggcccgggggcggggcgggggtggggacccgggaccccgagccgagtaatcttccatccgcttcgcttcctggagagccccagacttctgggggcccgcgtccccgactgaggggccacggcgggtggctggtccaagagccaggctccaaggggggttcccgtcccggagcccttccgcgggcgcaccactccccacgcacccccggcttcgggcggggcgcaggagcctcgggtgactgggagggagttcctgctcaaccccccagtccgagcgcactcctcgggaatccctcggaggaatttgggagagaggcagtggccggtgaccaggcggatggaccacccagcgcctggacagaggagaggggcggcttcccccgccgcgggctctgcccagcaaggccccgcccattacagatgccacccattacaggctcctcccaccgcaggctccccccaccgcaggctcctcaaccacaggctcctcccaccatgggctcccccctcccccgcaacggcccctcccatcataggctcctcccaccgcgggctccccccaccacggcccctcccaccacaggctcctcccagagcaggctcctcccaccgcgggctcccctactacggcccctcccaccacagggtcttcccaccacaggctcctcccagcgcaggctcctcccaccgcgggctccccccaccacggcccctcccatcataggctcctcccactacaggctcctcccactacaggctcctcccaccatgggctccttccacctggggctgcccaagctcaggcaccgacctgactctggataaatggggtctccatagctccagggagccccgcaggggagctctgaggccatctggtcccgtctgtatctgttcagttgggctcagggcctctgggatccccccgttcccccacagcacaccccagctagctgggggtctcctggggtcacaatcttagacaccccaaggtgcccctccttcaccttcaggaagatgctggaggaagacaccctttccatcctcctcatctccacccccacggaggtcagtgctggggcctcttccaggatgggcgtctttgagcccctaccaggctgttctgtaacttgagcctcccccctcctcccggtgaccccaccctggaagagctttcccttggtgcatggaggccccaggggttaggcctggcaggaagtgggtggatgtgggtggttttttttttgagatagcgtcttgctctgtcacccatgcggcagtcttcacccccggggctcaagtgatcctcccacctgggtctttctgatccttccggattacaggtgtgagccttgcacccagtcctgttgggtgctgtttctgccctgccctccctgcctgggctggaactcaataaatgccagctattgttattgttatttagggctccaggggacaaagccggggttgtttggagaagggggtgctgtctgacgcggagggttgggaagcagtaggagttagaccccttacccccggccctgcagcccactgacggagaagcggggtgggggcagagcagcctccccttctcttttggggccaggcaggtcctggatgtctcccctctcctgggctccaccctaccccctttctttcaatttctgatttctaatctaattttttaaagttaaacttttggccaggctcggtggcgcaggcccataacctcagcactttgagaggccaaggtgagaggatcccttgaggccagaagtttgagaccagcctcggcaacacagggagacccctgtctctacaaataatttgaaaaattagctgggtgtggtggtgtgcacctgtggtctcagctacttggaaagctgaggccggaggatcacctgagcctgggaggatgaggctgcagtgagccaagatggtgccactgcactccagcctgggtgacaga

SEQ ID NO: 95139 - DNA, 100271 bp, Homo sapiens
  misc_feature (1)...(100271): n = A,T,C or G
tcccactgcaaaaattatgcttctctgcagccttccccatctcattaaatgacagttccatccttccagtttttaagccaaaagccttggcgacattcttggttcttctctttcacaccccacgtttaatccatcagtgagccaaccctttcagttctacttccaagtatgaccataatctggccagttctcacctcctcctccacaggcctagtgtaagccactatcggtcttgcttggattactacagaatctcttaacaggccttcctactttcatcctggcagacagatcctgttatgagtgattcctctgcacagaacccttcaatgtttctctcactgtgaggagaagtcaagtccttgacatggtctcaaattatctgaacactaaattatccgaacactctatcctcattcctccttctctcatctcttgctatttccccctctcgcttactcttttcaagccacagtggtctccttgctgttccttgaacacgatgtgtacactctagtcttgcagcctttacattgcttgatctatcatcctggaattactgcccttccccacgagatctgcatggctcactgtcttccttcaggtctctccttatatatcaccttgtcagagaggcctttccaaccaccctgtatcaaattgcctgtacacacatgcacacacacacacacacaccactctttccccattacccagctttacttttctgtgtagcctctcaccccctggtgttttcaagttgtctgtgggtctcctgcactagactataaactccatgacagcaaggacttctgctcacctgtcacctacactggtggctggtacttagcaggtgctcagtgaatgaatgaatgaatcaatggggagtgaatgaatctatgtagctgcatttttagggaataccccactttccagacaagctgcagaatctgaaggtaaacattggcaggggttctcagcaatggattcagaaacttagcccagcagcctcattgaaaacattgaaacactgaaaaagccaacaaggcccatagctcttggtgtcactaacagagcagttggtcagattttgagtgagcattttttaaagaaacatctgagcagttttaaaatgcaaaatattgagtgtctatttgggcactttgagttttttgtttgaccaaagtgtgttaaaattaaggtattaaaataaatatttgtttattggttgtgaattattgcaatccaaactcacctttccaaactgcaccttctgaagctttagttagcacgtatctaaacaccattaccaggctccaccagcccctctgctcctcagcttagaggagtttttaaaacctgttgagaattatcgcagatacgtttggccattatccagtcgtttcgattgtgcctttcctaaatgtccgcggttggcagaacgtgggaggaagaggacccgcctaactcggggtaggtggggacgcgctgctcactgtggtgaggttgacacttgggccctgggtttcacttgcaggtgctgggcggcggagagccccgagaaggaggaggagagagagccagcagccaacccctacgacttcaggaggctcctgcgcaaaacctcccagcgccggcgcctcgtccagcagtcctaaccgttcaacgaggcagtcaccgccgtcggaaggcgctggagcctgcggggcagcaggggccaagcaggcactctggggctggcaccagcaggcactgaagctgcggccctgatctccgcagaggctgcctgctgcgctcggccctcaagtgcccgggccggccttcgtgctccgaaacaagagacctgggagccctcgggaaacctcccccgacgctctctctcggaactcccgcaccctcctttctcaccagcccgccagttgtggcaaccctgtccttgttcccctaatctatcactttgttctttttttttgtgactcctgtggactccactgcgcctgggatctcgccaacccctctctcatttggggtgactgaattcacagatttttttttttattggaaacggcttttcttggccaacagaacacttgctagcggttgaatcttagagaaaaaagcccgggaggggtggggagaatttcgaagatgtatttcatctcaagcttgctctttctcttcctttggttattaaggtcactaaataaaggaagtgccttggaaaacccgtggtttgcgtgactgatccctcattttcccctctagggcttctgaggggcttctgctataaggctgtgctggtgacgggcccaaggaggggcgttgaggtgccttcatcagcgaactcccagcaccacccagccacttcagacaaacacaatctaagctaaaaccccttgccacacaaacgcagaggcctccaatgtctaaatccccaacacaccacacgtgctcgcctgcacgatgccttcccaatctgcgtgactgtctttggccccatctataaagatgctagtgcccccactgggtggaactgtcagatttcaggttctcccggtctgcagatttggggccatctttgctactccgactttgtgtgtatttaaaatgggggaggctagtgggtggacagaagtttgcattcctgggttgactgcaccttattctaaaacccggtttaagctgttttatgaaactgacattcccatctaagcaacctggagagggtgaggacaggtgatgaggtcgttgcatggaattggaagaagggttctgatcacgatggggctcaccccttgtgtgggtgcccttggctcctgcacccacaagccggagtcaaaagactctggggaaatattcgaggagtgagtgagggcatgtgcagagggctcagagcgtttgttgcgccgctggtccacagggcatagtaatctcgccaactcaaagagttggcaccaaaaggtccccagagccaactcgtgtaatctcttcattttacagatgcaatgtggccaagggaaaacctgcagctatggcatggcagagtccaagtgccctccaggccttctttttccctgggttagcggcacagtcttgctggggttgcgactgaaagtaaggagtaaccctcagctgtgcgaatgcactgaggagctgagtatggcccagtacccaggaaaccagcacagcaggtcaccagagagaggggcttgggaggggcaggggtgtctaaagcccaaagtggcctggcccccttccacctctagctgcctgtccacttgcctccagaaggcctgggtttgtggggagggcggagcaggggccaggggtaaggagcagtaagctaagctcagcttttctgcctggccacccttcaatctaggcgtccttcttgggtggcccctgaagacaagagccctggcactcagccccttctgttatttctgttggtgtagggagaatttatggagggaggcaacagactccctccctaaatttttcctgcaccaatgttttaagtgagaatagaaaagagaatggcaaaggcttggtgaatgcttggttgcaatatttttgtgttcttccgtggttgtttcctctttttctttccatcttcccttctttctctgtcctttgacatttaagcacgggaaggacacaggaaaatgtgtgccagacactcttctttgggtcagcctgagacccatatgttggtaaaccagacacctaaggaaactgtccctacaagtcggaggattgggtctctcgcccctcatctgaggaagggccttccaaagcggccgccttcccttcccattcactggctgcctcctttgtgaactaatgactgtaattattacctcccagagctcttttgttrtctccaaccccaagccccggagagggggaatgggctctttagtgaaatgaaagtcattacaaagcaaattaccgtctagggagggacagccttcaggaaagacaaatcagatctccatctgcatctgaagtagggtgtgtttaaataaaaaatgtaaatatcaccattagatccaaagtactccagagctgtgggatttaatggagtttaaacggtagcacttgaagccattgctttaccaaaaagaaaaaaaaatcagttaaattcaggtgttttaatccgtttcttctttgggggttttgtgtgatttaaacgcttgcttttaagaacctttatgttttcaaccactcatccatagtagaaaagttctgcaaccctagactgctggcttgaaggaaaacctttgcaggatttgatatggatttcaacaaagaaccagcctctgcgaggctggagagagctgcggagctgccatgcctgaagtgcagatggctgaaccacaagtctttaggtttccggagttgttattgtggtgacctagagtgtcagagccaggagagcaagaaagaggagccaaactgagccctgagttttcgaccacccgggctcccacagcctggaacagacttcacctagcacgctcagtgccagccttcggcaggacgctatcaacgcccgactggtttcctgctctcatcctggcgcctgggcccagttgccatagtgtggatcccatgactcctcagggaacccctggactcaggcacgcgagaagaagacagcgctttgtggagagaattgaccagggacagttatgctcgagcacacaggacttgggcctgtatgcgtccagcatgggccccaggatgtcccttctaagcgagggtcgaggggtgctcgcccagacgggatccccgggtctctgctttgttagcagctttggtggctggttcaggaggtcagagaaataaaacgacttgtgaacacaatggaaatgacaggcgctctggccaggcgcggggaaggcagccgcctcgggaagccgacctcagccctttcctctctctccctccctccgtctcccccagagccccggagctccgaggtgcacttgaagttcatctccactgccaggagaacgcagcgcaaactgtcaaagggctcccaatccttagggcgtcctccctgtctgcaatagctttttgtagaaaggaaatcatcagaacgattctgactttctcctcctttctttattagaaaaagagaaaccgcctcctaatacgcctcagagagaaccaatctcgcgcttccgggtcacccgctaccgcgaagattctctgggggcgagggggggcattggtttgaagccccttaaaacgagggccctgcaggcgatgccttctttcctactcggatttgtaaagccgagattgcttagttggaaaccctgttctcccctcccaggcgcacacagatcccccttacacgcaagcagcgggcgcttccacgcctccgcgggccaaggtcaccaaatgccctgattccatcccccacccgccatcaatcctgccgactctggccgctctgcctcattctcttccaagaagtttccattcgttttatttttttttccccagcccgaggtcctcagtagactccagcgtggattttaattgcctcaatcagcagtcattctccccagccgtcactcagagcctggacggtgggtcccgcgatctagcccttggctacgcaggaacggtgcgcccccgggtacggcgcggttcagcaggcaggcgtcaggttctaccaaggcgctgaaatgagcccatcagcgggtaggagcccttcccccgccgtcccctccccaggctcgtgaacggcgcctgatgcccgcccggggcgcgagctctcgaggtcrcagtgacctcagcacctgcttggaggaaaacggcgcgggaaccccgcttccttcccctcagctggagccagacctcaaamaaaaccccaatcgatgcacacagaaaactcctctgggccacgcttcccgcctcgccgaggtctccccagtctgcccctcgctgacgctggcgcgcagcggctgtggcagcacccgggacagcggccgcccgcacttcccgcctctggctcgcccgaggacgcgctggcacgcctcccaccccctcactctgactccagctggcgtgcatggtctgcctcgcatcctcacgactcagctccctccctctctcgtgtttttttcctccgccgccccctcattcatccccactgggctccctttccctcaaatgctctggggctctccgcgctttcctgagtccgggctccgaggacccttaggtagtcccggtctcttttaargctccccggcttccaaagggttgccacgtccctaaaccctgtctccagctcgcatacacacacgcacagacacgcacgttttctgttcctgcgtgacacccgccctcgccgctcggccccgccggtccccgcgcggtgccctcctcccgccacacgrgcacgcacgcgcgcgcagggccaagcccgaggcagctcgcccgcagctcgcactcgcaggcgacctgctccagtctccaaagccgatggcatctccgggctctggcttttggtctttcgggtcggaagatggctctggggattccgagaatcccggcacaggtaggaangagaacgggggcctgcggcgggcgagttttgcggtggtctggggtttgcggaactacggagaagacgaaggaggtttttccacctgcaacaggaaacttcttcgggcgcttctccctgcttttgggctaagtccttgacggcccaagagctcaagacctctacagcctcttgtaccctgggaagacgcccaaatagtctcaggcccgttccacagaaggttggaagagccccccaaagaccgcggtgtctcggggacatggaattccgtggtcctggggcgctgctaagatccgggtgtctggaccctggggtgggacggagtgaccgtgaagatagaaaaaaaaaatgggaaaggtgagagatttctttatctagaaagacagtctgcgaaaaaatggatagcttcagtgtttaggaaaactcgtccaaggtaggcagggagaggaatttgcctgagccgattggcacctggaagggcagcggtgtgggcttctcctcgggaaacagataaaggaaatgagggctggcccgggccgccagcctcccgcttgccttctgcacctgccggcctcaccgagtcctgagcggcccccaggaggaaggcggcccctcctaggaccccggactgattgattttcacatagaacgaaatttcacacgtccgtctgttgttctctttctgcctcgctgtctgcctgcctattcttccttgcagcgcgagcctggtgccaagtggctcagaagttcacgggcggcatcggaaacaaactgtgcggtgagtgcccagggaccggggcggccaaggtcggcccgcggggtccaagcagtcttctcacctccgcatcccagtcagcggagtcggggtttcctggctgcgggtaggcgggagcgagggagccgggcccggcggaggattgacgaggcccgcgttcggtgtccttacccagccctgctctacggagacgccgagaagccggcggagagcggcgggagccaacccccgcgggccgccgcccggaaggccgcctgcgcctgcgaccagaagccctgcagctgctccaaagtggatgtcaactacgcgtttctccatgcaacaggtaaagactcagcggggagccccggggcgcccctgcccctctctctgccccgcccaccgcggccggtgcgggtccggcgctgagagccggacaggggcgtcgaggtggcagcggaggcgggacctgccagaatcttcagataaaagcgagaaatgcgggacctgcccgctgggtccaagcccccgaacctggcctcggagctccaagagggctctgaggccgtggcgctcttcccccagcgcggcccttgggatggcgggtggccgacgatccaggcgctcgtgcgctcactgaatcgatgacggctggcttccctaggccgctggggcctcgggtgggactcagtttccaaataccgtgcccgagaattcagaattgcattttttttaggtctttagatcacgagagtgatttgtagctgcaattgcacaagagaacgattccattcacatgaaacccgcgcgccgagttttacccccgtgcacttacacaccgtctcccaaatgtacgcgcgcacacacacatgcagacacacatgcatacgctctctctctctctctctcacacacacacacwcwcacacacacacacacacacacacacacacactgactttagaaacagcgggccttcctatcagaccagagatcctaatgcacctgttccactttggtttgcccgaaggcattcgagacaaacacttctgacgtgaaatatttatgtaaacatgtaagatggtttactgagaaacacgtttaagacgaactcctgtgaactagataaacggaggtacacgctcttcaaaaaaagaaggcaaacaatataagttatgaattgaaatgcagtaattaatttggggaagagaagaaatcataatttatctcattcattcccttcacctttgaaaaatgtctcccttttaaagaaaaatgttctgcctttccaaaagctttatctaacatgaaatctctcaattcaaagaaatgttattgcctcatcaagatcttgccttgaatattttcaaagtaaaattaaaatgtggcattttaatttcattctttagacctgctgccggcgtgtgatggagaaaggcccactttggcgtttctgcaagatgttatgaacattttacttcagtatgtggtgaaaagtttcgatagatcaaccaaagtgattgatttccattatcctaatgagcttctccaagaatataattgggaattggcagaccaacmacaaaatttggaggaaattttgatgcattgccaaacaactctaaaatatgcaattaaaacaggtattgtctcatcgaaaataataaagctcttttttcgtttacaatttttattttatttttttctataaaatgttttgtttgatggagttactgatattttcaaaattgcaaagttattttcatcatgtaaaaaatagtcattattagaatgattctaatccaaagcaccttccactgctattgttcatgcttctgaagttgataatgtcagaaacatgatttaagtgtaaatcatcagattttacgttgcatgtatttggacacggaggttataccactggtatagaagcaaatattcatcagcagagaccagcagaaagaactcaaagtggagaaagagaatatggaaataaaagctcgaaaaatgcgtgatccaaacaaaagcccgaataccagtgctgtgctggtattttctttggcataaaactgatcagaaacaggactcaccaccctattaatcattgagtgggagggatgttttcacattgtgtcaaatggccaacctttcagatttgaattcagattttcacttatttttaaggaaatgtgcacaacacacaagcaggcatgatacagactagcttagcaattcagccatgttatataaggatgtgtgttcctcccagccactgtatatgtgagataaagaaaaagggggggaggggcaaatcagatatccttagggggaaatttttttaaatgtacttttgtggtctcttggcttttcacaggagtctttatattccatccatattacagcttcatttataacatttatttgggtgcattccgagctttcatgttatctacacaaagtcagccattcatctgcccaggtcttgattaccctcgctttttacgttgtctctaatcatcctgatacacgatggctgacacttcattacggcmataaaaataagtatgaatgaatttccaggggtggggaggactttgtggatcgaagttgatgtgtagcctttaaaagatttgctagcaaataaaaaatgtgaaatatgacatgaacattcatcaccatagaaacgtcatctttttagattgcaaacattttgctgatgaattagcagtattacgctaatcaataacaaacattcttaaaatgtttgctgtgagaagtttagttctttttttctttttgttcacattatttgtaccaacagagaagaaaggtaggcatacaaaaagccttgggacatagatttctatcaaagtcaggctatggaataggagttttgaaggtgtattagacatcatcctcaattaacgttcatgaagaacccacgtgatgtttataccaggcattaaaaattttcctacccctcctcagcttttcctgcattcatagtgcaatcctgggtgatgcttttaattcattttttgacccattccccataccttatatttagatacgttaatagtaaattgccacctattgtttgtattgctaccaaaccaaaaagaacctatggaaatgttttgtgtcttcatccttgaaagctagtggtgcctgaaatgcagtctacagagttaagataatgggaactgcaagtcaatgaaagtaatagttctgtctatcaacgttgcatttagtgccaggaaaagatgggctaattcaatacttacattttgccataatgcttatgaaactgttaggtgtcactgtaatgcattttatttaaagttcagataaaaatgtgatggattaagttggatttctaagcaaggcatatcaattcaatctctcaatagttttcataacatatttagtctgctggccttttccttcaaatagcatttcaaaaaattaacagcagtcattttctctattcagctggcaactttatagatttctgtgctataactgtcatacttgtcatctaatgctatttagggtatgtcaaattagttaccatccttgctactaccagacattttaatactcctcaagagattattttataaaatgcatattatcatcttgtttctactgagagaccttaacctgatttccacttgggctccaagcttagagaggagtgaagggcagtgggaaaatgaagtcttcatggattgttaaaattacctctgtaaaaagaaatgttggaacacggaaaactgagcagagaatgatagaattccagaataatttgcatttgcagagatcattagatttggtgctagtggtggtggtgctggctggggaagagtaggacttaaatgtggtcctgaatcttttaccaaaccatcagacaragggaattaagcgtcagtagatgaggcagccctagtgtgagtgttgccaggacataaagagcagtttggaccgacttttggcctcttcccaactgatcatgagcacagggtcagagttgcctgaggctggttgttcgcagagtctgcgcatccttccgggctcatttgctagtctgcagggagcatccctgagtctgagcagccagttctcacatctcaagctcgccaccttcctggctgcataggctgtgtggccacccaatggctgacgcagtgcgctctgctcccatcacagggcctggcagggtggcgacagcagcaggaggccaagggctgcagggacacctgacctatgggggcaggtctcacaattccttggagagagccctgccttgatttgctgggcagccctaggaagcagcctgtaggggccacaggaygggagcaaatgtcactaggggaatatttctgccagaaatcgagagagcctgttgatctgacctgtcaaactatctccctccctattttcacatcatcatcagggaatgaaatttttgaggcaggagagattcaggtgaaatggcagagcaaggtcaaaatatatatagggaggaagggaaacctagcaatgaaagcgtcaaacctgttttcactgtttacggaaagttatcatcagggtgaattggccttctgatatccagaggcacaacacacccctcacaatctctctccatcttatgcacaggttttcattcccaagtttccctagagttaaatactgtctaatcatagacaccacattcatccagaaaatgaatatgaattataatccttattaatttcctcacttgaaaaaaaaagggttagggaaagagaaatgaaggagcatcgggagggaggaaatggctgtgatttcagctgcgagcataatgaaatggggagtcaatgaggcagagaggagtgaagggttgctccagacctcagtggccacagcagcaaaaaagccttctcacccttcgtggatgggtaaactgagggggtcagcatcagagatagaggggtaccacacgaggccacaaggacataaaacaatgctggagaatgtacaatagatacacaagtcctgatcccgctaaaatgggctccctcccagcttatatctttacccagtgtctgtctggccacatgcctgaggctgataagagagcactccagtgcaggagataagctagccattgacttttgtccctgctcttccccattgccttcctttatcttgttttgcctgtgctggagatgagagacaatcacatcccaggcttcagacagatgtccaggatgtggaagatacctttttatcagatgctatttccacaatggcccatcttctaaaatttttgctgctgtgcaaatcacggacctatcgatgacaggcttttgtggagcaagaggagaaaactgaatgctaatgacatatttataatcacattttaaataatagcctcaggagagtgtggatgtcaatccatttagagagttttagaggaatctagaagttaattagatargccttgcgatggactaatcagtcgattgagtatatctttctgtatcttgttgataaaacagtgatgttgactgtatgtggccttattttaaatcacaactatggaggagcgctgttgtttataattaacaaagaagaattgacaagaattagctttgtccatgccatctttagacaatcatcaccttttgaatccagggcaaatcattcagcagagtgtcctattttctcatttttgccctgtcttttgtaatcatcagccatttgtcactgatattattatgaatgttggcatgcctggcggatgtcatggtatgaccgattctcagaaygactacaaaaaaggacttctagcagcatgagtataaaggagaagttacctgtctgaatggctgtgggttgcagtagcattttagcttgcgaaaatattgaaaatagaaaagagactcatgcagattgcaaaccatatttgttatatttatagggtccgattaaaggaagatttgtagggtatgttttaagaaatatcaaaacctaaagtagtcttcgtggttagaggaaacgcttttatggtgtgtgtgtgtgtgtatgtgcatgtgtgtgtgtgtgtgtgttcttgtgcatacacacgtgtgtacatgttggatttctacttatggatttcctgttactgacagatctttcaaggtcctttagctagagaaatcatgtgtttgagaggcatttattttcactggaggcaatcctgattctggtattccattttattcagggcatcctagatacttcaatcaactttctactggtttggatatggttggattagcagcagactggctgacatcaacagcaaatactaacatgtaagtagccaaatgtgtttttatgtaatttaggataattattagtgacattccatagtctttacatcttatgtgaaaatctgttttttattaagtagccactaaaatagtgatacaaacttctgaagtgtgagtgttcactttaatgtaacagaaagtagtcctgatacatcttccatgtaatcaaactctacaaaatttttaaaatacaaaagagacttttttctcacgtttgatttattattgtgcataatgtcaaagacaaatgggaccagatattatattttaaatcatgttactctgcaatattttttatttattcaatacaataaattcccctcgtgcattatgtcagtagttggagctcttgactgtagggatatagaaaaaataaacatttnggaaggcctttttgaaataattttctctctgcttaatgttataatcataacacttgtaaatgtatgttttgaaaaaggaaatagttctgtagctattgtaatgattgtaaattatttatctgagttacagaggtaaaatgtggccattactacatttcagrttcacctatgaaattgctccagtatttgtgcttttggaatatgtcacactaaagaaaatgagagaaatcattggctggccagrgggctctggcgatgggatattttctcccggtacatgatatttcaactttctttgtgttttttcttctaatatgcaatgccttgttgtaaacctagggaagattaaaaatctagcctatgcctctgcttaggttaaatagactgtgtgttgatcaaaagaatgactgtgattaagtgcacatgaccattgaacatgcctccaagctaagtaacccatgcttgaacatcagttatttgtgtgcaaagtgagcataatcagagatggtacttacccagtgcttctactgtgaccctacaaacaggatgtacggataatgtggaacaaaggaatcaagattcctaatcaggaaattcactctctgatgctcttcctagaattagtgaaaggaaatgggtagcctcatttaataaagcatttgctgttcaagggtgcatagcaaggtatatctactcagtagagcatatggaccactctgtctttgaaataacaagcaccaaagtggatttacactaatttcaaggaggacagagaacgctttgggagagaatttcttagagcaaaaatagagggtgacgatttcttcaagagatttctcatcccttctcttctttatcatgccattcagtcttttccatcctgcctttttatcaccagccattgaattctaagctccattacttagacctcttccagccaagagaatcaacctgaaacaaaaagctgtgcccttggtttacagttctgtgtgtgaccttggtttgatgcagaaaagaaatagaagttaggaaggcaatgcaaagagagtcactgacccatggaaaagaaacccgatgtgcagaccatcagctaatcagtggcaggagcggatgtcattagtccactgagacaggacccacctgagagagaggccagagcaacacctgtcgttgtgtcagacagagcaaaggccaagtggttgtgctctctcttcagcaaatctacaaagacaagcaaatgatgaggcggggataggggagaaaagaaaaagtgaaaagaagaaatgataagcaagagtgaccccaaggccagggcttaagttaagcatgtttgcctgcaagctctggtcagctattttatgtgtttaaatatatagcacaatttttcaggtgctgaaggaaaaggtgttagttaaatggaagggaaaattagccttttaaaaagtcattgaacaccagctgtgatgaattttaagctagcctttattttttatggcacttagtacttagttttcctttggaaagccatccctgttgagggagcttggtcatcattgcctgatgctttgaaaacattgttcatgaggaatgaggtggggtacagagatccacatcatttctacctttcttcttcccacccttgtgtggttggttataggattgatctgtccctgagatgaatcaagaacatgctgggctctatttttttttcttttatttgcatttattttatgctgaatttattcccgtgcataagttttaatggtccccgggagtagggagaggacagatgtacctgttgaccctgaaaatttgactaatttgactaacagctaggcctaatttacctggctggtctgaaaaacctacatgccccagaaaacatacacccagagaaataattctcttaggcagttctgctaggcttagagcttaccctccaccctcactgataatgggggattttcacatggagaagacttcagcttgagcatgggaattataggcttccttggagcctaaagacccatttgctcttacgccaagatgcaagccatagatgtcacactacagtgcagtgcagacattgcaaagttgggaggagacagcagaaaaggtcattgcaacctgtttctgctctactttctacaagacatcacagacgagaagtggctcatcacatccttactggctatggatgctattcccgggagcaaccagccttgctcctgcagtaaagggtcttacaatttaaggggtggggatagagaaagccacacatcttatgcatctgggatctaaaagtctcattccctgggactcaatgtgaagagttaggtctgtgacttaaaacatactgtgtcatagctccatcaataatatccaaagccttcatgcttcatggaaagtcctttaggactcctagaagaaatctgcttttgtgatgtcacctacactgggaaccagagaaatacagagcattccttactgctcagcaggtcacaaagcacaaagactaaagaggggctaggaaagaaagcttggcttagtcaccgaccttttcctagctaacagggttttcataatgtttcagcacttgcttttattcatgtattttattttttatttttttgagacagagtctcactctgtcgccaaggctggagtgcagtggcacgatctcagctcactgcaacctccatctcctgggttcaggcaattcttatgccttagcctctagagtagctgggattacaggcatgcaccaccatgcccagccaatttttgtatgtttagtagagatggggtttcaccatgttggccaggctggtcttgaattcctgacctcaggtgatctgcccacctcagtctcccaaagtagcacttgcttttacatcctttcttagaggattcgtaggaaataagagcaggtagggctcacgcatttgtcctcatgcctctgttacacaaaacagtcttctctgcctggaggcccagaagcctctttctctcactcagagctgctgagcctttagccagaggacagctgagttgcagagtgaggtgtgggagggcagggctggaagcttcagaagaaatgcacatgaagagcactttcttaggatacgtcttcccctttctcttcttccctccttccttctccagcctctttaagaacaactaaattctcaaacaagatcattttgctcyccacaagggacatttggcaatatctatagatgcttttgattgtctgggggagagggtgctatgggcatctggtgggtagaaaccagggatgctgctcaacactttacaatgcccaggtcagccctcaccagttatgttgcccaaaatgtcaggaagtgccaaaaccatgagctaggatggaatttccttctgaagcagaccctgcttccagcatcctacagccagcctttcacaccgggtgtctgctcagagcaggcgtgacctggattctacctgattctacctgtcctgtatctctagagtccagaaaggaaggaatcgccctgattttgattgaggacagaggcatgtgtctgggtgatgagtgctctgtgctgggcagcctgcttgaatcagagcccagggctcaagagacaaaggtcatacccctgcctgggccattcagcttgacatggagccctcctgctcctcagccaccaggaaggagagtaactcacaacactcacgtgacggcaggacttggggtgttccccttggtcaggaggtagaggcagtaccttcactctgccccatggcctcatgtcttccatcccagcatattaatttgcattcataacaatctgtctttcctgaattgcaaacatcctaaacttcccaacagccctgcattttctttgcttgtcaagtgagactctacttacaagacacaaatcttatggcgtggaatccctgacaacttttggatgacacagaaaacgtaacacaatatggactgaaaattctcttagttgtatgtttgtctatacttatgaaataagttttgttagctaatacaattctattatttcaatgatgtctttgagagggaagaactagtttagagggaatgaatagatgagtatgatgagatggacgtggaggtttatcctttataacaggggtccccaaccccctggtggtggatcggtacaggtctgcggtctattaggaacggggccacagagcagtaggtgagcaaggggcaagcgagcattaccgccttagctctgccttctgtcacatcagcagccacatgagattctcataggagcgtgaaccctattgtgaactgcgcatgcgagggatctaggttgcatgctccttacgagaatccaattaatgcctaatgatgtgaggtggaacagtttcatcccaaaagcattctccaccccacccccaccagcccccgaccttccatatgtggaaaaattgtcttccacgaaacgcatcactgctgccaaaaaggttggagactgctgctcagtaaaaattgttgattaggccaggcgtggtggctcacacctgtaatcctagcactttgggaggccgaggcgggtggatcatttgaggtcaggagtttgagaccagcctggccaatgtggtgaaaccccgtctctactaaaaatacacaaaaaaattasccgggtgtggtggtgcatgcctgtggtcccagcttcttgggaggctgaggcaggagaattgcttgaacccaggagatagaggtggcagtgagcggagatcgtgccactgcactccagcctgggcgacagagtgagaccctgtctcaagaaaaaaaaaaaaaagttgattagcagcttacaccagtaacagctgatttatgttaatccaaatgcaaggcactgaatgagttgaaatgaaaaaaaaaaagctttctccatccagatataaccagaattttacacacctagtgcagaatgaccatgctcacaagctgggatggaggcaaaccttttgcttttgaattaaaaacctcttcaaagggcttccagcaagagtagaatccactgcagttccccttagtgactgagatggggtgtgacrgtggcacctgtcctgtcccyatgtgccctctggggtagcgcctttgagtctgaggattcagtttaaagatagtcaataggkttttcttctgagtccaaggaggactcaggtcagtggaaataaggaatgttgcttgcatgtgaaatgaggttgataataaataaagtaactgcgtgttgctgtgcactttaggtggcgccatatctaacatgtatgccatgatgatcgcacgctttaagatgttcccagaagtcaaggagaaaggaatggctrctcttcccaggctcattgccttcacgtctgaacatgtatgtgtttcttttccttgcaagtttaaggttatgttccataaagcccgagtttaaggagtgatggctggaaatgcattatccccagaggccctctttctggaagacaccttgggagggaatgggggagaaagctgagtggtactatggggtgtcctccttgactctttgaaattcaggaaaaccctcaaagataaaggagcagcctgggcaatatagtgaaaccccatcttcacagaaaatttaaaaaaaattagccagatgtggtagcacctatgatcctaggacgctgaggtagcagaattacttgagttcaggaggttgagactgcagtgagccgtgattgcaccaccacactccagcctggatgaaagagcaagaccctgtctaaaagaaaaaaaaaaggaaaatatttttagctctagttcctacccttcgcttctgcgcaatcaagttgcatattaagggaaggggaagaggagggaaggggaagaggagggaaggcagagggactgtgagctcatttggaccattgatgctacgcccatgtaagcaaaactccagaggagcctttgatacagtttttctgtttgaaaactcagcccactgatctgatagatattctgccctcatggtgccttgagcctttttgtttgtttgtttgtttgtttgagacaatctcgctatgtcacccagactgtagtgcagtggtgcaatcacagctcactgcagcctgagcctcaacttcctaggttcaagcagtcctcccacatcagcctcctggatagcagggactccagatatgtatcaccatggctgactaatttttctattttttatagagacagggtcttgcagtgttggctaggctggtctcaaactcctggcctcaggtgatccttccacctcggcctcccaaagtgctgagattacaggcgtgagccaccatcatacccagcctgaaccatttaacattcatctttggctgacttgaccagaggttttgttaccataaagaaatagcaccgtaccaggcacggtggctcatgcctgtaatcccagcactttgggaggctgaggcaggtagatcatttgaggtcaggagttcaagaccagcctgaccaacatggtgaaacctcatctctactaaaaatacaaaaaaattagccagacaaggtggtaggcaactgtaatcccagctactcaggaggctgaggcaggagaatcacttgaaccgaggaggcaraggttgcagtgagaagagatcgcatcactgcactccagcctgggcaacagagccacactccattctcaaaaaaaacaaaaacataagactgttccttcatgatctctgcctcacagtagcctgggctttggaatacagctgcctcagagacaatcaggaagccctctgatagccagggaactaggagacagggagggaggaagggcctagagggagactcagggctcctgtaaggaaatgtcactcaggagacgcagggaaccgtggtgggtctcagatccagatccaccatgaactttttctatttcctattttaagtgaggtatgtgtatctatgtgtgtgtgtctgtctctgtgtgtgtctgtaggtgtccatgacaaggaaatagattggaaatcagtggatacagttcattaccacagcagtagctgtggaattaaaggaaactagcaattccatgttaacaaattatcaaagcatcttgttttcagtcatcttttggggttttattttgtgaaatgtccttcttcaacgtataggggtcacattgggcaaaaaccacacagcctaaaattacttagtattttacctttctgttgctgctggaacaaatgatcacaaactttgtggcttacaacaatatgaatgtattaccttatagttctgggggtcaaaaatctaaaatgggaaaagcagggctgcattcttcctcgaggctctctggaagattccgtttccttgatgtttccagtttctagaggccacctacattttttggttcatcttcagaaccagcagcatagcatctttggatctctctctttctctctctctcacctctacttctaccaccacatctctttccacctgtggctctcctgcctctctcttttggatctactcagataatccagggcaatcccccgtctcaaccttaacctaatcacatctgcaaagtcccttttaccaagtaaagtaacatattcacggtgttgaagatgaggatgtgatttttgtggcagggagtatctgttattcagcccactctacctagtaccccaccaggagataactttcttttctcagcttctccaaggatagaaaaacgtgatctatttttctcctcaattactattttcctgaaatgggtttggacccctaaatagttacatgttattacattctcagcctcaaaaagtccagatgatcttttattgggcgtctttttcttttggcttccaagctgcgtccacaagttaaaatgagtttggtccagcagcaagccactctgtgctctctgccaggcatctctggtttgggcatgagcttctcagcctcatgctttatgtaaattgactgagacttgatcaggccatgtggtctgaggatctaaaaataacaattttgctctaccttcttttcctgatactgtaaactcagwctactttttttttttttttttttttttgagtcagagtctagccctgtcgcccaggctggagtgctgtggcgtgatctctggagtgcagtggtgcagtctcggctcactgcaacctccatctctggggttcaagagattcctcctgcctcagcctctggagtagagtagctgggactacaggcacgtgccgccacacctggctaatttttgtatttttagtagagacagggtttcaccatgttggccacgctggtcttaaacttctgacctcaggtgatccatccgccttcacctcccaaagtgctgggattacaggagtgagccgccacgcccagactacttcttcatttctgagaaagaaacacaattcggccgtataacaaccatttgactctcccttctccttcttgtgtctctatctatgcatacagtagtgaaggatcatttgaattacgaagctctcctaaaataccaataggctctaactttggcctatcatttgggttatcattgccttatcatttttgacaaatagtttttttaatatataacaccttatatctgactactatttgacagtttccaaaacactttgaagatatggaactttgattctcacagcaaccttatgggacaagtagaacagagattgttatctgcattttacaaatgaggaggctgaaattagctaggtaggtagagccaagatcagactgggtttactgggtccaagaccagtgagctccatgcaccgactaccactgtagaaaccagattaaaagattcagcaacagagctttgtatacagcagcttatcaattgacttaacatcttataccttccctgatcaagtttccaccaggagctgttttcttaatgtgaaaccgatgctaatttgtgactctctctttctaccaaaaaacattctcatcatctcgtagggttgggctggagggggttttcggagctcatttaaagccgtcctgcatcttcttgaacccttgaccctaaccatcctggacaggtgagctcttaaaagtgagtcctgcctttgaagctgyaggttaagaggtaatacgatccccatcgctagttccttctgggctctagacctcagacattattttcaattcatcatttagtgtagcttccttctggcttcaggccaggccacatattttcttggtcttttcagattttacaatcacactgtctccaccagctccagaaatagatctccagaggcagaaaaaagaaaattaccaagtcatttctcaaatgccttttctccggctagacaacatcaatcttggcatggaggcttctttcctcaattgcttggctggcagggagaaaggataatggaggggctgctgtgttgactcagtgaggagagggaggccatgggtcaagacagacgctgcttcgggtgttctctcttcacacattttgagaggtttccaaggcccaagactcctagaaaatcaaatgagagccttatagaacttgtgcctcagtgcctgggacacagagagctctgcataaatatcaaccaactttaaaaaacaacaacctcagccgggtgcggtggctcacgcctgtaatcccagcactttgggaggctgaggcaggaggattacttgaggtcaggagtttgagaccagcctggccaacatggtgaaaccccgtctctactgaaaatacaaaaattagccaggtatgttggttggcgcctgtaatcccagctactcgggaggctgaggcaggagaatcactggaacccgggaggcagaggttgcagtaagccaagatcgcaccactgcactccagcctgggcaacagagtgagtgagactccgtcaaaaaaaaaagacaaaaaaaaaaaaaaaatcccaccttgttttacagatgaagacaccaagccccagaggtgggggatactttgcccatggtgtcacagccagtcaatggcagagcaagattcgaagcctcagtaatttctcaataataccaacactgctctttataaactttttttgcattcagtgtattttattgaattgaaaaatcattcctttgatgtgtcatctaaggataggctctggaatcagacaaacacaggttgaaatgtttggttttatcatgtactagttgtgtgacactggacaagttacttaatctcgctatgcctcagttttctgatctggsaaaggaaagtcatattaatgctcctctcataagactgttgggagggttcaattagacaccatcactgaagagattagcatagtggccagcccaagactgctctttcaactactgggttggatgtcctaaacgcttctctctggctagctgctctaaattcacttgtagcatcctttcttaaatcccattttccccatgttgattattcttttttttttgagatggaatctctctctgttacccaggctagagtgcagtggcgccatctcagctcactgcaatctctgcctccctggttcaagcgattcttctgcctcagcctcctgagtagctgggactacaggtgcatgccaccacacctggctaattttttgtatttttagtagagacaaggtttcactatgttggccaggctggtctcgaactcctgacctcaggtgatccacctgccttggccttccaaagttctgggattacaggcgtgagccactgtgcccggccccgttagttattcttgtgctaatttcctgatctactgaaccaggtcacattactatcccttcttccaatctgagcactgagtttgtaacttggcatgtttagagccatagggatgggaacaacattgcgagactctgtggccttctgcatccaaccagaaatgttcacatattcatgaagggaagagccattttgttttctaaatgacccttcactctgtctctgttgcaccccaccaaagctacccacttcttttctggccaccaacaccgactagagctttgcttatctgatgaggagggcaacctattaaatttttctggttgtttgaatcaactgttttcttgtaaaacttgaataagactaaattaaacaactagtctttctgtggcaagcgtttaagagttccaagattacttttctctaaaatagagaatcacaaaatctcagaattgaaagtgatcttaaagatcctttggttcaacacatcctttgctggaatctcatcccgttccccaaatcttcagtcatacaaaggcttggcaaaaattaacttgatgagttttaggttctctctttaaagtaggtttagagggaagctaagatcccagctcaataattcacatctcaagctctgaatcctttgaaagcctaaaccatgagctcaattccaaattcctcttatttctttgtggcacaagctcttccagaaatatcttccgcgaaacagcataacctcatctaggaaacatattcttcctaatcataacaaacagtggctctttaggcaaatcaccgtaactaattcgctccgctcttcacatgccaagcctggcccacacccacatcccccagaaccagttgccaatgttctgctgaggccccttgtggcttcgacccacttctgtggggaggtaattctcaaaattgctctattttagtttattattttattttggagacaggatttcaccctgttacccaggctggagtacagtggcacgatcatggctcgctgaagcttcaaactcctgggctcaaacactcctcctgcctcgcctcctaagtagctgggcctacaggcttgagccaccacatcttcagaaagatgactttcttttcttttttctttttttttttttttgagatggagtctcactcttgtcgtccaggctggagtgcaatgacgcaatctcagctcactgcaacctccgcctcccgggatcaagcaatggtcctgcctcagcctcccaagtagctggaattacaggcgcccaccaccacacccggctaagttctgtatttttagtagagacggggtttcaccatgttggccaggctgggctggaacttctgacctcaggtgacctgcctgccttggcctctcaaagtgctggaattacaggcgtgagccaccgcacctggccataaagatgactttcacgtatcattattggagaggtttttagtttcaaaaatagatctcctttaaaaaattcttttaaacagtgacctgtttggaaacagggctgtttgggcaatttggaaacagatgacttccacaaaatgtattgctccccccttagtcggaactgacagtgagtgaaattgtgggctaaatctatttaccttcagcacccctgctcctgtgctgcattcctacctccttctcacctcagggccctcatcgctcccatgttattttctcctctacccagtccatccaaacctcctctcaggaaagaacctgaaagccttgctgagatgtaagcaataggtaagacctccccattgcctctcctggggatattcccatcgcactcagagaggcaaagctgtgaggtgctgagacacaactcagccactgtgcagagagatgcttcctttattccttccttcctttagtgctgcaggcgccaggcgttgcttctggcacgggggagagagcagtgggcagaacacacccagtgcccgctctcagcaagtgtcccttgttctggggaagaaagggatgggaaggggctcctgagatcccatccacgccaggtgacggatgctcccttgttcccagtgccaggtcaaaagtggctgaacagacttattgttctccaggttagtgatatatcctgtgagctttggaattgatgaaatggtgacaggccctgctctgccacctcccaaggcatgacccttcgtctcctcctcatctgtaaaatggggatgatgatacccagctcccgtagctgtggggaggatgaagcaagatgatacatgggaagggtagtgcactgcgcatggctctcggtgagcccctcacagatgacactgtcgttagaaggagctgagcccarccaggagacgagacagagggagcagggagagcagagtcggggccagtgatttccttaagagggatgtgcccttcctcccaaagtgccaaagcaacactcaaggatccacagccttgggagagtctagatcctagattgctacttgtataattttgagatttccctacatacatatatttattttaagaagtaaagtgaattagccgggtgcagtggttcatgcctgtaatcccagcactttgggatgctgaagcaggtggatcacctgaggtcaggagtttgggaccagcctggccaacatggtgagaccccacctctacaaaaaatacaaaaattagcagggtgtaatggcggcacctgtaatcccagctacttgggaggctgaggcaggagaatcacttgaacccgggaagcaaaggttgcagtgagctgagatcgcaccactgcacttcaggtgacagggcgagactccatcacacagacamacacacacacacacacacacacacacacacacacacacaagaaaagaaagggattgacatgaattttgttcgaagatttcacaatgccacttgaggtaaggagggagacctgaggacagtatcacattaggtagraggatgggaggataggaaaggctaccctttttggggatagcccaaaaaatgatatgtaaggcacctcacatgccacagctacacttctcacatcaattctgccaagagaggacttcatcattgcacctgagcaaatcatggctcagcatgagaaagtaatttgcctaaatagaagcaggtgtcaaaccctcatcattgtgcctcacatcacctctttccattacacactttcattcactcttcatgatccacaatcatagaaataattgttgtccacagagtgctcaaaatgactgaagacatactcactactgatrttcacatttgtcactgaagatcattcttggatctcttttcatgttaaacttaacctggtacacatcattcctttcatttgacacttatttagggtataagctcacaatggggccaccttgatctactagtcagaactgagtgtgactaataagatagcagcttcacagacgtgcctgtgtacagatccacatcacctgcaaatcacacagtctctaaaaatgtgtctgggaggtcccctcccctccagatcattataattagaaaccaatgaggtggtctcccagagcacaagcttgtttgtaaatccaatgctttagcaagagaatgttctttcgggccagctggcgagcagaagtaaggacagaggcgaccagtatttctaaggaagctgtagctatcatttccctcaaatcttagggtgtactgtataggagcaagcgaatggaggtgtcagaaggatgtgaaggaggaggatacggtgagaactgcaactgctgagggattggccccgggggatggtggggtggggggtggtcaggaagcatgaggaagggtcaaatgggcagattccagctcattgataggctgggcttcaagatctacttgttgaggacaatatataatgatccccattccccacacacccactaattccacccacaaagggtgttggaacaaaagaatcaagcctgaggacaattggtcaattgatggatctcagagctggaaggtagaatgcttgataggatgtcagaagagttaagagctaagatttcccagccagtgtgtcctttctctttatttgaggtctctgtgttgcttctttcttccctctagcagctggcttggttaggagaacacacagctgcctccagcttgggcaggaccccaccttaggccttctggagcaggtgccaagaagacccctggtcttgcttttagaataggctttagatttgaggcattggggtccacggagtccaccagagccacaccaacattgggatttgtggccagatagttaaggcaataaatagtgacatttccccggacttgttatctgaatatgtggtcaacaaattcaacaaatattttgtcaattatacgctatgacaaagtcttcgccctcatgcagcctgctgtgttctcgtagtggacacacastgaactaatattagaaatagtgtcwtgtggtgatgagattagggtggtagtcagctactttacaggatggtcataaaaatatctctgtgtggaggtgatatgtgagcagagacctacattgaatgagggagggaaccatgtaagtatttgaaggaaggttttccaggaaaatgaacggcaagtgcaaagactcagaagggagaacaagtttagcaagctcacagaagaccaggaaagccaacgcaccaggtagacagagtgaggggaacaaagacagaaratgaggtaggggaggttgccagccactgaggactgtcttaataatctgtgtcctccaagcccagcagaggcttgtccctgaaaccctgtgatctgttaggcagtcaaatctcagtctcagttaaatatttggatgaaatcagcaatggcttgaaataattgatatggctttccagatgtcttgtcccaattctaatagaggaggagaaaccggcatgccaagattctaaactagtttgtctcagagctttctaccactcaccttactctcccaccatctctaaagggattagatttactgtccccattaaagagtgaaggagctcatgctgcaccctccagtctagggctaggagggatgggcgctgccctctccagcctgatacgctccttctcactcactcttagctgaatattctcatcccactcaaacctagaaagcctgcttatttttttaattacaaatattttataattataaaatcccttatttatttgtgcatgttttaaggataagctgaatcatgtaacctgtgtctggtttacctacatatatttttttaatagagaaattactcttccttgggaggctgaggtgggcaaatcacttgagatcaggagttcgagaccagcctggccaacacagcaaaaacccatctgtattaaaaatatgaaaattagccaggcatggtggcaggtacctgtaatcccagctactcaggacgctgagccaggggactcacttaaacccaggaggcggaggttgcagtgagctaagatcaagccactgcactccagcctgggcaacagagtgagactccatcacaaaaaaaaaaaaaaaaatgtggatgggtgcagtggctcacacctgtaatcccagcactttgggaggccgaggcggggtgggcggatcacgaggtcaggagatcgagaccatcctggctaacgcggtgaaaccccatctctactaaaaatacaaaaacaaaaaattagtcagtcatggtggcaggcgcctctagtcccagctactccggaggctgaggcagaagaatggcgtgaatccgggaagcggagcttgcagtgagctgagatcgtgccactgcactccagcctgggcgacagagtgagactccgtctcaaaaaagaaaaaaaaaagagagagtgagagaaattattcttccatcaatctttactttttcatttagtagaaaataaaattatttgggctttaatatctattgtccttaaatagaaatatgatttaatcctaaataagcactagattctattatcaaggctctactgtaatttttcgcaaatccagggaggggacgagggtattctcattagctcattcccaagccattttattaatgaacaactgatcattacaagagtcttgattattttgggacaaatttgaattcttgtagcttccaatttttgttcagaattttgtcttctgaagccattgaagagtgaaggaactcatgccacaccctcctgtctagggccaggtggagtaggatgctgtcctctccagcatgatgtgctccagagcagcctatcccctgatcccaggcttggcacagcccttcacctgaaggccacccatgtcacatatccttaatgccctctgctcatttcttttttttttttttagaactgaggtgtcttttatttcaaaaacggatctgattttcctaacaaaactttccccaacacgttacctttttctccaagtttcctctgtctgtacgtgtatgcacatgcatgagtgtgcacacacatgtatttttaggtggaagtacaaaaaattgaagtgtattgaggtattttggaaaactctataaatagcttccttgcattgaggggaagagggccttttggccctttgatgataataggttgttatcttctgaggtgtagtttgcgtcctcactcctctgggtggtctgctagtatgtgctgctgacagatgtagttgcccaactcagcattctttgctaaaacatctcccctcaattcttgttggccttgcagatactgttgaatcactggttccatttgtttgtttgtttgtttgtttgtttttgagacagagtctcactctgttgcccaggctggagtgcagtggcgtgatcttggctcactgcaagccaagctccgcctccctggttcatgccattctcctgcctcagcctccggagtagctgggactacaggcacccgccaccatgcctggctaatttttttgtatttttagtagagacagagtttcaccgtgttagccaggatggtctcgatctcctgacctcgtgatccgcctgcctcagcctcccaaagtgctgggattacaggcgtgagccaccgcgcccggccactggttcaatttttatatttgtttccagagaaccctctaggttctctctaaacacctgctttccagccttctcagcatccaggtggttgttcttcagacactcttttcctctggttcatcaacaagtacttccattcaaagtggtgctaaggaataaaaacgactgtccacatgtggtctcgccggcccagagagacatgccatttaagctatcttcactgtttctccctcattaggtagatgctttttcctctcaagttttcttcctctccatggattcctttctatttgtgaataacgttaagctatttctctgctccctttcctcaaaatataaacagactcgatgtttgctacctaattttctttttcatgcttcatctcacctttgttccctgtctttaagctttctatctgggcatgtgtttttctttaaatctgcagcatttggtaccgtgatcaattatcctgggtaattgctcctcatttaagaacccctattctttctcattaaagactagacaagaatacgtcctcccattgaccaggtgcaccagatctcttacttatccccagttcgcctttttgcagtttagtgcttaagagctcattcacagaggggtgtaatttgagtggcttgcatgtacttagttggggcagctggctgtctcttcccttctggctgtaagagacttagcttgcctctgagctccttctctttggggtcgcccagggctctgccaaatgcacaaaaaacccccccccyttttttggtgggggaggtcatgcatctttacaaaccttgatctaattaagctttctcctctagttcctaggtatcacggtaatgactgtccactttgtcattcttaggttgtaaaatgaagctaatggccctttctcattgcttctagctgcactgagcttgtcaaactccacagctccaggtctccttgattggtcatcattatttgctgctgttataaatgtgatttcttcttggtgattagacataccccctaaaaatacatgtgttaagagttcctgtgctgtgtgtttgagaattcagaagagtacaaaagtgggcattcgaagagagaggaccctcttaggatccctaacttaaaattccagtcagcagccctttggagatgtaaattgaggaagcagctcttcttttggacagcttaatgatgtgtagttaatagtaagaggctgatgggcagatgcagtacagctgggcttaggttagcctttctcagctctccaaatggcacggtgattacaaccattgagacacacagtcctacccggaatcaataaccaaaggcacaaagactttggcggtggcttggcagtgtggcctgttctgtacacgcagacaagtcattctgccccagccagtaattgatacctcttttttaaagcctgactcaggcttggcagttgcctgtgcaacaaatagcccctccagcaactggaataaagagtgctagatttagggtcacttgtcctcttacctgagtttactgagtttcactgaacctgggagaaactgagtgtaacttcttggtaacatataagcctgggagccatacaatacatagctgctggagctggttgatgtattgttaagccttgtatgtaaaattggctttgagttcctgtgtgtcaggttattggatccatttacaatttccagcatctttccagtttccctcaaaaatctcaacaagaacaaaaactaaataaacgactgtattcaaaatgggcaaagaacttgaatagacatttctccagagaagatgcacaaatggccactaagcacatgatgctaagcacaagatgttcaacctcacggatcgttagggaaatgcaaatccgaagcataatgagttgccatctctcattcattaggatgactgttatcgaaaacagaaaattatgattgttggtgaggatgtggagaaattggaaacctcgtccactgagagtgggaatgtaaaatggtaccgccatgatggagcactgtatggatgttcttccaaaagttaaaaatagaagtgctgtatgatctagtaattccacttctaagtatctactcaaagcaattgaaagcagagtcttgaagaggcagttgtacccccatatgtcacagtagcattattcgcaatagccaaaaggtagaagcaacctgtttgtataaatggatgaatagctaaacaaaatgtggtatgtacatgtaatagaatgtcattcagccttaaaaaggaaggaaattctcacacatgctacaacatggatgaaccttgaggacattatactaagttaaaccagtcacaaaaagtcaaatactgtatgttccacttatgtgaggtacttagagtagttaaattcaaagacagaaaatggaatggtggtattcaggggttgggggtggggagaatgaggagttgtttaatgggcacggaattttagttttcaagatgcaaagagttctgaagatggatggaggtgatggattgcacaacactgtgaatatatttgaaaccactgaaatgtacacttaaaaatggttaataaggctgggcacagtggctcatgcctgtaatcccagcactttgggaggttgaggcaggtggatcacctgaggtcaggagtttgagaccagcctggccaacatggtgaaaccctgtctctactaaaaataccaaaaactagctaggcatggtggtgggcacctgtaatcccagctacttgggaggctgaggcaggagaatcactggaacccgggaggcaggggttgcagtgagctgagattgcaccattgcatgccagcctgggcgacaagagcaaaactctgtctcaaaaaaaaaaaaaaaagaaaaaagaaaaaagttaataatgcacagtggtgcctgtcggggctggggttgggggtgtggggggagggagagcattaggaaaaatagctaatgcatgctgggcttaatacctaggtgatgggttgataggtgcagcaaaccaccatggcacacgtttacctatgtaacaaacctgcacatcccgcatgtaccctggaacttaaaataaaaataaaaaaaaaataaataaaaacggttaagatggcatttaagttatgttgttttaccacaattttttttttttgagacggagtttcactcttgtctcccaagttggagtgcaatggcgcaatcttggctcactgcaacctccgcctcccgaattcaagcgattctcctgcctcagcctcctgagtagctggaattataggcgcccgccaccacacccggctaatttttttttttgtattttcaatagagactgggtttgactatgttggccaggctggtctcaaactcctgaccttgtgatctgcctgcctcggcctcccaaagtgctgggattacaggcatgagccaccacgcccagctgtttcaccacagtttttaaaaaagcacaagtgaaggatgccatcttctctcagcagcccaggctttggaggaacagactagaaatgaaaggaaaaaaggaaaacagaaaacaaacagccagtggaatggatcttgtctntatatggaactaattgcaaatatatatattttttttacagagtcatttttctctcaagaagggagctgcagccttagggattggaacagacagcgtgattctgattaaatgtgatgagaggtgagcangcatcggcaactcttgttggttagcaatttgcaaattccacacaagtagtgccttttggtctgaaaataggagaggaccacggggcagcaagtccacctccctcccagcctctgcagccttcgtttctttttaacatgggctcctgcttctgttgctcagatgtggttccttgatgccatggagccttccacagcccttgcctgaatcaaaacctttgttaaatccatcaaaatattctacaccaagaaagtgcagaaagactttcatcacctgggcacgttagcaacagcaggcactttgagcactgatttatggaggtgtcatcactttgggcaccatagatagtgtaagcttgatggggtgattacaggaggggacgtagtatagggagcaggaagtaaataaagcaccagcaactcaacaactggaaccagaggactcaggggaaatccctgtcttaattgacacctgaacttcacagggactctgggattcagtgcggtgctttgtgggagagattttagaatgtccacgtaaagtatcactggcctgtaggcctgaagcctactaaaaattagattcagtctctaaagtttcattaagaattttcattaaatttaaaggaagccactcaattggccatttatttatttatttgtatttattagtcagatgtgtactgattgcccaccatgtcactaggctctagaaaagcaccatacgttgatcccggttccctgccaggatgtgagctaggtgggaagaggcagtgtcgtcagaaggagatagttacagggtggaactgcatggcatgaagtacacatttgaactttgagaagacctagaaagcttsatgcaacaggcaggaattgagctggatttttaaaattaggagtgagctggacaagtggagggaaaggcaagggcagttacagaagattgaataccagcagcaaagctgttacaggaaaggggtcctgatccacatcccaagagaggattcttggatctcgcgcaagaaggaattcagggtgagtccatagagtgaaatgaaagcaagtttattaggaaactaaaggaataaaagaatggctacttcatagacagagcagcctggaggctgctggttgcccatttttatagttatttcttgattatatgcttaacaaggggtggattattcatgcctcccctttttagaccatatagagtaacttcctgacattaccatggcatttgtaaactgtcatagtgctggtgagagtgtagcagtgaggaggatgaccagaagtcactctcgtggccatcttggttttggtgggttttggcaaggtctttatgacctgtatcttgtgctgacctcctatctcgtgacttagaatgccttaaccgtctgggaatgcagtccaataggtctcagcctcattttccccagctcctattcaagatggagttactcatattcacatgcctctgacaaagccacaggaggaggaatgagcacctcacggggtccagaagccaagccttagcagaggcatgggggaggggcagccacagcaaatacggtggctcacgtggaattcagaaagctctaaaaatccggctgggggcagtggctcacgtctgtaatcccagcattttgggaggccgaggcgggtggataacctgaggtcaggagttcaagaccagcctggccaacatggtgaaaccctgtctctactaaaaatacaaaaattagccgggggtggtgatgtgcgcctgtggtcccagctactcaggaggctgacacaggagaatcgcttgaacccagtaggcagaggttgcagtgagccgagatcatgccattgcactccagcctgggcaacaaagcaagactccatctcaaaaaaaaaaaaaaaaaggaaaagaaaaaaaaaaaaagaaagctctaaaaataagccatgtttacctctgttagcgaaccaaactgaggttcactcgccagcagcagtgaggccaaacatccacacacaggtttgcagcaggagaaaggaggacatttatttgcagggcaccaaccaaggtgaattgagcagctcatgcttaagactcagcctccccgatggcttgcaggtaggggtttttaaaggcagggataatttcaggaaagcagaagttacaggcaaattgcaaatcaatacatggtggttacacatcagtttggcccgaaagggtgggatatcttgaagcaggacttataggacataggcgaattcaaaggttttctgatttgcagtgggttaaggaagagcagctttgcttaaaattttgaggtcagcagaaaagaatgctagctctggcccaggggtgtgcctccctccaggcccttcaggaagaaatttagagcaaagaaaggtggtcagagttcagacctcagtttcccctcatctgaggtttacgtaccagccaatccatttggtgggagtcctggagtcctggtttgtgaaaaacagcccaaggatgtatgttaagatgttacctttagtttctacagggaatcaaatatcctgtggttctaacttcctcagaagctgatcgtttacttctcaggtcttgctagtgcctggaatttcccttgaaggaactcgtttccctttattttcacacttagaagtattgcctgaagaccactaaaagggctccctgccccactcagctctgggtgatgaggttaaagaagcttaccactttcttgtttacacctttttatattgcctgattttgtttgattgctggcagagaacatagctttgcaatcagaaaaaaaaatggtgttattttttcttttggggcaaggagagctaaagttagaatttaagctggataggtctggaaacaaggtaactggaaataattttcattaaagaacatgagtgaagccacccttcaggaggcaagataggcgagaggatctccagtcaggaaggccagtaggaggccctagcaattagacaggcattaaggataaaaggatgggagtgaggcaaacacattttggaaaagaaattgcctctttttttggcgggggaggggatggagtctcgctctgttgcccaggctggagtgcagtggtgctgtctcggctcactgcaacctctgcctcccgggttcaagcgattcttgcgcctcagcctccctagtagctgggactacaggcactcgcaacacgcctggctagtttttgtatttttagtagagacggggtttcatcatattggtcaggctggtcttgaactcctgacctgagatgatccgtccgcctcggcctctcaaagtgctgggagctgcctcatatttttaaggctaccagtgttcctcagtagccggtacttaagaactgagatttgaagagaaaactggagtttaaaaatgtgaagaataaatgtttagatgactttaaaactttcttaatctgtagttgatctgttatgggtgargagcctggagttgagggaagaatcacctagagggccgtggcccgctggcctaggcagtcttccttgctagccttggtagctggcgttctccagtgaaccccagggggctgagaggtgactggcagagcagtaggggctcttgactctactcttcaaagcatcggcatcactgctcctactcctgtgaaaatcaggtgtgaccgcagaagtggtcttggatgagtccaccaggccagctaggcggctcatcatgggaacaaggggcctgcctgaggacatctgcccatctaaaggcaacactctgctcacaagagaagttcaggcctagaagaaggaagaccaagaagggaaaacagaggagtggtgggggaaagggaccatggacagggctgccaggacagaggcaggaggggtttgccatgcaccaccaggagggcggagaaggaggcaggagggggatgctggagagccggcgggacctacgatcagtgactggccagggggcctcaaatgtgaaagtcaaagatatttatttcaacaatttttttttttttaagacatgaggtcttgctctttacccaggctggagtgcagtagcccattccagcctggaattcctaggctcaagcaattctcccctctcagcctccttagtagatgggactacaggcccacactacgacacccagctcatttttgtttgttcgttatagagatggagtctcactatgttgaccaagatggtcttgaactcctagcctcaaacaatcctctcatctcactctcccaagtagctgggatgagtcatcacacccagcttatttcaacaattttagaagtcattagaacaactgaaatacaatactaaaaagtatgcttttttcagaaaatggctcactctctagtacccctgtctactcacatacaccccttgggagagacagagggaaatgggccactgggcagctagggctcggggctttctccctttgtgctcataagctttgtgggatgagggaagaaggaggggtcgggagaggcaggagtaagaaagaaggaagtgggaaagagcaaacagagtaagaaataaaaggtgggaaaaaataaggcctacgagaaaaaagtttgtgacggaaaatacaaagtaaagcaaggaggagagatggtgagggcaatgtgagtggaagccagaaacacagtgagagctttagaaggaataaatgaccatatttaccatttaaaaagcaatatatgctcactttttttaaaaaaaagaaaataacagaaaaatcatagttccactgtacaaagatcatcgctaataccacattggtgtctaaacctttgaaactctttttctaagcacagaaatttgttgggttttttttccttttttttttttttttttttgagacagagtcttgctctgtcgcccaggctggagtgcagtggtgtgatctcagctcactgcaagctccgcttcctggattcacgccattctcccgcctcagcctcccaagtagctgggactacaggcgtccaccaccatgcccggcattttttttttgcttttttttttttttttgtattttttagtagagatggggtttcactgttagccaggatggtcttgatctcctgatctcgtgatccacccaccycggcctcccaaagtgctaggattataggcgtgcaccaccatgcccagcctcatctttctttttctaattagacatgataacatgagtatttttccacatgattacaaacacaaacacacttaactgtataacattttacatatgaatatgtcagaaagcattacagtacatttagagagctggctttggagctggctttggagctggattatttaaattccaatctcagctccagcactagcctgggcaaatgcctctctgtgcctcagtttctttatctgaaaaaacaaaaaagtaatggcgcctgcttcataggattgttatgaagattcaatgtgttgacaaatgtaaaatgctgaaaacaatccgacaatgggataagtccaaaatatcagtcccctgctatacatttttctatttcttgtgttactgttacgaataacctttgtatccttcagtgaacgtccttatgcatccatagcttctccatttaggacaatttctttctattcttactaattgaaatgatatgaatgtttttaaggaaatggatgcatcagattaaccttgcaaaagatttcatcaatttgttctcctagcagcattgtatgagagtatgttggaaaaaaattttaactgtgctattagctayatggcatctttgactctatattgataattcacatcatctgtrtgacatgagtttaagactgagagcctggccctaatggtttaagtgacattgaagtgtttgggttcagaagccaaggagaaaggtgtggacaatcatttgtagccaccattggggtcagaatcaattaaaacactctcggcagccattttatttttattagcacgtccttgtaaaagtcagatgtacagttcagaacaccacgtaaggctgacaaggtgagagtcttcatgcttgtttcccgtaatgcgctttgtaaagttcattcagccttcccaaaacacaagcctggacctgccctctgtggctttcaattcttgtagttacccgttcctaccacacattagtctatcagtggctgggtgataggttttattatgttctgcagacagttgaaggttcacaactgagaagaaatgtcccagtgaaagagaatagtctgtgtctttctagcaataagcccaatgctgcatgtggaggaagatcctgcgaggtacatttttttttctttttttctttttgagacaaggtctcactctgtcacccaggctggaatgcagtggcacaatctcagctcactgcagcctctgcctcccaggttcaagagagtctcctgcctcagcctcccaagtagctggaattacaggtgtgtgccaccacgcccagctaatttttgtatttttagtagagacaggatcttatcatgtcaccatgttggccaggctggtcttgaactcctgacctcaggtgatccacccgccttggcctcccaaagttctgggattacaggcatgagccaccatgcccgacccggtaccccttcttttttttttgagacggaatcttgctcttgttgcccaggctgctggagtgcaatggcgcaaccttggctcactacaacctctgcctccagggttcaagcgattcacctgtctcagcctcccaagtagctgggattacaggcatgtgcaaccacacccagctaattttgtatttttagtagatatggggtttctccatgctggtcaggctgctctcggactcctgacctcaggtgatccacccgcctcgacctcccaaagtgctggggttacaggtgtgagccaccatgcctggccaaccccttcttaattagcagtcacaggggctaactttgggtgacagttcaaagtgaaacacggttctcagttaaaacaaaaaaaaaagttataataaatctttgtttgtttggactaggttcttttagagttgaaaattaaaaagcattttaattttattaaatatacttaaaaaatggaataagataaggtaatgtaaaacttcagttctcgtggctttcattttgatgtgaagcattataactaaacaggaatattctattttgtaaaaattacttattaaattcgaaagaagaaaatgtgttaggtgaatacaagatttcataagttacagcttgaggtttcctttccttgttaacaaaaagttgaatattcagtgatgaggttgatgaatttttattcatgtcattcatatttgcaaaatttgaattagtggaatctagattcatgatgtgtagctgtagctaagaatagaaaagaaaagtgcattaatatagagaggaaaataaacatttgtgaaagaaaacagagcaatatttcagaatttgcttgggccactgagcaaaaagatgtttcccaaatatccagtcaagggaagaggagagaaaatttctattgtatggatgataatttggaaggatggggagttcctatatgatggaagtgagctcctgtgagctccatcttttggctgcaggcagtggtcttgattggaacacaatggcagacatggtggatgtagtccagtctagcgtgagatgagcacaggaagggaagcaccatgatagagaaagtactggctgttattgattcacatccagttctgcaactaggggaaggattatgggagtcatccagataaagagaagaggcaaaaatgtcccaggcagacgccacagcacattctaaaccaggtccccaacctttttggcaccagggactggtctcatggaagacagtttttccacggacagggctgtgaggggcgggggtggcagatggtttcaggatgaaactgttccacctcagatcatcatcaggcattagttagattctttttcttttcttttaattgaattaattaatttatttatttttgagacggagtctcactctgtcgccaggctggagtgtcctggcacgatctcagctcactgcagcctctgcctcccaggttccagtgattcttctgcctcagcctcctgggtagctgggtttacaggctcacgccagcacgcctggctaatttttttatttttagtggagatggggtttcaccatgttggctaggctggtcttgaactcctgacctcaggtgatctgcccgcctcgacctcccaaaacattagttagattatcacaagaagcacacaacctagatccctcacatccgcagttcacagcagggttcctgctcctatgagaatctaatgccactgctgatctgacaggaggcggggctcaggcgggaatgctggctcagggctcacctcctgctgtgtgaccggttcctaacaggtcaccattagtactggtccgtggcccgggtaatggggacccctgttgtaaaccatggatgtgagagagaacctggcttgttcaaggaactgaaaagaagagaggacttggtcagaatgtccttgtcatgtgggccttatgagccatgttaagccgtttggacttctgactaaaagacatgggacatcactgaagggttttgagcaggggaacaacagcatatttttgtgttagaaagattattttaaatgcagagtgggcgggatgagagactggaagttggtggatgttgtagtcatatgaatgggagatgatgaatagcgggccgaccagatgcagagcaagggacagggagtgctggaatgaacaggaagtgttggctgattggtgtgcaggttgagacaggaggcaaggatgaatgccaggcttctggcttgccagctaagtccaggcgttgctattctctgagataagggaccctgtctgaggtgaaccattcagatttggagatactgagtttgacgaggttatgagacaccgaagtgagagtgtctggtaggcaggtggaagtatgggcctggagctcaggaggtacactagggaggccgtgcagaaggtggcctgggaaggaactctcaggagcatccacacttcagggacaggcagagtaagagcagcctacaaaggagattgaggaggagcagccagagttgtcagagaatcagaaaccggggccacgagggccatgagagtgtttccagagaaaggagtggtcagctgaatcaaatgctacaacaggtgaaatgagggccaacaactgcccatcagcatgacttctaaggaggcggctgatgagtttggcaagggcagtttcagtggaggggtgagggcagaaggcaatttgcagtgggttggggtgaggtgagtggtagatgagaaaagggagaactaatacaggcaaggtccaggaggtggagccgtgaaggggaggaggcagggctgaagctggaggggagctttgaatccagggtggcttttggctttgttgtttaaaggagaggggcttactgcccatttcgctatgaggtggaggacccactagagaggaaatgtgaattatggaaggaaagaaggaaggaaggaagggagggaggaaggaaggaaaaggggaggggagggggaaggggaaggaaagaaggaaggaagcaaggaaagaaggaatgaagaaaggaaggaaggaaggaaataaaaaatcgcaaaggtttaattttcgttattgagtttcctagtcttttgactaaaattgtgtaggatctttccctgagaagctcacacaaactctgaaattatttcaaatcctaaaattggaaggaaacagagaggagaaagcaacgggagagtgatgtgtgatggcaggtgcaaggaggactggggagggatggggaggaaggaggggaggggccagcctgggcttagcctatgttgacaagctgctaatgactttcaaatcagacacccttagagttggaaaggtgctcagaccttagctcatccaacttttttttacattgtattattaaaataatttcaaatttaaaggaaaattgcaggaatagtaaaaagaatgctcatataccttacactcagattcaccagttataaacagtctgacacatttgctttctctcaatatatgctgtatataaaatccaatattacatattgagtgtaatattgtatgtattaattatatatgtatgtatatatgcatattatatatatatagagagagagaaccatttgcaagctccttgcagacatcacgctgttttaccccttaatatctcaatgtatgtttcctaaaaacaaggatattcacttacacaatcacaggccaattatgaaaatcaggaaatgtgacatagatagaatactattattaaatgtacataccttattcgtttcttcagttgtcccaatagtatccattatagctatytttcccagtccgggatcacacgtggcatttagttgtcatgtctctttggtcccctttaatctgcaatgtttcctctgcctgcctttgtctctcatgacattgatgttttttatgagtagagaccatttagtttgcaggtgatttggattcatctggtgttttcccatgattagattcaagtgatgcatttggcttaggactttcaggaggtgaagtttggctttcttgagtgcatctcatctggaggttggtctcattatcagtaatatcaactttgattttttggtgaaggcagtgtctgccaggtcactccgctatgaaatgactattttctcctttgcagttaataagtatcttgcaggggatgctttgtgtcagcataaataccccgttgcttctgaaatgttcacccactagtttagcatctactgatgatttttccctgaattattgttgtgatggttgcagaacagtaattttctaactccgtcattccttctgtatttattagtcctttcattccactgtagggaagagattttgtctttttgttctctctcttgctgtctctcatttattatcagtatggactcaaaactatttttagaaattaatatgctcggctgggtgcggtggctcatgtctgtaatgcagcagtttaggaggctgaggcaggcatatcacctgaggtcaggagttcaagaccagcctaaccaacgtggtgaaaccccatctctaccaaaaatacaaaaattagccaggcatggtggtgggcacctgtaatcccagctacttgggaggctgaggcaggaaaatcacttgaacccgggaggcagaggttgcagtgagccaagattgcaccactgcmctccagcctgggagacagagcgagattccgtctcaagaaaagaacaaattaatatgctctagcaccttcttccactcattctccctgctctcttccattcacctctttctcctcccctcagggtacccctgccattatctgaattactcataatttgttgtaaaaccttacagaaaataaatctgaccaagacgcatgatacctagtggcataggactacaagagtcattggctttcctagctcccatgtaacacaagaaatctgttagccattttgattaatacttttatacctactactagtaggtattagctactagtacatttatatacattttagcctttcttttaaacgtatcactccagctttataaattacagttagactacacttccctgtgctttttagtaccacactttatcatacaattgatttaaacaattgaaagtataaataacctggggtcattatattcttttgttaaattagctgaattgtaaccagtgcctgaggggtcgttagggatgctaattaactctttcgggtccttgggaagctgttcagcgcattgtagtgggatagacttcacagagacaccgaatcgattattcctgagcagggctgtgggaagccctctgagtggcatatttcctgtgggtgtagatgcagagaactcagggatgctagtcctgtgtgtacttcattctgccctatctcaggaaggactataataacagctgacactgattgagagtttatgccgtgccaggcacagctctagccactttacaaaattgacctaattaattcatttaattagagacacaaaatagtatattctttcacatttatctggtgctaacatagtttacaaacaacagttttaaacagtatgacaagttttctatcatagcccctcacaggggatatgtctaacatcacatggcttgtaagtgaagagtcagggtgtggactcagaagagaacccttagtgttcattagtttaaacagagctccttttttattgtgataaaatacacataacataaaatttccgatctgagccatttttaattgtgcatttcagtggtgtgaaatacacatattgtcgtgcaaccatcatcaatattcatctccagaactcttctcacattgcaaaattgaaattccgtgctcatttaacactaactccctaccaccccctccccactatccccaggaaacgtccactccactgtctctacgaattttactactatgggtacctcactcacatgaatggaatcatacaggattcgactttttgtaacttgtctatttcacaatgtcctcaaggttcatccatgttgtagcatgtgttagaatttccttcctttttaaggctgaataatattccatcgtatgtgtagatcacattttgtttatccgttcatccatttatgcgtacttacttgggttgcttccaccaatttttttttttttttctttgagacagagtctcactctgtcaccgaggctggagtgcaatggcacaatcttggcttactgcaacttttgccttccaggttcaagcgaatttcctgcctcagcctcccaagtacttagctgggactacaggtgcacgccaccatgcctagctaatttttgtatttttagtagagacagggtttcaccatattggtcaggctggtctcaaacccctgacctcaggtgatccacccacctcagcctcccaaagtgctgggattacaggcgtgagccactgtgcccagccttacttccaccattgactaataggaataacgctgcaatgaatatgggctgaaaaattacatcttcaagactctgctttcaattattttggagtagatacctaacagttgaattgctggatcacatggtaattctatctttaattttttgaggaaccatcatactttttcctcaactgtttatcattttacattcctgccagcagtacacagggttccaatttcttcacatcctcaccaccacttgttattttttgggtttttggttcgtttgcttgtttttcatagcagcctctttatgggtatgcagtggtatttcattgtggttttcatttgcatttccctgatgattagtggtgttgaggatttttttttcatgtgcttagtggacatttgtatacwgtttttggagaaatgcttactcaggtcttttggattggttttgttattgttgttgttgagttttaggacttctttattctagatattaatcctttatcagatatataatttgcaaatatattctcccattctgtgagtttccttcttactctgttgatagtatcttttgttgtacaagtttttaatgctcatgaagtcaaatttttctatttttttcttttgttgcctgaacctttggtatgatgtccaagaaatcattgccaaatccaatgttatgaatgttttgtcctatgttttcttctaagagttttatagttttggttcttacatttagatctctgatgtattttgagttaatttgtattttgttgtataagagatggctgctttttaaaaataagaatgacaacataattctcctattccggaagccacacatattcattgtagaaaaataagcaaataaaagaacctagatataatctgtcatagtatttgatggcatgtagtttaaaatatatttacatatattttaacataaaagacatataagtatttacttaacataaaagacactataagtatttactgattagaaatttgttttttacatagcaaatattatggacgacttgcatgccttagaaattcttcaatacaattctcattcactatttaataatccactgtttataatttatattacttaacaaatctgttgttaaacattaagttgctttaaacttttactattaaaaaatgctattataaacattattgcgggtaaatatttgcacatatccttgtattattttcttaaaataacttccggctgggtacatggctcacccctgtaatcccagcactttggagggccgaggtgggcagatcacctgaggtcaggagttcgagaccagcctgaccaacatggtgaaaccccatctctactaaaaataaaaaattagctgggtgtgatggcgcgtggctgtattcccagctactcgggaggctgaggcaggagaatcacttgaaccccggaggcgaaggttgcagtgagccaagatcgagccactgcactccagcgtgggtgccagagcaagattccatctcaagaaaacaaaaaaaactttccagacgtagaatttctgagcccaggactgtgtctatgctgagttatgatacttgctgtcatgttgccttcagaaaagactcagccagtttacacttccccagtactataaaggggtgcctacccactatgtcctcactcaggctaggaattaaaaccttaagtgatgtgtgtcaatctgatggatggagcttttttattattcatgttttcatttacagtttgataattagcaaagctgagtatttattttatttttgtaggtcatagttggtgtatatacttatggggtacatgagatgttttgacagacacaggcatgcagcgcaaagtaagcacatcatggagaatagggtatccatcccctcaagcatttatccttgcaaagttgagtattttatacttatcagttatttatagttcaaaaagaaaaagaaaacaaaactctcttttgtcatgtatgttgcaaatgttttctaaaatgtatcacctgcttttttatttcatctgttgtatcttttaaaacatttcaatttttggtagtcagagtgatcatcaattacttattttttacctttagtgtctttagaaaatgttttccattcttagaacatgttaatattcatttgttttcccctagaaattttgtgttattatttaagtagttgacttaactgaaatgtattttggtctatggtgtttgggaagtatgtaatattttcttcttccttccctccttctttccttgtaaaatgcctttgtaaaatgagtttggaagtatttcttcgttttcaactacatggaagaagttgagaaggattattattaatccttcgttaaatgtgtgatagaactatccaggtgaagctattaggtcctgggcttttctttgatgggagatttttgttttctgattcaattcccttattcattattggtcagttagaattttctatctctttaagaagaatgttcttgtcccaaatttaatggaaatgtatttaggcttttgcatttagatacgatgttgactcttggtttgaagtagatgtttttatcgtgttaagaaagtatcttcttaatttaccaagaattcttttgtttcttctcttctcttcccaccctcttctcttcctccttctcctcatccacttccttctcttctggaatggatgttgtctttcataaaatgccttttagacatcaattgagattgacactgagataattttctaaccttgatctattgataagatgagttgtgctaaaaggatttcctagtagtacacacctttgcattcttgcaacaaatcctacttgatgcaatgcgaatcttgaatttccttcaggattataatttctaatattatatttaggattattatagctacatttgtaaaatgtatctataggtttctctgggctatctctgacacgttttgctttcagaattatctagcttcagaaaattcattctgcagctttccattgtcttctctataagagtttaaagagcattatatgttattagtaaacttgctaaaatttactatctgggcctggcattttgaggtgggggcagatttttggtaacttttctcccacttatttcttggttattagtttttttttttttcaatttttctatatattattgaatcaattcttgtaatttacctttcccagggaaaaattatttattttctcaaaaactttaagattattataaagctttacatagaatgctttaaaatattaaaatatctttattcataacatctctttcatttcaaatgttacgttttctctcttttatttattggactaatcagatatttgtgtatctgttgatattttcaatgtcccatcttttgaatttattaagtttactttttatttagttttctaattcactaaaaaaaaattccttgtttctgcttacactgttgtttccctagcttttttggattaattaatttagttctttttattctctgttatttaatttcagaagcactcagagctatacattttcctctgagaatgatttaggatgcttctcatgtttttgttttattctcatgtcattaatttttaatgttctgtaactgccatcttgatttcctcttggactccaaagttatttatttagagtagccaagcatgttttcttacatgataacttgaaccttttatcataatccttttttttttttcctctctacagatacatttagggaagagggacggtagtttggggagaaggaggagtaatgtgaggtggtcagcacaccttcttgcccatacatatacctccctgtcagctctaatactacccttcaagggcagcagtaaggaggtttcatatacaaaagaaaatatctccttaccatatcatgattggagtctcagttgcacatcacttgcattgttgtatagtcatagtatgtgtgctaagtaaatgcttttggagaaagtcaatgggaagaataaatattactagaattatacacaaaaaatcacccaaaatatccttctyttataacctgaaaataatgctaagtgattcaattgtgcacattggaaaacaaatcctaaaagagaaaaatatcattaatcattatagttaaagttctttttccaaatccaactatgtatttggattcactatttatagcaaataggaagttcactatttataattatggtaaaattctttgcaaagggcctggttttgtaatacaagtacttcttaaatggtcagttttgacttttgttagtttatttatcttaggggcctaagacaggctacccatgttggtatcagctatgtaaagacacggggagctcttttccccaggagaaatctctggtaatttttactgctcctgtgcaattcatcttcaacaattttttccccaagtcagtctatgcagtttctgtagtcactacgcagtctgtgcaatttgaaaattcacctgcatccattaactctccttgcyatcttgataggatagttttgcctagcactgactagttaaaaagcaaatataaacaaacaactagcaggttttttttactgctattgcgtttgaatgctacactaggtagaacaacatcctcaaatatgttttagggtgaggttacrtgcttttattatttactagccaatgctgatagcagtaattggggtcactggaccgctcaatccagggggcttccagaaaaccacatggacattttgcatatgtcattacaatcctagaagtcaacctgaaaagtttttttgttaagtcggggtagttgtacagtgccaagaatctaggttttgttatcagacagctctagatttgaaatctgcctcctgctagctgtgtgacattctgcaagtcatataatgctaataacaacaataacaatactactgctaataacaatgtaacaatgttagactgtcaaacacacattgagtggttaccaaatgttaggcagagtttgcttaatattgtttatacttactatcttatgtaaccctcatacaaatcctctgagacaaatactattatcttataaatgagtaaaaagaagaacttaaacttcaagtacacacagttagcatatatgatctgtggcaggaacccactattccatctccagatttcaagcttttttttttttttttttgagacagagtctcgctctgtcgcccaggctggacagtggcgcgatctctactcactgcaagctctgccttcgtgttcagaccattctcctgcctcagcctccagagtagctgggactacaggtgcccaccaccacgcccggctgattttttgtatttttttagtagagacggggtttcactgtgttagccaggatggtctcgatctcctgacctggtgatctgccggcctcagcctcccaaagtgctgggataacaggcgtggagccaccatgcccggcccagatttcaagcttttaaccrtagtcaactgcctctctgaacctcggtttcctaatctgcactgtaagtgcaaaataactctcttgtagggtcgggaggaggagcagggatcgcacagttactgcttctaaaactggtcatttatcgttgctgctgatagtgctgctattatgtaaacttagtcaatttctagcaggaaggatgtacgcatactttcttctttgcactcacgtttttaggaatagagctaagccctactcacttaggaaaggctgatagtatctctagtttcagcagggccaatgaacggggtcaactagtgactcaggcaccctacatgtgaccatctgcaagcctgcctagaaatacagactctccagtaacctgctttctttggtaagataatcagttcttccctttggagctatggggaattaggcatgaaactgggaccatggtccaaggtacattctgtgtctttttgcttcttcccacaaagagaagatgtttcctgctggtgattctacctgttgttcttcctgggatttttccagtcaacttaagggagttatctgatcctatagcatcatacgacttttttttttttttttttagacggagtctcactctgtcgccaggctggaatgcagtggcacaatctcggctcactgcaacctccacctcccgggttcaagcaattctcctgcctcagccacccgaagtagctgggactataggtgtgcaccaccatgcccagctaatttttgcatctttagtagagacgaggtttcaccgtgttggccaggatggtctcaatatcttgacctcgtgatccacccgcctcagcctcccaaattactgggattacaggtgcgagccaccgagtatggccagcatcatacgacttcttaaaggctactgctaaccaaggatctcaatgcaaaacaccttgtccaaagcagcagtctgtttcaatggccctgactttagtagcagtcccttcctaaacactaacaactaactgagagcagtgttataaagcatcagtggccacttaactgtaagcttaaaggctggatgtataattattaaagatatatgcttacgttatagacatacttttagaccacacaaagagtatggaacagtcgccatccaaagcctcccaggcaccaggcgatgcttgtgcagaaaggccaggactgatccaacagcttctcatctgcagaggacaatctgttggttgtcacccaattgtctctgtccccgcaacatatgggcagtcagaggatggacaaggctacatctggagctccttctgctcactgccctgcagccctgaaggctccaaaccatggcacatatgagaagtacttagtgtgttccacagttatttaaatacctcccaggctaaaatgtcccaagcagcttttcttaacatatggacccaggtctacgtgcatcagaatcacctgggtgactgatgaacatgcaaattcttgtgcatatttgtctttttatcagtttattatttgtctcccttgatagcatggaaaccctggagagtagaagctgtcttgtttaccctgctaccccagttcctgcaacactgcttggcacatagcaagtgctcaataaatatttgtgggatgaattaattcctgggccctatgctgacctactcaatcaaaatccctaagaatggggccatgtattttaaaccgggacttcaatgattattatgctcactaaattttaagaaccagcgttctaaggtaatccggccaattctaagatagagaaaaagatggtaagtttcctcccccaaggcgtccatattcactatctggtcagacattaagttaaacatattaatagccttgggttaaactttcccttctagccatattcctccaacaaatgtttatctaccacctgccatatgtcaggctctgggtcctaagtagagaaaacaaatatagttttggaaggcagagtgcccaggaaaaactagagccacccccattcctttccaatctgccagaggtgaacacttggagttcatggtttgacaagcctactccctccttctgcccaaagttcgctgatacaggaaagaaacagactatatgttcattactgttttcccggcaggtttgtatgacacctctggttcatgaaagtcagatgtgagcttaaaatatttatcttatcttaaaataatcaaacctttccaaacaggtttcctatatgtttggcacctttgagtttgttctggaagcttagattatattttgagttactccctggacttttaccagtatttgatcttgggcagtcacttctcctttcaggctgttgccttatttgaaaaatgagaaggttcgactagaatcaggcatgtcttggagccccttccaatttgaatgcactctcatctctgactcctcagtgccatcttactgccttatacttaaaaaaagttaagtatgatatgatttgatgagcaaataatgattgtcaagctagtctacccaaaattctcccaggcaaaggtgtttagcttttggtaaagttgggtaaaattcaagatttgcaaaaaaaaatttctaagagttctcactctcagttttcttgtttacctgcaaaaatactatggcaattttaatgtgctttaaactttatgtaaaagataaagataatacccacactttctcagaaatttgaactttttatttatatcagggctggagcaaggtgctttagcacagcctgatctgatcaggttgaaaatcactgctttaagggatgcccccaggcaaagttatgaagtgtaggaagatttataaggagtgagaagctctctgtgtcctttcctcaaccacatcaccctcccttccctcccctcagtctcacagaagttccccaaaggtaggctgccctaatctaagtccatagtctttgcatcaaatgtaactgtaatgcccctttttccattccagcctgacaaactaatcactggtaacttgtccattaccattgcccaggtaattgtctttctttgggaaacagcttcacttaaatcagtgattcccaatgctttgaggtttcatgtctgctttatattccaattattttgtcacgcctcctttattggcctgaaaaaaaaaaagggtcaaaaatataacttacccttctcactatataatgcccaaattatttttttaaatgaagaaatgtgatagaagtaatttgtaataaattaacttatttcaatatgtaaaagcctaagcaagacagcactagaagctgtgatgaagtccagtgcttgctgtatgtctagactcacagggagagccacaaaggtactatggagtcaatgacaaataccaaaaaccccactcactgctcactatatgccaatagcatcccacaaccactgattgtgataatcacctctaccatcagttatttttccaaaaagccttttaaaaacctagatcaatgaccctgatgcaaagttggctatgttagcaacctccagagagctattttgacttaaagaatgtttctctgggccgggcacggtggcttacgcctgtaatcccagcactttgggaggccgaggcaggcagatcacaaggtcaggagatcgagaccatcctcgctaacacggtgaaaccccgtctctactaaaaatacaaaaaattagccaggcatggtggcgggcgcctgtagtcccagctactcgggaggctgaggcaggagaatggtgtgaacccgggaggcggagcttgcagtgagccaagattgtgccactgcactccagcctgggcgacagagccagactctgtctcaaaaaaaaaaaaaaaaaatgtttctctgtctctcgtaccatgattattataatattaagcaaagcagtatctgtgtttttattttaggaaagaagcatttttagggttgaaaggatgtttgaaacttgagcccatgaatttttggccttctttacgcttttagcacttggaatgtcattaggtagctatttcacttagtatcttcatccagatatttcagaatggattttctcttcctgctgtttcattggtatgtgaaattgcaggtcggtttattcaaaggtttggaataaaaaggtttctctgaactctcctttcattgccaaacrttttgctccaaatcaggcttgttttaactgaattaagaggatgamttaataagaagcttctgtgcacagcagagggtcatggtaatcgttctatagggaacaacacaatacggtcacaagtctgcaaaacgtgccagaaatgatagtcatgcctcatccaggcaagtaaatgcatccttcctggaagcagtcaaggagttgttttctccgagtattgttatcaacagtttggggttggactttaccctcctgcggccacttacgttgtaaagacgatgaagcaaattattcaaagcaaatctrtatttctttttccttccagagggaaaatgattccatctgatcttgaaagaaggattcttgaagccaaacagaaagtaagtttctgccgggagctttatccagcccatatttctatttccatccaccggagaacaaaatgtgttttggttttattttaaaaagaggatccaagcctcaatctcccaggtttaatgagaacatagaattctgcatccagtcactatttatttctctgggttataggctctgctttanaaaagtttaaattgctgaataaatattatatacagagatacagtgagcgtttccaaagcatttgtcttcctaggtactgagggttggcatgaaacacccacacatttgaaagaatattttcagaggcggggaaatagcagaatgctaatgcagtatgtgagagaccctggtgcagttcttcaaaaggggccagtttttcccgtgtaggtgcatgctgttagcattggctctccagacgtcttattttgcaggaagcaatttagaactcttttcagaagtaacaagttctgaatgcctgcccaagattcccaaagctctagaaagtcatttacaacctgggatggctcacaaatcagagaatttgtttctagaattctttgtttaccatttggtagatataacctacagtttctgatttaataacatacacatgcattttatcattaggaactcagaaataatgatttacgttcatatgccctttttcgtttggttttgttttactaagtggcaggcagcaggagaaggtttccctccttgtgcaagtactagaactacttctagtaacatcaactagaagattaaacctttgctgccacctaaagactgacaccataacatcacgttctatagacaggacagagtccttatggaatgagggactatggcgatcctgtttgtggcattctcctgccttcttccagcccgttacttcaatcagttttcatttagccatggccagagagactgaggactagttagacggataaaagtcatggcgtattattttagccgctccgtgctgaaacgtgaaataaattatctgggcattttccaaataggaataatgggctggtcagagctacttctcttcattctcctgcctactcactctaggggatttatgaagttcagaggcctcgttgtgaataaggaacacttgaaagtgagcaaagggggttaaaagggccagaaagtctaccgggaatatatacatgtctcggggacgtccctgacagcctctgggttcactacagcctcttctgagaatcagaatgtctgttcttttaagacacagtcaggtccaacagcatagcctagagaactcagattccagagagtgaacatcaatttgtcccagaccccggggtgtcagtaactctgctgctgcttcctcaaattcagacgtgtctgttagggagagaatttccattgctttgaatcagctttttaaaagaacccttgactctgttttccatgatttggggctttctcgttcgcacaggsstttgttcctttcctcgtgagtgccacagctggaaccacygtgtacggagcatttgaccccctcttagctgtcgctgacatttgcaaaaagtataagatctggatgcatgtggatgtaagtatcccttagggactggccactaaaacgtccttgcacgtttttcatgtgggacacacaaaggaaatttgttttctctttttttaacttggtcagcttattttcagagtggtgatattaaagcttttaaagctggatgaagcaaattagcacacaactcacacagtacacaccgtgcaccagaagcatcccaaggctgattataccttaatgtccccaacatggtaatatttgtatttctatgatcagtacccaagctgaccactttgttctcaattcatcgagccattgcatccatggaggaatacaacctacgcacacagtcctgctgttcctcacttaccagaatggtcagaagagtaaagaggagttgcatttatgtaggaaacccagagaattaaaaacaaacaaaagcaaaaaactgaagctcaagttagatattcctgtatttagagaggaaaataggcttgacaacttcctgggaaataaggaccaccaaagttccaatttcgtagcttggtcagctaagaagatagattatatttgaaacgttttgacttcaggccttgtcacactaaaaaataatgaaggtgttccctccagaacattttccaatgaaaaaaaatgtgttaagttttagaaggaccgaagggatttaagtttagattagtattactcaaagtgtggtttgacgattagctaccacctgcaaactgttaatgatccatatgagataaagagtttgtgccaaaccatcatcagtcacaaaccatcgctaatcacaaaccatcacaaactaagcgcaatgcttggctcagctgataattttttcattgcaagactttctcagtgaaggaacgcataagttgatgttcattcgagtgcaagatccttatgttgtcatgggccagcactgggtctaagccagggctataacaatgatctagccctrgcttagatcattttggctttataataattattcagaccaaattaatgctcttttttttttctttttgagacagagtcttgctctgtcgcccaggcaggagtgcagtggcgtgatcttagctcaccgcaacctccgcctccagggttcaagcaattctcctgcctcagcttcctgagtagctgggattacagacgtgcgcacccatgcccagctaatttttgcaattttagtagagatgggatttctccatattggccaggctgctctcgaactcctgacctcaggtgatccacctgccttggcctcccaaaatgctgggattacaggcaggagccaccacacctggcctcattaatgttcttttctttaggggcagaaaatttccacaggcttagctgggtgcatttccattattccagagtattcctgcagagcaatcaccaatgttctttatcctccctgattcacagtgtgagtcgttcattaggctaccagagcccctttcattttacacatgaagacactgagaaaagactgaactatccgatatcattagtgacctgggcctcaggactggaaaycctggtagaccttgctggctgattcaggaagaggattaccyggcaacttcaaaaatgagaatgtctgtgtgtcctgagccagcagaagctatgggttgttcctctgggcctcctacttaaattagaactagggaatcttttaaccagttttattagcttttctttgaaacataccaagtttaccacttactcttattagctttaacattcatacattctataaagtagaaagaatcttaaaatagtacacgtttggaaaatcataatttttcaaagtgcaaaagaactgggccaggtgcagtgtctcacgcctgtaatcccagcactttgggaggctgaggcaggtggattacctgaagtcagaagttcgagaccagcctggccagcatggtgaaacctcgtctctactaaaaatacaaaaattagccaggcatggtggtgggtgcctgtaatcccagctacttgggaggctgaggcaggagaattgcttgaacccaggaggcagaggttgcagtgagccaagatctcaccattgcactccagcctgggcaacaagagcaaaactctgtctcagaaacaaaacaaaacaaaaagagggctgaacttacaacaaaaggtggggggaagtgattatatcataaaagaattttataatccatttaaaattatcctagaattatttgtacacacagaggaaagaaagttaatatttccaaatgaatctccatcttggcattctatttttaaaggagattactacaccaattcaaatcttcaaccttgatcaagtacaaattgttaagacgtgttctaactgctcagctaattaactggtatgaatcttccctgcttgtgaattttggacacagaaattatccaaaatcacacatcagtgaaatagagttatgaagccacttcttatttctggaatcatttagacttgtcaaaagagttttccctgcaacttggaagctgtttaatggccctcctgcccatcttctctgccttacactgtggggaccacagggtttcgtattctgagaacatgacttcatgaggactaatggtgctggtgataggtttgggagagggtctttctctctcttctgcggaccaggagctatgcctccaaggtggctccttacacccatataaatgtgggatggaatctgagaccttagaagggcccttcggtgtaaactctgaaggttagtgccagaaggaggtggtcaacttcctaagtggcctggggtcaagatcattttcacctagaaagacaccagrctatagaaatctaggcaatgacaaactgctaccattttcctcatatgattttttttcaggcagcttggggtgggggattactgatgtcccgaaaacacaagtggaaactgagtggcgtggagaggtatgttgcatttttcttattaacaacataaagtgttaaaagctaactgtgaaacacaaattacagtcaatttccaggaacttttggaatactgagtgaactcactctattcagtgcttgtgttccttgccttatgtggtattacactcatgaatgtgggtaaacaacagaaaaatcaaatatgtaaatattatgtgtaaacaacagaaaaatcagaatacacatcaagcgacccaggtagaatctctttcagacatagagattcctgtctagggtctattcctgggatctctgaaccaaccacaaaaattgtttaaaacctacaggcagcccacgttttactagggagaagatttatagctttcatgtttcataaaaggataatatccactgcttaaaaaaaataataatttttcaaagcaaataagcaccttgtaacttatcaatgttgaaagtttgggtttggggtctaagatggccagttcacttaaagtgaaacatactagcaatagcctcatctcatgtttcattcccgtaataacctttctctgacacagctccgactgatgctgcaaagcaccttttatttagagcctacgcagaagactgttgagaaaagctgaaaaacacaaaggcagtgatatctgattggcataaagcacattcaggtccaaagaaaagagaacaacagaatgcaaaatacaggctctggttctgaaccacatgcaaggggagcccagttctctcatcacaacatggcaggtcagacacagtggtgagctctggcactccaagtgaccaagaaagcctgaattcatcagaggctgccaaatgcccaccatcccctgccaagtcgccagatgctgcccagcaaaagcgtcacactggctctgccactagatatcttggcacagtttctgttccaggacaaggagagacgctgatggagcacagaggcacttgtgagccctgggcatgtgggaggcccaggccagagtggctgtgcagagggtgcgatctgacacccaggcccaaaatacacagagaacccgtgagtgtggaaagagaggggtatggttactgggctggagtcaagagcatcccaccaaattaatggaaagaaggcaaaaaagagttgggatacaccagctaaggcccatgtcagaagggtcactgtccctgagtctgatggctggggtcagagcctggcctgagcacagcggtgttaaggcacctggagccacccaagctctgattgcagggccccatttagatgccagtggatgagggcaggtgtgtctccctcccagggtcagccagtgccaggcctctgctcttggacccttggggcttctctcaggcctaatccctttccatcttgaagatctgcaagaaagcagaagcttaaggaagaggcaatgaagtaaacagggagagacaataaaagagagagagagaacaacttggaaggtgcctgctcacatgatcagaacaataattaaattcatgtgctttcaagagaggtggcctatgtacagtactttctcttctgtgagtttctgactggcacaaaaagtctgttactttacctttgatgccacttgcaactgtaagtgctgaaagtcctggcacatcctccacttaaaaactcactaaattacctaccctgagccttagaaaaataaacacccacacgattctgtaccaaagactattatttgagagcaaagcttagaacgttcatcagggaacacagagtttcctcttattgccgcaattcttgaaactgtactgtaactaaacktttcaaatggaataaccatatatgaagtcctaaaaatgagggggctgctggtgttccactctgagcagaatcccctttagccacccatttaactgaggatacccctctctcactgacttattagcaaaaggcatactttctaagtgaatacagttggaagaccagtggaaaccacataatgtgtatggccacaagtttaggaaagaaatgtgtctcacttagggaatgacatttttccaagctccgcaaaccaaagtttagaactcaccctaaaagtagaagaaatccgtagtcaattcttgtccccaaatccagaggatccttagtagtcacagaggatcctgaatgccattctcatacaaaatggcacaagggggccgggcacggtgcttgtaatcccaggactttgggaggcagaggtggaaggatcattgaggccagttcaagacccttctgggtaacagagtgagactccatctctacaaaaagaatttgttttttttaaattagccaggcatggtggtactcatggctgtggtcctagctactcaggagactgagtgaggcaggaggatcactggagtccaggaatttaaggctacagtgagctatgatggcaccactgcactccagcctgggcaacagagaccccatctctaaaaaaataaaaataaaaataaataaataaataaaatggcacaaacacctggagccctttctggcatccccttcaagaaccaaccaaattctcagaaaacagctctcttccttgctagcactgtcagaatgtcgagagatggtgccgctgagagggcacgccacaaaccctgagactccagagcatgactctgtgcattgtatttttatttatttttatttttatttatttatttttgagatggagtctcactctgtcacccaggctggagtgtggcagcgcaatcttgcctcactgcaacctctgcctcccgggttcaagcaattctcctgcctcaacctcctgagtagctggggttacaggtatgcgccaccatgcctggccaatttgtttgtttgtatttttagtagagatggggtttcaccattttggccaggctggtcttgaactcctgacctcaagtgatccgctcgcctcggcctcccaaaatgctagtattacaggcgtgagccaccgcgccggcttctgtgcatcagactgacgcgtctttagtctctcctgcccacaggctgctgcttaccgtaatcatcctctgatgtgttccactctcaaggctttaagtcgcagctgaaggtgctggtacagtttctgctgcatcaccagttgctctcactcctgccctgagagccaggtgttcaggatttaattcgatcattgctgaacctctgtcataggcaagccacagcacaacgcactgcatgggtgcaaagacgagtatgatataaagcctatcttcaaggagttcagaatctagtggggaagattgtcaatgaacagtggattaaaattcaaggcaaggaagtaaaggctggagagacagacgtgggagctgattggagagcacagagaaaggaatgtttccttctgtgattacagggagctttcaccaagcagggcaacattgtagctcagcatcatagcatacagggtacttcatcgggcagaaatggaaaagggcattcaggctgaagagacacacaagtgtgaaagtgcacagtgtgttggagaaagttcaaacccgtttggttggaggatgccatggtttaacagctgtggccaggtcatgggtggaaagtgcagaagycttggccagcccagggcccgcccgcagagccaggtcagaatctgcgggggttctttycacgaaacatagatccctgagctgggagtcactgctgtgtggctgccattatgcgtggagagcattagattccttggggcgacaaaacccatggaaaacctttgctgcaggagccgtagtgggctttgagcagargtgcaatgtgatctcacctgtgttctggcattaactctgcattagagaggagacgggagccagggacagactagaagctattaagctcttaggaacgtccaggtgcaggacaggaaagaagctgagtgtgacctaagctgtagtagcagagaaggaagtaagtggatggacctaggagagggggagagagaactgtaaggggcggtatagagacggggaagaaaagagtgaaactaaggacaacagtgaggtttggaggctggaggcctggaaggaaaatggtgccaggaacacagaatatagaggagaaagaatcaatctagaaggttgagcagtggcgattggggcctatggatttgaggcagaaataagagcacagggagatgtcttaaaatagccctgcgggattcagttctctccaacttacacaaactgcagaagccgcatgaccgaatcccacagcaaaacattttgaaatgaacctgaggctgttttttttttttaaataaattgccaacatttctgaaatcaagtccatgtcatcgaatcaatctgcagggctttttgccatctttatgcctctgagagggaggtgggacagagaattcagtgacaggtagttgggggccttggcagcttctcttctaaaaagacaaataggcccccacgtagagataaacaccacagccagacatggaagacagctgttttcctctcccatcaggcattcttactgacaaagctgagtttatcmgaattagacatctagccatagaacatgatggaatgtatagaatggccatgtgtacgtgcatgcacggtgtcaccaagctcacaaatgacagagatgaaatccatagcaaaagccaaccttatttaatgcttactgcatgttaagcacagttctaagcacttcacctaaatacatattattattctccttttctagttgaggaaatctaggcacagagaggttaagtaacttgctcaaagtcacacagccaggaagtgatgaaacctgaacgcaaacccatactatctggctcctgagggcttcccccttaactattatgtctgctttatagcccagggtcctgactccagggtcattctacaaagcaaggaggtatttttttggagggaactttccaatacctcaatgctgttattactcattaagtcctttagtcttctctccaggggtagttatctgaccatgaactgcctttgcttctagttcctcaattccagtcgtaaatgyatctgacaaccagtgtcagagccagagaaagaccagaagctgagctagactattcgttggcccagatgagatccccaggccagtgagcgctctctgactgtctggctgacacctgcccttcatcaaatgaatgaatcgggtctttcccagcttctcattttttcccaaggccrtcacacccgagaggtgggaactggatgagcccacgtccattgtacggccagacrgggcagcaatccatggctctctggaggcagctgccacgggttattctactgtaatactttccttcctcctttatgccactcatgaaactccactgccaggacccgtcagtctctccggagacaagcgtagaggctcaccttacccagtaaatgtgtgaagtgagccatgacattcacagtgggagcagttgcttttcccagaatccaaacaggagcacggtggaagtgagggagagaagccgcagaagttaaacaaagccacagagatcatactgaaagaatctggggccttaaaaaataagcaagatttaacaaagtgaagcaaagggagatggtgttccagkaagaggaaacagcatgatgagacccaggagtatgagaatagaattctctgagaacaaaagttaatctggcctgatgaaatgggtaaagaaaagcgaagagacscaagacctaaggcgtagctggggctcaccccaggggctgcaggagccgtaccctgtatttggaatttgggctggaggcaaaagaaaactgtcagtgatttcagagaaggagagggccataaacagagatagaaaataattctggtgccaagtgaaggatgaaatgaagaccgagtcagttatgacacaattgctgaatccagattaaaataataattattattaaaggaatctgaaccaggactacagctcagacttttgaaataatgtaaatccctgagcacggaatcgctgttgtgtgatccactgttactgatgagagagcatcaaatttccccaaggcatgaggcaaaaaaagatggaactctcccctgctgtgggaaccacacacatctcacctgcagtctggaaagaaaataactctggattaggaaacagatggaagcaggggccttgccagaagctactacaaaaggacgcatctgagaaatttggacatcaattgattagaaaggaaagatcgagttaagcagtggaatgagccctctctttgagctccaggacactgcaatagcaagaaccatagaggcacaggaggcagctgccctcactggccaggtgctctggccatcactggccaaaggagggaccctggactggaggatcccaatcactctaagctgtgctctgagatcaccgtggaggcagggtgcatgctgccactggagcaggggcacaccacatggagacccacgccctcacctgctatttctgtggacaaagaaaagttgcagtgtgaactccaaaaaactgagacaggtctcagttaattttgaaagtttatctggccatggttgaggacgcacgcccgtgacacagcctcaggtggtcctgacaacatgtacccaaggtggtcagagcacagtttggttctatgcattttagagagatgtaagaaattggtcaacatatgtaagatgaacactggtttggtctggaaaggaaggacaactcgaactggggaggggccttccaggtcataggtagctaagagacaaatggttgcattcttttgagtttctgattaggctttccaaaggaggcaatcagttatgcatttatctcagtgagcagaggggtaactgaataggatgggaggcaggtttcccgtaagccgttcccagcttgacttttccctttagcttagtgattttgggggtccgagatattttcctttcacacatatttaagagtctactttgtgtttactaaatacagtatcatgggagcatgggatgggggtgagggttgaaaaattacctattgagtacagtggtcactatttgggtgctgggtacaccaaaaggccagacttcaccactacgcactatatacgtgtaataaatctacacttgtaccccctcaatctatttaatttttaaaattaaaataaataaatacatttagtgtcaatctggagtctgagaaacaataccaagaaactgaagctcagttgcgcatgccctgagcctgtcagggtggagtgccacccgcttatgtgatttctttattttagggccaactctgtgacgtggaatccacacaagatgatgggagtccctttgcagtgctctgctctcctggttagagaagaggtatgtctctcttgactctgtgtcccagtccgtgcgtgggctttgactgtctttatgcggttgactttctctggaaatgtcaagatcaccgggtcttctctatggtcctactcacattccccagagagccctttctagattcctgtctgcagggtgaaggtctggtgcctaacagggaagaaaggataagaggacctcaaatttcagaacataaactttgacctaatctccatgttttcagtatgatacccctttcctcaactgttcctgcattcctccaatccagagaccctctatgtcactctcccaaaaaattaaatttccaggttttttttctggaatctgagaggagatcatttttcctatataacaaatatacatgatataggattaagggtggtggtaggatccagatacataacatgtatatgtatgtgtgcatgttctgattacagtcagatgattaatctgtaatctctgattacagatgattacagtctatctatttaatatttaaagccatgttcaaagtgtaaggaagctgcatccttattaaccagaaaagagaagcagcatcaatgagcactttcatgaatgaaaccatcttgaaaccatcttgaaagatggttctgttcaccaggcctaggaccattctcagtaggtgagcactgttggtcaaggccactacatctgccttccgtgacgccaggccggactcatagttcctcactcccacatttattttgttgatgaaacccaaataaggagcttcagatgatccccattcaattttatcttcttagcattaataaagcaaccccagattaaaagaaattttaaatgttgatcttcatttactttttttttctttttgagacagagtctcattctgtcacccaggctggagtgcaatggtgcgatcttggcacactgcgatctctgcctcctgagttcaagcgattctcatatctcagcctcccaagtagctgggaatacaggcacccgccaccacacctggctaatttttgtggttttagtagagacagggttttcacatgttggccaggctggtcaagagctcctggcctcaagtgatccgcccacctcagcctttcaaagtgctgggatcacaggcatgagctaccatgcccagccaaatatctatcttcatttacttaaaaatattttgctttgttcctagttatacagttaatacattattttagaaagttgaggcagaacagaaaatataaataaatttagagtcacctcaaatttgtgtaacttagggataaccattattaccatttttaatattttctcccacaattttttctagaaataaatatatttaaaaagtataaataaatatatatttataataaagttgctatcatctacctcatatacctcatatatacatgttgattcttctttatattttacattatattgtgagcattatcttccaaaacctgattttaatggcctcatattattctatcacataattcaatgaacaatatctctatggttaaaatattaaccaatgttttacagagtcacttgatagaatccttaaacatatacctttgatcacattcctgattattttctcaaagtagactcctcaatgtgggattgctgggtcaaagagtgttattacttctgtggttcttaatacctcctgttgtcaacttcaaatttacacagcacgccttctgtgtcttcatcagtaataaaaatatggacacaggattgaagacagcaacttcccctcaaaatgagatgaatgcattggaaaatatccttttggactggtttttcatcagttaaaaatccagtccaatgtattatcatctgccccagctcatgcagggcatgagacctcaactataattacttcaaaggagaaaataaatttttgttatttagaattcagccagatgttttgacagtggctcccatcatgtccttacagaccaaaagggaaatgcgagccggaggaaaatagaaagatttggaactgattagatgactgcattggaaggatctactgactggcaatttgatgttacccaggatagagcctatggcttggtacctaacctgtagcattcgaaatattcacggactgtttgagtaaaacatagaagcttattaatgtttcagatgagaggagactgggaggtagagtaaatgtgtgtaggaatggaatcagaatacaagatgatttttacagactggagcagtaagccacatccaaaaagggacactgttattggagaccattgtaaggctgtgctcttaggtccatgtataccgtggctgtattttgattggacaaggaaggcttgtttctacagctaaattgttggacttgtgaaaaaggcaaaggatatcagctctacagggtcaacaacgagtcaagagaaaaatgccacacaaaatacattaatgagttacagcaagtggaatttcagcatgagaaggtggtggtctcccaccctcctctagttaaaccacacctgccatgctctgcttagcttggtaccaaattgtccatggggttccatcaagctagagcccaaactgtggggaccatttggtaaacgtggaagagggatgattgaaatagctaaagatgtttagcctagagaggaaaagaaaagaaaagggctgaagggaggatggcagccttcaccatttaaaggactctcaaatggaagagatttggaaatgattagatgactgcatcagaaggacctaccgactggcaatttgatgttaccgttgaggctgtggggagctggtttagtaacaccrggtggtagagatttgacagcaaaatcagaacatctgacttgggttcaataaaaggaatacttctaaaaattaagctgtccaacaataggaataagttaataaggggaggagattaaatagagagattggacagccacttattagtaagggtgtagaaatgattcctttattgaggaggaatagagtaaacgagctytaaattcccttacaaatccaagactttatgatgctctracagcatttgtttattggcatccaaggaataatgctgttccataagatggtaataagagttccccaataagagagttctcagttttaaaaaggctgggatatattggtttagagttaaaaacaacttatgttatttcagggcttactggggcccttaatatgctgataattattgcagtatctaagaagaaagactagatgatatcgagtttcctaaatttatttgagcacgggaatctctttatgtacagcaactattaatgtgttttaatgtgttttaaatagtttgggacaggatggtctataactttttcatggctcagaaccaggatatcatctcactaaggccttctgtagggaaaacagcatcacttttgcttgtcatgttgtacagtaatgagactgcggctgttcagctttttttttttttttttttttttgagacggggtctctttctctgtcgcctaggctgaagtgcagtgatgtgatcttggctcactgcaacctccacctcctgggttcaagcgattctcctgcctcagccaccccagtagctggaactacaggcacccaccaccgcccagctaattttttgtatttttagtagagatggggtttcaccgtgttagccaggatggtttcaatctcctgaccttgtgatccacccgcctyggcctcccaaagtgctgggattacaggcatgagccaccgcacccggccatccaggttttttagggctcatgtgtttttgagttgttttctttatcacagtaggaataggtctgatccattcagcattccacactctctgaggtggtcttccttagtattgatggcacgaaggtgtgagctkgcatggcctgaggaataatggtacaaagtttctgtgaccatgaaaccaaataaaagtgagtgttgcaaattttcaccttattggtcttcaagtgaattttcttttttgagttcagtatatttctactgatctaatacaaatacatcgtatttaatttttcttattctgaaaaataatgaaaggattccaatatatgtgaagcctaaactacaaggtagagtccagttctgttgtctaccatttcagcactccgtctttcaaaaccaaattaaaattgtagttgcattgcattgtgttttagtgtggacagttttcagaagtgttctcagttttaacttcaactaagtgatgacactttagtcttgtcttcttttgtcgtgagtcacaaaagaaacaaaaccaaatgccaaagcttttgtaaaatcacaattagacagaagagaacaaaatagtcaaaggcttccagtgtttcatgacaaattgaaacacggggtttttagtgaagagactgtcgatactattttagtcggaaaacatgattcagtcactattctctggaataattcaatcactttgccacccatttccatagtaaggttacagtgccagggcaaatgaatggccattgacgatgaaactttccacttatctatctcaaggaactgagtatgcgaatgcaggactgaagctctgaccactcttgagagaggaatatgacatttgaaagattggttatttaaattcacctcaaaattgcaatatgtgggttttttttttttttagattttagcatataaaaatgatagcaatgagctgycttaaaagctatgatttccaaagggagctcaaactccctaacagctaaatgataaagtacttgaactagatatggatggaaatactggaagaaccacactaataatatttcacaaaaccaaagagtttccaaaatattttaatcaygacaaaaccagaatagtaggatattctcccaaagaaggggaacatttaaatataaatatatgctctggttgtgatttttatttatcagttgatttttataaatgccttctcttaaaagggagagtaaaagtataaatgtgtccttgctaacctccgtgacatttgaccctgagccattgatcccacagagttgaccattacaacaacctagacactcctgtccagaattgcccccattcttttttttaaaattgattcttactgttttctttctctaagatatgcaatgtctcttacttcttttttcttattaatttttaccaatatraatctaataagtagtcagtagaatttcctaaattttctcttctctcttgtagggattgatgcagaattgcaaccaaatgcatgcctcctacctctttcagcaagataaacattatgacctgtcctatgacactggagacaaggccttacagtgcggacgccacgttgatgtttttaaactatggctgatgtggagggcaaaggtgagtatgtatggaccagctaaatgtcaactaaaaacagaacctttatctggtgaccccattatgaaatgtcaaaaaagtgatttccaaattgaaatttccttacccaagatttgctttctttaaacttgcgtctaaataccttcatttgacatgaggaaaaatatagtcaaatccattgtttgtttcttttctagccaaattgattcaaatgctcactcatctggaaaacaaatccattttgctttatatagcagaacaccttgaattttaacaggtgtttattgttattgttgttggcttttgtctgctaacttggtttttacccagtgattgatcacctgggtaggtgaatgcaatctgaaagtataggtctggagaacaaaaaagaaaaagtaaaaagcccaccatgatagcttattttttgacatttcaagggataacctctagttacaaagctttttatttccccctaatctcccaaaatacctaatcacctccttttatgtagattctgwgtttccctctgaatttagctgtaggtgatccctccttttttcagcaaggaaaactcactaactaacagtgtgcaggacttgcttrgacttaattgtagctttccaggagcctacatttatgtttaaatgtaagcaggctggataggtcaaagattttatttttaattttgaccagattcttaacttaaaggtcacaaattagtgcctgcccatccggcttcatttgtctcctgtaggagataaatagacagagccagctgtatatactatagaaactccaatgcaaaaagagagttcgaggaaacctgacataagaaagtgagaaagggggcgattaaaggtgtcaaccttaataacagagagagtctctctaagagaaaagatgttgatttggaaataaagcattgcaataggaatacatgtgccatagtaaactctatgcacattcaaaggaggtaaaggaaggcaaaagtttttaaaggaagaaatgaggaagattacataattgttttgagataaatatccttggctacaaagatcaataacaagggtgatgccagtccgaggctggataggcaattgctaggcagatgtccttgcagaagtatttttttgtatgtaaggttgtggtggcctttgagcaaggttgccatttttgcagtcttatgtgacagtttttgttatctggtatacaaggcatgagaaccctctcttcatggttttccctggctctatctatcaggattttcttagcattagtgactccattttgattctaacaacattcacaagggaaatctgggataccatgaggtcctttatgcttggtggagtggatatacatttggctctaaggtgtgtaaatagcctacttaaagaggtaacatgctcartcccataagaaaaagcaaataacttggtcagcaggagggaagtataccaggataagaccagtgaatgggttcttccacaagtctgtgtaaaaaggtaggaaccatgtccacggcaatgcattccttatgcttttgtttataatttttttaaagtaacctaaattactttaagcagtttagatgatgggattcttaacaagaaaaagagggagttttcgagtgaagcaatgtgacccacaaatattttatggaatctcctttaagtccattctggcaaaaagatgcagtttaaacagaaagatggtcttgcttaaagaagaaataactctttagtggtttccaaggatggctggactgtacatccttcagggaagcctccttaatactgtttactccagctgaactttttacatgttgctaaatattaggcagctacaagaagctaaatatcaggagctttacatgaagtgaagctccactgtgttgcctggtaatggtggggtgacgggcccccttcctcttttgaaaattgacagcccaacaaggacaggtatctggtccccaccacctagtgggagactcattctgctagcaatgacactttcatttggaagaaaaacccaaagcagtcaagaatgtaaagtattgatgtacctccaagcagctttaaaatgagcagggttttcatttcattgattggtgggaattacaaaatgatgaatgtaaatatcaggtagcaagctgaggaaaccttgatctctgaatattgtgccaagttctctcttacttcaagtatcattctttgtggcttttttcccctgtggtgtttttattacggtaatgatcatcagtgatatttataggaaaacgtttctctcatggttcatcagtttctgctgctccctttccatctgaagcctcctctccagcaggggcagcacagtttcttagagaaataatatggagggcatcaggtgtgaatcgaacagcaggaccagatgaagcccaaaataaaagcaagagccccatgaaggcaccagggaaggggatgaaaagagcaaatcacagccactgtgttacttattcttttacttacttgtggaaacacckcaagtatctagacatctagccgcaaaaacttccattttgtttttcaatctaaacctttgtgagtttttttttgaaaaacgaaatgataatcattattaaagtaataagctaagtcctacaatctagatcaaaggtgaggaaaattgtactctcacagcaaagctctctctctagccacactggccaaggaagaagtcatcctcttcccgcaagaagagccatgaaagagttggctatgatgttgaatcttgcctccccacaggaatgaggaaacaatctggaaaagattaaggaggagaaggaggaagaacatagcattaattcactaaaccctctgttgtcagacatgcctggagaattcggtgttttccacattttctcctaagataaaccccatgagaaatagcctaagtataaattattctttgaactaatctgctaatgactaatggagctaaatgcactgatgacagccatcatattaagtccaaattaacttgattagaaccaatttatgcaaaaaataagacccctgatttaggttgctaagcggcatactagctggttaagatatggatttttattatcatcagcaaaggcccagtgcctaccgttgactctcctcttacggagttggcctttcattttgtctgcattttattaaataatcctaggacctaatgattatttcccaatgttgacagatttctacggtggctaaaactcagtagctaacaaaaataagtaaataaacttaaaattacatctcccccccacctttttttttttttttttgaaatggagtcttgctctgttgcccaggctggagtgcagtggcgtgatctcagctcactgcagcctccatctcccaggttcaagcgattctcctacattcccttttcaggcctgcaggaataacttcatttataacaaccaaggtttcatagcaaatctctgtgtttgtatgtagtcatacaaatagtcagttttccttgtggtttttttatgattagcttttctaattaaaaatgtggataacagagggactggcaaatggctgtgaaaaaaaataccaggaaaaaaatattaaagggaaatggacatctggcatcctttgctgaaaatgaatgtttactttctctctaaaatattaatttattttaacaagtagatattcagcatctattatcgtgtctagtactgaatgggataagaaggctctcattttccagacaagataagataaatgcacagaaatccatcataaaagacagattaggactgatcacaaaagaaatccagacacatctggggaatttaaaggacggagagctcattcctggtttaagaatcaagatgattcacaaagagatgacctttgagataggacttgaacaggataggtagaagaagtaggatttcacccagcagtgctgtgagaaggccattccacggagtggttgagcaggagttcagtgcatattatgaaagtgagggaaagtctaattgactgaagggcgacttgggagctatgttccaggtgaaaagtaacagagcctgaactagggtgatagcagcaaaaattgagataacagcaagggattcggtagttatttcaaaagcactgtctctggggcctgtgaatgtttataaaagcatttcaagaagtggagaatgatcatgaccagctctcaagatgtcaaaccccaagaccacatagaggcagcagctgaacacttggatggtgagattgctgaagtatttaatgaatgaaagaattttgaagaatctcctaaaagccttcaaaaccttgaaaataaaatgtggatcttaatcccataaatattcaatatgaacgggaggcacccagggcacactagagttttctgtgtcattccccatgtatatctttagcccccaactaaaggggcagtcacatggcccatgatcatccccatagcaaggtcccagaccaggggaaccagaggtctttagtaatcccattgctgttgcagtgcaaactcttcttcatgggaaatcagagaggcatcatcattcccatctgatcagagagttggccaaagccattcatctggacagggtcagaggcaagctggtcatgccatatcctagatcagatatgcaaaagtttaaacccaactccagactggtccaaaggatccaggttggagaagagcaattagcttccctcacttctacctacagtccatcccaagtgaacccaaactgtcaggtcattccaaaccaattataatctccttagcacccatagatgcagagagctcctggtatgggtgctggccaagcatcaggcatcagcccaagctcttcttggggaggcatcaggaacccatcagcctccttgagccgattacctgggggagcagtctccaaagaagtgaatttctgaacccatttsatatctccagggcagcttgttcttaaacctgcttcagatgtcacaagtcactgggctatgttgggcccccttagctgagatgatgtgatcttgtatgaaacaggcaagtgggcccatctcatctccattacaattgctttctctaggttctctgctggagaagttactggtaggcaggttcaaagtgcttctgagatgagcactggcttttactcttaagctttctccatcagcacccagtaaacacccaaggagataagaggaaagccattttgaaaagtaactctcttgtgtgtcccgatgtcagttaaacagctccagtccaagactgttgtgttggttttcccaagtctggattcagagcttccagagccagaaactaaaagaaatcagtgataatgttcacccattacagacacgtgagtcatttatctgcccccaaaggagaactgtacagagctcgacaggctaacaaagcatctgggtgctccctaaaattcctgcatccatttgttcaatgaagtcagtgagcacctacccaattttttctgtatcaggtacactggcagacaaagatgggctctgggaatggaaaatgtgcacgttggaggggaactaagcaggcattctggggggtctctggtgatgctttttatctgcaggaagagagtagctcagccctcctgttattaatgacttccatgattaytcctatgaatagcagaggcacattttcctcttgagtagtcaaactaattgcctggggaatggaggctctggaagaaaaggagttccgtgtagaaagcagtaatgaaagggaacaaaagcacctgacggggagagcattgaagagaaaatagcgctgaaaaagcctttggaaacagccttgtgttgagaaagtgccagacggggctaagacagagacggcaggatgacsgtcagtctccagggaaatcgcttcctccgcactcttagcctgcttaatgagctgtgtccttctcttacctaggggactaccgggtttgaagcgcatgttgataaatgtttggagttggcagagtatttatacaacatcataaaaaaccgagaaggatatgagatggtgtttgatgggaaggtatgtatttggatttctacaatctcagaaagtttagtcaattccaaccctcatcactgatrtgatgtaaatgatgtgctgtccaggtaagtgggacgattacagaggggagcagtggatgacggggtagctattccaagctggaataaagacgaaactctcaaagtggtccatataacgttgtcaaaatcatgccctccaatggcaattcctgattgaaaagtgggaattgtgttctgaacctgctgaatacatcgatttgaaatgttcttggaattttcaaaattgccagcctgggccaaatgtgaatcttcctttcctctttgtagcctcagcacacaaatgtctgcttctggtacattcctccaagcttgcgtactctggaagacaatgaagagagaatgagtcgcctctcgaaggtcagtgctccaagctcctctgatacatgtgtgtattgagcctttcatgtgcacatcttctttatgacatatgcctgtggccttaggagayagcctacctgggtacatgggcccattcccgtctgtggactcctacagagccaggacatatagagcctgatatatgcagacatttttcttctttttttttttttttttttttttgagatggagtctcactgtgtcttccaggttgcagtgcagtggcgtgatctcagctcactgcatcctccacctcccgggttcaagcgattctcctgcctcagcctcccgagtagctgggaatacaggcactcaccaccacgcccagacaatttttgtatttttagtagagatggggtttcaatatgttggccaggctggtctcgaactcctgacctcaggtgatctgcccaccttggcctcccaaagtgctgagattacaggcatgagccactgtgcccggcctatgcagacttttaacaactctatttgcttgttttctgagagtgagtttatgatgtcttgaaagaagtagtcaggcgataacctttgctggcattcacaaagcaacaaggacgttgctgaagttcattgatgttccaagtgaaactggtgctcagttacaagcacaaaagagactttaggtaccagaaatggttagcaaacaacgctgctgctgaccctcttgagctgccaaggtcaaggctaccctgggtgtgtccttagagctgtggtgacccctagaaggtaagagggcaaagagcaataataacagccactgttttgagtgtgcattgtgtcccagctcaatatcaggtgttaggtcacttaaagcctcagagcaacctgacatgggaaggattgtccacccatcttgctgatggagaaactgacccacagggagaaaatgtaactcccaaaatctcgcagaaagtctgcatccgagcctaagggcttgagctttaaatggtactgtggtaagacaccattaatctttcatcctctcctgctcccagcacttatacatgggtgaaatggggtttacagtgcacatcgaagcggggtatatgcaggacctgtcccccattcgaaactagggatggtcatgtagacttggatctcagagttgatttggttggtttgggggttcttttcatttatcataaaagagggaacctcctccagtcactgccaagagccccgcaggctgtcccctcactgctcaggagcttgggctgtctcactgacctttgggaacactttagttccttctacgtaaaatgaagaagaggattttgtgtagatataaaaccttcactaaagcttttatgtgttaacatctgtccttaagcaacccaagatcaaactcctcatcgggaggaaacttccatatggctgaggtctttaaaccaagcctcctaattagagtagtgatttgcaatcctggccatacattagaatcatccagaaacttcataaaagacactagtgaccaggtctcaccctgaaaatgtaatcagattgtgcttggatgggcctgggaatgattctggaagttatctagatgattccaatgtgcacctcagctagagaacccctgatctagaggaaaaaatggaagaaagcttctagaaccaggatccgtggtgcatgtgtctgagatggaaggggctgtggttgtgtttgatgatttcgtgaagttggttcattccaggaaatcaagcccacagggtgggagggaatgagtagaggtcgcattggataagatgatcggtgcaggcaataacaacgagaatagggggtgcgggtgtctgctgtcatttgagaggaaaaaattcttatttttcctggaatttttatggtataccttcataatgtaaaatttcttaacaatgacttatttaaccagttagaaattagatgcctccattctttttggctttcacttccttattgaactgactggccagaaagagaatccatggactagtttggctgatttcatttgttgaatcagtccattatcactgggctgagggatggagcaagatgggaatacagaataaaaacttttttttttcatcattttctgaacaaaagtcaacttggaggctcccccttttaaatatcactcttcaaatgcctcctaggtttcagcacctcatatgagctgtaatgaagaatggggatggagattatttcctggagatggcaattagaatattagtaaactgtttttatactgttgacaattcaaatatgaaaatctccggggattgcagaatgaattctcctgatttttctccaattttattactgtaatcaagagaattcagcaattcagatttggaaatgaaaatagaaccacatgaataccaagtttaacttttgttcacgtatgccaatgattttttcagactttctggaaagttctttattaagtgtgacgcccttaaagtatcatgtccaggaaccagtaaaatattcatacgcatgcacacacacacacacacacacacacacacacacacacacagtcccagagggaaaagaactgaggtgaaataatctatgctgtccagtatggtagtaatagccacatgtggctattcatatttaaatttaaatcaattaaaattaaattcaaccaaaaatttggttcttcaatcacactagccacatttcagtcactcaacttgtgcccaatggctgttttatgggacagtgcagatatagaacatctccatcactgcacagagttctgttggtccaggccgatatagactcaaaatttggggaaatgcagagtttcctgtgcagtttatgtgaaccaaaagaacaaagttaaattctggacaagacaaggcagagaaattactctgtaccatcttgcctgattcatagctgtagtgcacaataggaactcaaaaatcgtttgttgagctaaaattgtatcttagcgtggttgagctgcaaaaacagactaatatagactgggtagcttataagcacagaaatttatttctcactgttctagaggcggggaagtccaagatcaaggtgccagtagattccgtgtctgctggaacccctacttcctggttcgtcaatggcctttttctccctgtatcctcacatggcagaaagaggtcaagggagctctctggggtccctaagactgtgccttcctgaactaatcacctaccaaaggccctatctcctaatatcatcacattgaggggttaagatttcaacatataaattttgggaggacagaaaaattcagtctatagcaaataccttaggcatattccagaataaggaagggaaacaacatttaggaaacctaatagtggctcataagcctttttccagagtgcactatttggggacaaatatctggataacagaagttattaataaagcaaatacagtcatatcttcatgagggtggtaaacacgagaatccagtcagtgtgcttcctgctgctctgtcaggactatgatcttgcagatggcgctttgtccctgaggcagtgcagatgatgaatgcttggggcactatgaggatgtgacgccacacacatgccttggacacagggaggggcagcaagtgggctgtgccaatgtttaccaaacaagaatcaaaagggctggtctrttgatcacctcttgtgtttctggttctttatcttcttattttaattttttttattcttgatcattatctggttctgtcagcttttatagtcctacactgattggaggacttttcaaaggttagcagtggatttaatactaaatttgtaaggaagtagcctggacttatatttaatacagactctttgaaagtctgtgttattaagtgcaatagaggatttaattggtgaaattttcgcatattagaattttttttttttaagacagggtctcactctgttgcccaggctggagtacagtggtgccatctcggctcactgcaacctccacctctcaggttcaagtgattctcccacctcagcctgccgagtagctgggattacaggcacacaccaccacacccagctaatttttatattttttggtcaggacagggttgggacggggtttcaccatgttggccaggctggtctcgaacgcctgaccttaagtgatcggctcrcstcggcctcccaaagtgctgggattacaggcatgagccaccaagcctagccaacagtttagaatttctcatttaattattctgcttttacatttttcagaaatttctcgcagtcttccaaaatgtaaaaacaaagaggttttctaagacatagtgaaaaatacatttctgtgatatcttttaagtttatttcataatgctttactatgcaccctctttgaaagggacaaatgtggattccaattatggaaaagtcgcctggttattgctttctaaaggactgaaaaagctaatggcacaagagagaagacaataccctaaaattattaaggcaggcccaaagagctcttgttgactatacctttagcgaattcttcaacatgcaaccactctttctcaacttgcgttctttatttaggaaaactaggaatccaaccaaaaagtacaaaagcctagaaataagtgaaatctctatgtatttcatccaaaagaccactgggatggctagatagtagaaaggagagctttattgatgatatcagtttgcaaactgggaagagacagcctccagcatgtgtggaaggtgccctctcttccaagagaggaagggcaggttgggttttatgcctcacagggcctgtatcacacagtagagtcatacatattcagtaggttttgggggaaagctatccatatttatgaggggagctgagcacatgcagaatgagtaaacatatatgtaacatacatcccatgtttacttcggggcagggttttagtgttagaatgaggtgaaatttggctcttcatgtcaaaaggtgaactgtaggacataaacacagtttgtgcaccgcatctataagctgctaaaactggcttaaggtctgcaattgcttaccaggaaagaatgtgtgtaaggtcagtcttctgtctagtcagagttatagtggtctggttagtaaatcagggtaaggagggggtctcatagcgcctattgttagggaatttcaatcattaggaatttagtaatttgccctccagccaggccttgaaccctggacccatcttagttgatataggagtgtctattttggccccacagatcacatatattcatcagaatagtccgaatcttattttccttcttaacttgcaatgagtgaatatacaacgaagtagatgttcatgttccggctaattttagttcatcagcattttctggaagcaaccaaaagtcatatgtatttagacagctgtgatttctgccaattcagcttgcttcgggaactgaggggattcaatcttactttatgcccaaatctgtttgcttgtggctgttagcattaatcttttaacctttgatttgcattcatctgaaaagctagagatgattgtccttaataattagtgccattcttctgtatttttgcttggattrcccatgaaaactaaatgagactttaatttactgagtaaagctctgtcattattttatcagttctaaagggcaagcgtgatttattatacaaataaaactaaggaatggttatgtgacttgtccttaaattcctgcagccaagtggatttggaattccttttctaatctgagatttatcttcgcaggaaccacattgacttgacacgcctcacaacacaaaggataaattccatgcccctttggctggaatatgctagtagatctattttcagaagttaatctcagatttgagatattttaattcttcttcttatttattccctgggatgagtccagtgctctgcatacattcttaatgctttaggtgaaagaaggatcaggccaagagaaacattcctccccatggaacaaggggtgggaagggatataagaactcaatgtagagtcagaagatctcaatgctggaatcatccacgttcatttttagagaaggaaattaggttcagaatgagaagtgaaggtgaagtctacctgttgaccttgtctttggtaactaacaaatgattggacccaatgggaacattgctattttatgcattggatactttgaagatgaaaacttcattataaaccaatgattatttaagagttgatatttataagtcacatgttcataacagcattccatttgaattgaactgtctatttaagataaatccagctgtgatagaaggcatggtctccattttgaaccgggtttctgaccatatgaaactcaaagaagtctaaaagtttctctgatgtctatctaccatttgcagmaatgaagatcagatattatatatttacaaactccagtggtaaatatatgtggatagactgtatgtacagttagacatgatttaagtttttgcttcttcctagatagctgtttctattatgctactctttatagcaataagaacttaggaatcccccaacatgaaccaagcactgtgctggtaaagaacaacaacaaaaacagtagaagacactgtgtctgccctccaggacctgacagttgaggtagagaaagaaaatgtatttgcttgaaagtaagaggatagtaggaaattagcatatagtcagaatctatggggaaggatcatggatgatatgtttacagcttaaaggaagagagctactgatggacactagaagtcaggaaaggcttcatagcagttgtaggactgtggtggaatcttgaagtgtgtgtaggatatgaaccagaagagaaaagggatggattctaagcacagagaacaagtatgacatagtaacactgatgacaagtgtgaagggataaaaatacatatggtaaattcaagagatatttaataaaggagtcttgtcagagttgaagattcattttggcaagtggtggaagatgaggcctcataaatggatgatgaaaggtctttgcactgaactagagtttaaacttaatttcatatacaatagagagctactgaggctataatcaaaaatctggcataaatagagtataatctcgtctgtggtatgctatcctgtctgtgatatgaaacatatgttaagtccttgtgagttcagctttttgtcccagctaattatcatcattattaaggattatctttcaaaatatcttataaagtgaggcactgcaaagagagaacgaaaagaaactagaaagctctggggtttcaagaaagttgccaaaagtctgcttatcttcatatatcacctgacactcaaacttacattttggtaacaatcctctgaactgtttatttccaatgtttttacatttactgtggggggaaaaygcccccaaacgtcttgctaacccatttagcttggggccaatrctagattcatcccatcctcccaaaacactaactggaaagtcaaggacaaggtggcaggcagctgatagtctatcacttattattcctcttatcacttgcaggatcttgaatgtgttagaytgttctaattctctgatcccaagaaaacttggaggtaactctttcaagagaaaacartaaggttctgactgttgagcwaaaaactaaagaygctgcttgctgttgggttctttgactcaggggagagtcccaggagaaagtcaccatgctgatatggtctgtcccacaggtggctccagtgattaaagccagaatgatggagtatggaaccacaatggtcagctaccaacccttgggagacaaggtcaatttcttccgcatggtcatctcaaacccagcggcaactcaccaagacattgacttcctgattgaagaaatagaacgccttggacaagatttataataaccttgctcaccaagctgttccacttctctaggtagacaattaagttgtcayaaactgtgtgaatgtatttgtagtttgttccaaagtaaatctatttctatattgtggtgtcaaagtagagtttaaaaattaaacaaaaaagacattgctccttttaaaagtcctttcttaagtttagaatacctctctaagaattcgtgacaaaaggctatgttctaatcaataaggaaaagcttaaaattgttataaatacttcccttacttttaatatagtgtgcaaagcaaactttattttcacttcagactagtaggactgaatagtgccaaattgcccctgaatcataaaaggttctttggggtgcagtaaaaaggacaaagtaaatataaaatatatgttgacaataaaaactcttgcctttttcatagtattagaaaaaaatttctaatttacctatagcaacatttcaaatgtatttaaatacatataattttacaaaaggaaaatatatatattaaaaaagatatcctattttgtaacatatagatttttattttatataggttatacaaactgcgggggcagatataaaatctaagccagatttttttttcctttctcttaatggaggcacaataaaacacttagcaaagttattttgaaacattgacccacgaaattcttaaaaggtattattgcttctttctatacatgttatggcttatcacatctctaaagttagtatttcaagacaaacacaaaagaatactgcgagttctttaaaataattgatcccattggcagtaagattctcttcccctttaagttttccacccattttactcttagcggactcactctgcaagcgtgacaaaccaggcttcatctcagattaaattagggtaattgtctctattctgctttccagttcggcctgttttgaacagaaggttgatgctagttcttgaggcatcttccaaatagtattcttttattaggtcatttgaattaattagagaaagtaaaaataaaaccttatcagsytgagcaaagaggaatgaagcacactcccagaatgtggtgagcccagaaaattaaagttggccttgggagaagagrtctctgtgggacaataatgacatcatcctggcgccatattgccactgtccaggaaagagaaatttacctccaggccagttgcgcatttccatcccctccccattcctccccacaaagtctctcccactagactccctaccactgggacccaaaatagttactttatattccatgggtggttgtttttcttccatgaaatgagcctctcaccctagattttgaggcattatcttaagattttcctttatccatctcccatygagatccaaagtgaccagaatatgcagaaataataagatccttagaattcaaaatagtatttttaaaacatccttctttccctgtgaacctgatagaaaaacatgagctaacaaaagcttccatagatatttatggggtcacacatcgtcagattccaagtgctgattggagaacaatagattgatatgcagactgcaaatgcaaatttaggaacattctccatttctgaatggaccaggtagttcagtactcagactgcaggtatacaagggaagagagaaggccctgcccttcaacgggtagaaatrccctacaatataacatagagaaatgccctataatataaccacaggatccagccatctgaaattttcataagcttccccctacattatttctcctaggctatatgcaaaaacagtgataacttgatatgaacatggctttgggccctttctgtctagaaaaacaaatgggttcactatgacaatcagaaataaactctttcatctgtcccgcagaatttcatgaaggagtaaccttccattctaggctttgtctaatggccaagcattagacaaagcattaraaagcagttcctttctcaaaactgcctgctgagaataagcacatagctgcccgactatccggagcctcaggcccaaaggttccacttcagagacagagatgctaattgatccaacctgctgtccttcktggagaagacagtggggcccagtgccctggtgaaccaaccctgctgtactccaggatgctttatcttttgagttacagatcctagattataaactgctgctttttaggttaatgagatggtaaaattttaaaggacaatttgtgcctatatatgaaattccagcaaaacaattctagcaacaacaatagctcttcttccccgctcccctaccccttcccagtactccttcaaattggctgagagccttgctcaggcctgtgcagggaaatccttaccaactgtagcccaaagaaggaagcaaataaaagcctagtaggtcccagtagtttaataaatcatcttgaaaggagatgtggaatcaggtcagaagagagtaagggaggaagggagggagggagggagggagggaaggagggagggaggaaggaaatgaagggagggagggagggaggaaagaagggagattatttttaatattagcccaaattcccagtgccatggtctttatgtgtgcccattctttacaaatcttagaaaagtttggttttagctttaatcagaactgacatggccattttcatttatacagcaatattgtgtttatcatttaaaatacttgaacaaacaagtgtgatatgtctttatctgagacctatacatggtatggacttcatatactgccacaggatgtgaggaaagaaaaggaaatcaattctgactgtgttgcctttattatctggataatactgtcttgtcacctcagattggggttgtgcactttagatctgaactgtacagtgttgcaaatcaacatgtgtttctgtaaaagcttgtacaatatattattgatatgtctttttctgtgtggtagctgtattgaactttgatattatgaaaactacatttgcatctgttcctgttctctctctctctctctttcctaactatatgccctccacatcggctctaatagagaacatgccctcagctaagccccctactgagaaacttcctttgagaattgtgcgacttcacaaaatgcaaggtgaacaccactttgtctctgagaacagacgttaccaattatggagtgtcaccagctgccaaaatcgtaggtgttggctctgctggtcactggagtagttgctactcttcagaatatggacaaagaaggcacaggtgtaaatatagtagcaggatgaggaacctcaaactgggtatcattttgcacgtgctcttctgttctcaaatgctaaatgcaaacactgtgtatttattagttaggtgtgccaaactaccgttcccaaattggtgtttctgaatgacatcaacattcccccaacattactccattactaaagacagaaaaaaataaaaacataaaatatacaaacatgtggcaacctgttcttcctaccaaatataaacttgtgtatgatccaagtattttatctgtgttgtctctctaaacccaaataaatgtgtaaatgtggacacatctcagcctgtggataattgttttgactttgtcttatagtggagatgattttcaacaaattgctagaatcaaaggcccttcacttgtcaaggagcttaaagtgtctttgggtcttttgtagggaaaaaaaagctcttctgcagctgcccacactgtagcttctgaaggatatctttgtcccactctgatttctccttcaatcagatctgatatttttttaaaaaatattttattatggaaaatttcacatacataagtaggtagagaagatagtataaactcctgtgtagccttcacccagattcaacatctactgattctgaacctgaatcttgtttcatccattcccccacccctctccctccccaacactaaattatttttatctgaacctctaagagattaggaatctttttttttgtttttgtttttgagccagagtgtcactctgtcacccagatgggagtgcagtggtgtaatctcggctcactgcaacctctgcctcccaggttcaagtgatactcctgcctcagcctctcaaggagctgggattacaggtgtgcacaaccacgcccagctaatttttgctttttttttttttttgagacagagtcttgctctgtcatccaggctggagtgcagtggtacaatctccactcactgcaagctccgcctcctgggttcacgccattctcccgcctcagcctcctgagtagctgggactacaggcatccgccaccatgcccggctagtttttttgtatttttagtagagacggggtctcaccatgttggccaggctgttctcgaactcctgacctcaggtgatccacctgcctcggcctcccaaagtgctgggattacacgtgtgagccaccgtgcctagcctggactcttaaaaaaaaaaagtcctcaataccattatcacagctaaaagtatagtaatattaccataacaatgtcaaatatccaactactgttcacattttgccaattcttaatttcatagcaaagcccatggcctgtggctcagaaaatctggtgaggctacgtgtttcaggacagcggagacatctacaattcaggcacacagtacaacgccatatatgccccactgtgcatatgctgtgtgtattttccagtgtgctgagtctatttctggacttctgtgagttgcaagttctggtcttgtgttcaggggctttgctccctggctctcaggagcagaggctaagaggtgtgctcaggttaaaagctagaaaaccgtaggaatttaacagatggaatagatatgcctgatgtgccttgtcgggtgccggttgcccgacaggcttgagttgcccctaatggtaaaattctggatggagtaaagagatacgattttaaacagagatgggatacaggcggacaaaaaggagagaaggctgaatttctagctaatttcgatattgattataggagaaccagtagaagatagccagataaagaggacactgcacattcctgcctttgttcacattattcccttggcctaggaagaattttccacttctccacggtttggggagcatctcttgtaggtgctaagagtgcaggctctggagtaggatcactggggatctaatcacagtcccacactgaccagctgtgagacctgagcacatcacctgacttccctgactgtttcccagtttcgcaacagcaattgtcagaggtgtttgaaccagagcaactccatcttgaataggggcaggggaaaatgaggctgagaactactgggctgctttcccagatgcttaagccattctaagtcacaggatgagagaggaggtcaagacaagacacaggtcataaagaccttgctgataaaacagtttgcagtaaagaggccagccaaaatccaccaaaaccaagatggtgatgagagtgacctctggtcgtcctcaytactacactcccatctgcaccgtgacagtttacaaatgccacggcaatgtcaggaagttactctatgtggtctaaaaaggggaggcatgaataatccaccccttgtttatcatattatcaagaaataaccataaaaatgggctactgtctatgaagtagccattcttttattcctctacttaataaacttgctttcactttatggactcactctgaattctttcttgcgtgagatccaagaaccttctcttggggtctggatcaggaccctttcctgtaacacagccttcttcatgatgtttttgtgtggattcaataacatggatgcacagcacttagcatggtgcttgacacccagtaagtgctcaacaaaccttgtgcttgtactgatgatgagttctgtaagtcaactcacgtcacctccttaaatatttaccctcctctgaattccccaactactaactctccatcagtagtggtcactgggcacccacctaacaagtccagcctggaaatgtcatctttggcatcatcttctgcttgtccaatgtagattaccaacagagtcagctaacatcgctcagatttgctggctaaaagaactgctgcctactccaattaggtgaacacacctctctctaaatttaaacccaaggcaatgttcagttcaactcggtgtttgccatctgagacaactctgtctgaagcttcataggtgttttccattaacagggccaatcagagccgtcttactcttttaatttacttgcttatcaaaacacgcatacatgagtatgtgtatatacatatatgttatatatatgcacatatatagctatatagttgaaagtgcacatggacacacccactataatttaatggacttggtggtccaataataacattataatttatttcaattattgacacaaaacaggagcaaacaccaaaagatcaatagctcagagttcacgtttagagagaactagagtggtccatttccccaaaattaaacagtaatgctataaaaacacactgtgaggatgcgggtggttcacaggcgtaacaatctatgtctatgaaatggagaggcttgggagagaggaaaggcctggagcagagcagctgaggaagggagcaggctctggggactagccccatatcccttccccatcctgcccactctcccttcatccagctccctgttcttccagcccccgagctgttgtttcaccggtgatctctaaggaaaatgtaaaataaaaattgcttttaaatggtaaaggaactacaaatgaaattgcctttgcaaacattgtaacagtgagaaaattatgacagcgaaagagatttgatctgaccaatcctcatcttgcctgtaatctccaaactgcccttcatcattcctgggcttggaccaacaaactttgggagaaatttagtttatagtttaaatgataatagcctccccaaaactaaaccgcctttgtaaagctaaggaaaggccaccaggttaggagaatgaaaggaccctgaattctgctaaggtatagacataaaggattaccagccattattccagaggtcctaagatttgcaactcctccaattactactgcagataacattactattgtagaacctgagactggccttttgagatgtcttttcaggtttttgcgtttctgacaacccatggctccatcggaacccaccgaccctgaccctgctgagccatcctgcagccccacctagaagcagactccctggccctccaaactatccttgaaaaaccctagcctctgaattttcagggatatggatttgaggattaactctgtctcccacgtggtgtggccgggcttgtgtccattaaactcttcattgcaatgctgtggtctcagtgaattgttttctttttttctgtgtagtgagcaggaagaacccatcggacggctccacagatggacagtttttgccacggggagagcagatggttgcgtgtgaaagacagtataaaatttttgacaagaggggaagagagacagggtggatagatataagctaaagacgaactaaatgaaaatattcacctggaccttgcattctcctccactgagggacgctgctggccttcttccagtcctgggctctctgaggcccctcccagtagcccagtctaaaggggatgctcgcatttgccacatctctcccaagaagaaaatacctagttaagagacctgactgcatttacctatcccataaagccttcctcacttacccttaacgaaacatactgtgcttgaaacattaagtctgtgtaatcctgtcactcctggcatctgtattgcctagaattgttctccagcagtttgccatctgtaaatctggtctttccatttttctttgagggcagagacatgccttccagtcacagacttagacagctggaaatacccttgtcgactaaaagagtcaaactctgtaaaatatttgaagagatttattctgggccaaatacaagtgaccaatggcccgagatacaaccctgaggagattctgagaacatgtgtccaaggtggtcaggccacaacttggtttcatacattttagggaaacataagatatcaatcaatacatgtaagatgcacagtggttcagttcagaaaggtgggacaactggaagcaggcagccatagttagattcagagattttctgattgggagttggttgaatgagttaagttattgactataagacttaggaatgtctggattaagacaaggggttgtggagaccaaggttttatcatgtaggtgaagcctccaggtagcagacttcagagagagactagattgtaaatgtttcttatcagacttaaacagtctgatctatcagtaattccaaatgggaagagggcttaatgaggcatgtccgaccctcccttcccatcatggcccagactagtttttcaggttaggtttggaatgctctttgctgagagacaggggtctattcagatggttgggggcttagaattttatttttcatttacaccctgaaaggtcatctaaggtagagtttcccagaccctgggctttggacccaggcagagtgaagatgggtccaatctgtggccaaatgagaagcccaggacaaccaagaagtgtttttgggaagctaaagctattcaatttcaaggacagtctcatctcagattatgtcctcattatatttttaaattgttattgttcataaggtatcctttcatttaaaagataatatagtgatgacatcttagttgacaaaagagtcagaaacttcattttaaacccctgcatcttaaaaattatagtggtatataaactgtaaatctgagaaccaccaatttcatcaaatcttgcagattctccccaccgcatttcagggtaattagcccttaataaatgttattcaaagtgacttgaatatttacaagtcaaattgaaagctttggaagaccgtggattgtggtgtaatctctgtgctactagaagctaaggatctgccaaatgaaaatgtgttttcatttcaaattcacacacatcccaacacctctcagtgttggaatcctacctgtttgtgtgcattttactgcaatctacccaggcaggtgctatctttggcttcactctggcaatgcaaaatcatgagattttcatctttttcctccccaggtagccatttaatgatatcagaacctaggatctttcatgatatttcaaagaaacaaaaaacttcaaaatcagtctttgatagatggattagacgctgtgactgtaaaaataccaaaatatatttgcctcactctgtttggttcagatcagagtgagttctggggctacatcatgatgtagatggttccctgcttcaatgaggggagtggcaattcttctacttcacgtttgtttcctggtccatgattcaaacaaattcacacatttgacaacatctgccgctgcatggaaaccaacaactctctgcaacacagatcaaaacgtccatttagggaaagca

SEQ ID NO: 95140 - DNA, 78996 bp, Homo sapiens
  misc_feature (1)...(78996): n = A,T,C or G
gaaaaatgaagacattcattatctcttgaaaaatgtccttcacaatctgtatttttaaaaatcttatcttttgccatttgaaatattaatatttgcatatcaaatattcatataaattaattcagactgatatcctttatagaagattccaaaaatgaattctaaggaaaaagtccaatttatcacatatatcaatccttttcacacatagcctcatgaataaccacttgacactgaaacatgaattcagaaactattattattttggcacaggaacaaacttcagaatcacagcatgcagatatctattaacttttattcaagtaaaagttttaaacacctgaataacttatggatacaaacggacatcggtttcatattgcttccatatgtaggaactagtcatttcagcaaattacaaatagatcaggatttaataaactgaatctgcagtcaagaagaacctatgatttagactgcataaatgaactaaaatgacatttgcaatattgttcagcattaatttgggttgatatggaattgtcaattattttccagttacaaataactgtacattcttatagaagattatttacaactgacttactctattagagctctgttaactgagagactagtctctagttagagactagtttaggacattctagtcctaaactggagacatcctcaatattcctcaatatagattattccaccattacttgacaccaccagacaggaagatgaggatacatagatatagagctgttttgtttttaacaataacatgatacatgcttttattgtatgccaaataggtgcctgctaaggctttgtctatatgttgttaatgaattacttttcaatatttctcactttgataattggtttctatataagccatgtaactaataactgttaaatgttaatgccactatatcacccacttcaccatccagtattttcattataaactccatacatcttttttattataaatttcacatacataccattgattatttgttgcagtcatcaaagattgctatcctatagtaaatacatttctttaaatcattgcaattggaatgcaaatgaaggataaatatgattgtacttgagaatagtaaaattcatagagacagaatagtggttttcaggggtaggagggaggagggaatggggagttactgtttcatgggtacagagtttcagtttgcgaagatgaaaatgttctggagatggatggtacaatggttgcacaacaatgtgaatgtacttagtgccactgaatgtacacttaaaaatcattaaaatggtaaatttcattacgtatgtcttgccacaatgaaaacaaaatgcttttgtttgttcactgctgttatgataaagatctcaacacctgacatcccctacaaggcccaatatgatcagacctaccattccaccccgaggtttttatactccagttacactaactgtcttttttcaagttattgatgacactagattccttcttactttaaacttcccttaacgttctttctggaatgaaatgctcctcctctcttttcacctggccaggtactattactcattgttttatccctcagcttacatagcactttctccaggatattgtccatgactctctccaatgatagatccttctatttacaatctaacagcacctatacttctttgttgcacttatcacaattatgatttattattcagtatctgtctcctgcaacatattgcaagatctgtgagaccagagactattttgctttttttttttttttgagacggagtctcgctctgttgcccaggctggagtgcagtggtgcgatcctggctcactgcaagctccgcctcccgggttcacgccatcctcctgcctcagcctcctgagtagctgggactacaggcacctgccacgacacctggctaattttttgtatttttagtagagatgggtttttaccctgttagccaggatgatctcgatctcctgacctcatgatccgcccaccttggcctcccaaagtgctaggattataggcgtgagccaccgcgcccggccgagactattttgtcttattcatcaaacacctttcaaagagctgtcatttagtacaagttcaaaacatatttatagagttaatgaatcaatacacgaacgaatacatctaaatggtaaagaataattcattaatgaaataatgagggccgggtgtggcggctcatgtctgtaattgcagcactttgggaggccgaggaaggcagatcacttgaggtcaggagttccagaccagcatggccaacatggcgaaacgccatctctactaaaaatacaaaaattagctgggcatagtggcatgtgcctgtaattccaactacttgggaggctgagacacgagcattgcttgaaccccagaggtggaggtggaagtgagccaagatcgtgccactgcactccagcctgggtgatggagtgagactgtctccaaaaaaaaaaaaaaaaaaaaaaaagtaaggattaccacttaaaaggtatttcaaagaaaaggaaaatacataatatgtacttatcattttaaaaataatacaaattccctatagaaaacctggaaaatccagataaaatataaagaaaataaacattgccctatcttgcaactcagtggtaatcattgttgcatatcttggtatatttccaatggcttctttcccgatttcagtgctacccacaggggaataagactccttctcttgcttttcataaatactacaacttggaaatctctgcaagtcaatttttgaacgtgggtagaacctgtgaatacgatgatacattactcctatgaacacgttacaaagggagattatccaggtaggtctaatctaagaaatggggacctcaatcctacaactgcaaggaaatagatcctgccagcaatctgaatgcgctgtgttaaaatcagatcaaactttaaaaatttttaaaagtttagcatgcatacaaagaacagtttacaaactggaagacatctaaccaaaagtggcaagaagcccagctcacagcagttacagtacagcttataaacattgaggaagaagtattttgaccttcgttacattctttttaaggcgagtagagctgttaagctgatttgtctatagctgattggtttaatttcattgactcacactgtcaaggacattttgtgttttgtttatgtctagagcaagtgtttcagggaaataaggatgacttaagttttggctacctggctatgggtggttggacttaaaatatctaaactggagcctctatttttatttatctttaacacttgaaagaaattcttcccagagcctccagataagaagccagcttggctcttgacttcaaatcaaggtgttcttcccagaggctccagataagaacgcaccaagcttgggtgggttcttatcttgaggctctgggaagaattcaatgaaattaaaccaactggctatagacaaatcagtttaaacaggtatgcttgccttaaaaagaatttaatgaaggtcaaaatactttctccttgatgtttataagctgttatatatccgtgattaccaggattgaacctggccaaaccttttgatctatagaattgggacttcttatctatagaattgtgacatcataaatgggtgttgttttcagctgttgagtttgtggtaatttgtcatacagcagtagaaaagtacgggttgagtatcccaaatccaaaaatcccaaacccaaaatgctccaaaatccaaaactttttgagtgccaacatgacactcaaaggaagtgctcattggaacattctgaatttgggatttttggatttgggatgcacaaccattgtaatgcaaacattccaaaatccggaacaatctaaaatctgaaacatttctggtaccaaacatttcggataagggatactcaatctgtaatacaaggggattgcataaaggcatgattatcaggaggcaaggaacatggggatcatgttaggtctgtataaggggccacagtaaccctgtccagaacagcagaactgccagttaactcatagaatcatgaactataatcatgaatgggggttgtcttaagccactcagatttagactggtgtgttatgcagttaaagctaattgttacaacttctggggtgagagaagtatagatcaattcctcttaaatgaaaagctccatcatatttccaaagatactgaagaatatagaaagggcatgagatctgaatttgggcccgtgactttacaagttatcatttattgatgacttacttattagcactgtggtaggagctgtatattcactatctaaaccatacaactctaaggtaggtattttgaaggctcagtgaatctatgctatattttcattttgtggagttagataaccttgattacattcaccatccaatcctcaattctctcgtctataaaatgggcttgattatattatttaattcacaagattacactgctctgtaaactcctgtgcaaatattagaactcattactagcagtccagggttccgttttcacataatatttgccaccgaaactcatctatagtgactacatcaacacactgtatctacatagcatgtactatatgagcatgtatatcaacacttggtttgtgagagtctgcactcttatgggtctgttcgcctccctgcttgatcaagacataccaattaactaccaaaagaatataattcacaggtgaatgatatgctctggttttggaattggggaaggggagctaatatttttgaaggcctctatgtttcaggcaccaggctagatgatttacttctaacagctgattatgattgaatttgtttggactgggtcatttagaaaccacctcaagtaattctactgtgagcatgggtcacagtaggattctactgtgtatccatgactgagaatttctgacatacaaaaccccattaaatcttgcaaaaatattccaaagtaggtgatatgtttattttacagtaaggaaattgatgcccacggacattaactaactttcccaagagcacacatcttgtaaagccaagttttttgccactttaccaaaatgacaggtttcttgaacagaggagacaaccactctcatcaaattaagggagatactaaaccgaaaagcaagaaagactgaagattcctacttaataatcaaatccccttggttgaccttgctatcccccgtgaaacttttccagccatgtcagtccttgtttgttgatctcctcactttatttctattacatgagtaactggctaattttgatggtgttcatacttatccttaccatatatttgctcctacatttgtcaagtcctgcttgtacatttcctagttgccaacctggtgtcacagcgggcaaatcatgggaagagccctggttttggagccagaccacctgaattggcctcccgcatggacttagctgtgtggcaatgagacaaggcattttattctttgaatttcagttttgtaagcataaaaaggggaaaaataaaacccagagtttagtaaggtttagaaacgctacactcagcaagtcatagctaagtcaccgtcaccaatggtagtcaagtgtgtggtgcagcaggaaacatttggagtcgactcctttacggaactcaaatgccctcacatttagggagaaatagaaagaattacgactcatgaaatcgagctggggctggcacttctgaccctcccaacaggtttccagaaagctatttacacacgatgcattcgccaaaccactggaaatcattctaccctgtacttttttccaccctgcctcacgtccttgccctatgaccgggttcctaccccaacctctgccccaacacttagaggaggagttgcgggcctctttttacagtggataggattccgaaggggagagtaaatcagtaaggctccacccatttcacaggaggcctagagaccggcgctcccctttcccctcccgccggacctgccaggaggtgggctggcgcggagggagggccctgtcccctgtccctttaaggaggagggccaaacgccggcctagagtgcggcgtagcccccacccgccgtgccctcaccccagagcagctgcagcctcagccggccgcccctccgccagccaagtccgccgctctgacccccggcagcaagtcgccaccatggtgaagatcgtgacagttaagacccaggcgtaccaggaccagaagccgggcacgagcgggctgcggaagcgggtgaaggtgttccagagcagcgccaactacgcggagaacttcatccagagtatcatctccaccgtggagccggcgcagcggcaggaggccacgctggtggtgggcggggacggccggttctacatgaaggaggccatccagctcatcgctcgcatcgctgccgccaacggggtaagggatgcgcggccccgcgccgctgtgcaccctggcgcgtgtgcgacgtgcggcccgcggcgcyctccctcgctcggggccggccgcttccgcgcgctgccgcctcggtttccacctcccgctcctccctctccttcgcgctcgctcttctggcctggaggcccgacggaggtcgccgggctggggaaagtggccacgggacccggcagacctgctcgcctgactcccggggcgcsgggaggtgcgggcgcggagcctcccaaggtcacgcccgactctccgtctctagccgctgccttccctctccccgtcccccgcccctcccgaggcgtctgacatttgccctaaccttgcagccttggaagatacgattacggcgcagagtgctgtcgccttaagcaggaaaggttagactgccgccgcctcgcccagagccccctcgcatcccgcccgctcctctgctattctcggctaggactggcgcttcccgctggctcggagcccgacactgtggggcaagggtggcgagagcacccatccccctggggcgtcaggttggcagatctcagcaggcgggtgccaatcttttctccccgccccctagtttgccttggttccgaactcctgccctttgcgcggcctgcttgctggggggcaggcgtttgaaacatctagtctctgcccagtggtgcccgggatctgttccaccgacggggctggagctgaattttcattagaatggcaacatacccaaagacgcccttacgcaagcaagcagtcgtggcaggccaggaaattaccgcaacaccttggttccgcccccggccaaggaaagttaactgacttgattgggcgggtccactcggataggggaaattaaaaaaaaaaagtttttcagtaaatctgatatatggaaatgtggggccgggcatggtggctcacgcctgtaatcccagcactttgggaggctgagggtggtggatcacctgaggtcaggagatcgagcccattctggctaacacggtgaaaccacgtctctactaaaaaatmcaaaaaaaaaaaaaaaaaaaaaaaattagccaggcgtggtggcgggcgcctgtagtctcagctactcgggaggctgaggcaggagaatggcgtgaacccgggaggcggagcttgcagtgagctgagatcccgccactgcactctagcctcggcgacagagcgagactccgtctcaaaaaaaaaaaaaaaagaaaaaaaaagtggattgataagttggggctaattattcacttacttttgtaaaacatttctaaggagttctgaggaccaagttttctttctatattttaagtgagatttgacttatgcccaattcttctggaacgcatcccctgaaatggatatttttattcattttaatagtactttatttatcttattttgttgacattgagtactatttgccaagcacyatggtaagcgcttcatttctgggtctcatttatcctcctgcagccctataaggtagatgctattatgggtatcttcaagttgccaacgaggacgctgaagcttaggtaggttaaataatttacaaaaactataatggcagcactaagagtccaatatagatctgccaatcccaagaacttgaacagctcctgagaatgaagaatgaacagcccttgatcttgaagatctgttttccaggctccaaaatctaaactgggctctatctayatctgccttcctgggccaaacatttataagcatcagtgagagaagattgcctggatttgtttactttgtggtcctgaattttcagacaagcgcaaattcccatgaaagaagaacagacaatagctgtatcccagtagatcatttccctgttaccacctgtgctgaatttgcatttcattcattcattcatttattcagtcagtcattcaacagatcctgttgaataccatgttcagagaaatgtgtggactaaaaggatgatgcagacccaagasttgtccttaaggagcttacagcagagtgggaattttaggtgcccagatggaaatttgtccatttgggagtagtgtggggtgggaaggaaagaattagttaagactaaaaraaaaagttcttaaaacttcatcaccctttagccattgccctattgctcttctctcagccaacctttgtaaaagctttctgcattcactatttctcattctcacctccggtttactcgccatttcactgcttctgccccctccactactccagtagaattgctcttgccaaagttactagggacttgccagttgctaaattcatggaatacactctggtctaatcttatttggcctttctgctgcatttggcagtgctgattttgtactcttgtaaagttcttcctcccttggccttgcttactctcctgattctactcacactttttggaagttccttcatgggctgcacattgactatcccctaggtttctttcttctttctttctttcttttttcttcttcttttttttttttttttttttttgagacggagtcttactctgtcgcctaggctggagtgcagtggcgcaatcagctcactgcaacctctgcctcccaggttcaagcaattcgcctgccttagcctcctgagtagctgggatgacaggcatgcaccaccacacctggctaatttttatatttttagtagagatgaggtttcaccatcttggccaggctggtctcgaacttctgatctcaggtgatccaccctcctcggcctcccaaggtgctgggattacaggcgtgagccactgcgcctggcctattccctaggtttctacgctcaggttgttctctgattttgttcactctctctactcactcgggatttaaatatgctactctttctcttgtgatatgattcagtccagatggcatcttcagaaacctttcttgacaccccatccctaccactcttctccacctattaagtgctcctttcccatagataattctagaatatatatattaaattctagtgaaattttccgtttacatgtcaacggcctccaactagagagtaagcttctttaagtcagacctgtgttttacctgtatctgcaatgcctaggactatgtagcattcaatgaattcttgtttatttgctctgaactgtgagtcacttttgtattctagcacttgatttaaagccagcatgtagctggtgaccaataaatttattcacatcaaacatttattatgtgcttgctttgcctcagacattgtacttgagatacaaaatatttttgcccttgggaaagacatagtctgggaggggtggtatacaggagtaagcagacagcacaatgtgtcaggtgttgtgatggagggatgtgcaggtgtctttaacctgaggggctgtacttgggaggggaagatgaagggagggaggctccatagaggggtggtagccgaattgagtcttaaagaatgacttggagttcccagagtgggtttgtctggtaggaggaattcttagcagaatgaatacaaattgagggagtttagattagatacaaatacaaatttctagtccttttttgtttcatccacaaaggttgggaataatacatacctgaagagcctgttgtgaggattagatgaaacaacatatttacaagtacctcacttggaaactgttcgaatgataggtgtgttatcaatgttttgttggtattaggacacaatccaacgtgatgcagatatgagccacccagatggtctcccaccttcctctaatcctcaacagcctcaaccaatatagaggggttccgtgttagtcagagcccaattgggtacaaatgacaaaaaccttacttggattactccaagtgaaaaaggaattttattggcccatgttactgaaaagtccaagagaatcccaacgaattctttagttgaaactattcctggtctctaaaaatcacttctgggtctaatgatctgcaaatgaccagcatcagaaattgaggagagtttaagctcacaaatgaatgtgtgcatgttttgaaggatgatttatcaccaccctaagcaaaataaaataaatacctttgtgggaacttatgagcaaggagggtatttgttgttgttgttgttgtcaagttacagggattcttttgtcacggctcctttgctactcatttgtgcaaactgtggagccccttctcagaatatatatttttaaaaatttgagacatggtcttactctgttgcccagactgcagcacagtagcgcgatcgtggcttactgcagcctcagtctccccaggttcagttgattctcccacctcagcctcctaagtagctggggtctacaggtgcatgccaccatgcctggctaattgttttatattttttgtagagatggggtttcaccaagttgcccaggctgatctcgaactcatgggctcaagcgatctgcctgcctcggccttgcctcccaaagtgctgggattacaagtgtgagccatcgtgcygggcagagtatttttatttttaagtgaataaaacaaaatacaaaccattacaaaggaagcaaaattatattgaagtataatcaaaatattaaaaaaccagatttgtgatatatcaagataatgcttctttactgacataggaagatttgtggaggatttaatactgccttacttcaaagtagtggtgagtataaatgatgttttgagacgtctgcaatctcagtattttgagataactataataggatatgaaaatataatttttattgatgataaattcctaggtagtagtagtaatagtagcagtagtagtaataatactgtggtttgcttcctacatttataataaaaggaggtgctaaatttcagttagatgttagtgaaaataaagattgttttgtttattttgtcattcatattcatggatcccattraattctacccaaggacctcttgaggtaggggaaggggatgtaagcatcccaagttaagaaccccacactaaacaatgatccttttttagcatcaggtgatgcctgcaccaaaatggacctcaaacacatgacccagaggttaagggtctcatgttctcagagcaaactagtgggactttgcaaacttcgccttatagtggaggaactccackgtctcccgcttgaagtgaaccacccttttctgaactttcatgagatccatctgcaaacactgctgaaggaacatgtttctggctatagcagttcacatttcttgaaaaggaaataaaagaacactgagcaggaaggggaaggttttgagactcttgggtagttggagttaggtggagacaccttgctacyttaactttaaaccttatatccctggggcagggatgacttggcagagaaacaccttcaagtcacttttttttttgagacactgtcttgctctgttgccctaggctggagtgcagttgcaggatcttggctcactgtaacctccgcctcctgggttcaagtgattcttctgcctcagcctcctgagtaggtgggactacaggcgtgcaccaccatacccagctaatttttgtatttttagtagaaacgaggtttcaccatgttggccaggatggtctggatctcttgacctcrtcatccgcccgcctcggcctcacaaagtgctgggattacaggcgtgagccaccacacccggcccaagtcactttttaacatgctgtaacccccactttaaaaaaaaaaaaaccactttttaattatggtggggccgggcatggtggcttaccgcacttgagtgggtcacttgagcccaggagttccaaaccagcttggacaacatggtgaaaccccttgtctacaaaaaataaaaaaacttaatctggtgtggtttcgggcgcctgtggtctcggctacttgagacactgaggtaggaggatcacattcaccctgtgaggtcaaggcttcagtgagctgtgattgcaccactgcactccagccttggcgatggcaagaccctgtctcaaaaataaataaataaataaatataaaatgaattatggtgggctttgaacaattgttctccccttgtttacactttctgattttgaatcagcactgaatgccagtatggataacctattgtcctttccatccaggagcatacaatcttttgggggagataagacagaagaaacacatagacatacaaagaacagaattagaaaacatgctgagctcagcgagagagagaacattttggattgggaaagaagaggtgcctgcacctaaaaccaattatgtcttgaagagcggatagtgtgcgatagaagatggggctacccttcaggaaggggacctgccgagagaagtgagaaagagrgaataggcaggactcttttttagagccggacacttagtcactaaacaatctttgttacataaaatacttaaatcagcttgcttgggactttttctttcttggcttcactaatgctcttggtgaaacmtctttttcctttttcttttttaatcaaatctaatgctcatgaaattttgtagaagaaaaagaaaaacgttctccctttctgagatagagggtttgttttgtttttgtaaacaagataacagggaagagtgctcyactgttttggaaagagtgactcattcaataaatatttattgagcacctattaggttctcggtactacggatacaacagtgaattgaacaaagtttctgctctacagagctgtggggttctcgttgagcctgacagatgataaacgtgtcaaatgaagataagttctctgaagaaaaataaaacccagtaaaggggacagcattagaggatgggctgctctttttagtgcagcaattgggatgtctgataaacctcatgagagcagagacctraatgaagtgaaggagtgagccatgcagatatccgtgaaaagacttccagacagaggaagagttagatggaaaggataaacacatataatcatttaatgttataaaattatgcctcaggtaaataaatgtagcatacattttatcgtacaaagggtcccaatatactatgacattttgcatatagattataagtattattctattataaatttatcttgggataataagatgtgtaatcaacattgatcraatatttaacaataatttttttctctcttggactctagggtagggaaaacttttcatctaccctcctaggttatatactrggggcttgcaaattaaatgtaaaagacaaatgagcaacaaaaagacatttgtgggagtttacagaaaaatgtgacaggaggcagttagacttgggggcctatacatcatctcagtaggggaaggcggaagaggagaagagcatttgctggaaaccacgactttaggagagataaatcagcccttaagagactagataggagatgtggtagttttatgccagtgtctatttagttatggtaatgagtcgatcttccctggttgtgaaactccagagttcctttggggcacactgcttttaagacagatgaaggagtttagtaaaaagcctatttttaaatgactggctcaaaataatttttatgtcacagtggtgtagtctggacccctttagactttagaagagctttcagcagattgatttgagtgagctrcacttctaagaaagtgaagcaggaaagtttgaactgatccctttattctcctccaagttcccttgaggcccacacagacatagccagttattctgctgactttgaagctgtgctcacagttgggatccacctttgaaaaatggctcctgagtgtgttaagtaagtaatggctagccragggcttcagttgggaggactgcggagaagacttttctcccctggggtcctcaaaggggaaagaaatcacaagggggcagcatagggagttgtttggaaagggtgagaaggctgtgcttagtgttgggatacgcggatggatgtaagctgggttttgttttgtttagttttttaaacttcagctgttggaagtcctccttcccatagcttctccaaatcaccactgagctgattccccaaggcataaagacagccctgaattaacacagtggggaatgctaattaagtcatgccaataaagatttaatcatgaatcagaaacacttggaaaattatgttttcatattggaaagatgttctttttttctctatgagtaccccaaagtgtttttgaaggatgaaatgcgataggtggtaggacagaaatatttggttgacttgtccagtatgctaatggtgttggaacagggactccagtcttctgatatttcatctggttggtcttttccataaataaatatatcccagagcaagtagttctggggattgttataatatgctggttaatagcatggagaaactggcttgggcaatgttaagtaggagtttcagagcttttaatatatgagtactgagagtttgtaaaaggaccccaaacagaagaattttgggaaataccaatctataccatgctgggttgataggaccatctatattatacaagaatcttckcagatttaagtttcttctttttaaactgccattaagggcatgcagggaaggtgaaattttgttttaatatccatgtataccatatggcttattttggcaactaatatatgaatttgttcttggctgctttgagtgtgattgattcagcccaataagtattttctaaccaggtcaccacatgtagagttatgaggtaagtgacaaaagtccttctgaccaaatattagtcctgtatgttgtactccaatgtgctcacaagcatctctgttgctcaagagtgaattgaaatggctactacattgtgtgagtccagagggcttaatctgcatggtgtcatagccatttgggggctaaaccgacargtgtgaggattgtaaactggcagggagctcaaaatgagctgattggtgaaacttcatggtgatctcgtaggttgcagcagagaacaatacaggcccagtcctcacatgcttgggacttaaggtgaaggtttgtgttggaggctaggtgggttacggacaagcagagaactgccacaaggtgctgtcagcactgggatggaggtgagcaaaggaggctaggaaagcataaaggaggcgtgcctggttccagcagagggagtagggaagtgacaactaaaaccagacctgaaggtgaagagcagagaggaatgttccaggcagaaccataggtgagagaatttggcatgtttaagagaaagctcccctcactgccccccaactccgtatttttgtttcatactctgcaaggagcaactgcactaaaaatgtacctcatgttttctattttacaagttactgccacatgcatggccttatttcctgtctacaacaaacctttcaggtgtcccaggtcacaaagtcaggaaaagagcctgggaactgcccccactcttcctagaatgtaaggggtgttgggccatgttccaaataccaggttcccactgagagtggctgaggataatgctaatctgggcagttttaagcaggaaatgagtatgtggagtagggaagtgcggagatcttgctatgtaagtcagagctatttttctcactactgggttgaattaaaaccagtttctggaatcacaatgtaaaacaagaggcaaaatccacctcgaggcacattggtttttattccttaaatgttccacataaaaaatgaaaactgagtcagtagaacagaatcgtaagaccagatggcttcccaggatcaatgggggcaagccattaactatcatctagttaatagaggaaattgcattttacagtgggatgggttctagagttcgrgtggaagatgaaacttcagtcaaaatcatccttaaagtcccataggaaagtaccacattggagaacaacatgtaacacaacaggtatgtctttaaatagcagaagtgcactcaagatacccatactttgagaagcacgtggggactaagactgagcargggcctgtggtcactgggtgaaatggtggcagaattgcccatgctgtttaaatttcactcttgtcttctttgtctccctggaagttctatatacaacagttacatttgtgcaagatraatacttgtatgatgtgactacactgcacattcttgatgctactcagagtgcacatatgagaatcatctcaatcatgattcatcacctgcaacttggagcacttatgccctgtgcctttctaccgggcttatatttgaaatctcagatttccctgtcaaggcttgatcttaccgctgcagatctgtttggaccactctgaaagagtatactttgaggtgccttccaaagtgaatttgatgtacaccacgtagcctataaggaatttttacgattttataggttcmatcagctgttgtaacagacactcaaaacaacagtggattaaacaagatgtttttctgtcttgtggaatattgtgggtcagcaggccaagactagcatgatggatccatgatgttgggacccagcctctttaatcctgttgctctgccatcttgaaggtgttgcccttgcccatctggttgcagatggcttctactaccacatccatgtttcatctagtgggcacaggggagagatggggcagagtgtcttccccctttaaaatcaggaaattgtgtacctgactattgctcacaatccactgggaagatctaacatgcaggccacatttacttgcaagaagggctgaaaatgtagactctatattgagaggcatatggccccctgaaaatgagtggttctgttaccttaaagaagagaaggaacactagaaatatgtgccatggtccacctctttggccatgaagacagccatgcccattgttcttcctgcccattgaaacacagcactcctttccagtggaggcaccccagattccttccagttacccagtcagtactcagtgttcatagttctctccatcaagcccatgtgtggctccttgtgtaaagttaaagacaaattatcaggccccctgtccccactacataactatgtataactatatatatagggagggagttacataactctgtgtgtgtgtgtgtgtgtgtgtgtgtgtgtgtgtgtgtgtktaaagagaggggatatagttgtatatttacatatgtagaccagtcactagccataggagtgttcacattgtcgcattgtcctggctgggaatgcacactcctgtcctggcagtggagtaggtccacagggaaccctggttccaccctcagggaggaactctatccacctgctcatgtaaatatatttattgagtaagagtggacattggagaaggccctaaaagtccttttggggctgtacagcttatgtaacctgcttcctgctgatgaaagttggaggaaaagaggcaggggtgacttttgcaggccaggctcctggctctttcactgtacagtaccttcacaaatttagtagtcttctggcctatcctgatcagttccatgtgctggtaatcacagtgaaagttctcacctagatagttttgaaacctaaaaactttgacttgtatttattggatgctttgtgcctcccttgatttctctattactgatggctaccttgagacaggtggaaaagataggctagtacgaaggcagtatccttaatctgattttgctggtgggctagttcccattgtctgacagagaatcctggggaatattttatttattattatttattatttttatttttttgagacagggtctcactctgccatccaggctgagtgcagtggtgtgatcatggctcactggagcctcgaattctcaggctcaagtgatcctcccacctgagcctcagcctgggactacaggcatgcaccactacacctggctaattttytgtatttttgtaaagatgaggttttgccatgttgcccaagctggtctccagcttctgagctcaagcaatccacccaccttggcttctcaaagtgtcagaattacaggtgtgagccaccgcacctagccctgggaaagattttagacacagccttctctgctaagcctgctgcttactgtatagctgatttaacttggtttcacaaatagttgtcatctcaactctgtgatggcacaaattcctggacttggacggtatcatttgcaggccacagtaaaaacaaaaaacaaaacttcccttagcagaacccaacctgcctttatttctctctgcagaatggccagcccttgcctgagctcccgtctttattgtagcaagaggtagttgacaagcactcatgttctgaattctgccaaccatttgtctcaagctacaaatttggttggccagtggtctgccttccatgctatcagaggcaacaaatttttccatgccataaaaagcatgctgatgccaatgttttagattctgttttggtacagaataccaacttttttgttaaaatgtaggtttggctgctgttagcagagtttccaaataaagtacttaaaagttgatagtaatggaacccttcctttcatatcctgggtgtgggcagtccagggctgatgtgtggctccattatacacagggacccatgccccttttcttctgttgtgcagccttccctggagtgttgctcttatctaggtccgggatggctgcccaccaccttaccttcatgccagctaacatgccaacaggggagaaagatggaggaaggcacacctttctcagagattgaacatatctgttgcactcatgtcgcattaatcaaaacttagctaagcctacctctagcagcaaggagggctgtgaaatatcagtcttattctgggtgtcatctgtcaagctaaacattggggatttgacaaaccaaatgaaacagagaattgatgttgggaaacaaccaatagtttatactgtcctaagcattccctccaaatctggtgaaaatcactgtcattttcaagtggtagtgttacagagagaagacagaacttaattttatatgggcagctagatttttggaagagaccttggccgtcaattattccaaccccactttagaaaggaaccaaggcacaaacattgccattgtacgagtcttaaactactttattgaggtatgattcacatactatataatttacccacttaaagtgaatcattcaatattttttagtctattcacagaactgtacaaccatcaccacaatctaacttcagaatatttccatgatcctaaaagaaaccccttacattagcagccaatctcccttgcttccctaccccttcagccttaagcagccgttagtctactttcagtctctacgtttgtgtgggtagactttacatggaccaaatgtccagttttggttgccaggcaggggaagttccatttaccaagtgaaaccacaggatcatgagaagcaaagtaagggctgtgtcaggagcagtggaattagtatcccatgcttctgtgtgccttgtcctgagcatgggagggttaaagatgtcctcattcgcaaggagctgccagttgaatggggaagattgacacatgcaaaaccagacagtaaccattaggtattataaaagctaacacagaaggaaaaagagatggtcatgggagctcagggccagcctgggataggcgagtgtgcctgggatgggtggtgtgcccagcgaaggcgttctgcagaagataagtgtgtctttcttggcagactctctgtccacagcagaccaggctgtcaaaaaaaggaggcgacatttctccagaatagcttcttcattttcgtgagggtaagcaatcagatttctttttttataaacatatttgaacttatatatccaaattagtatcgtamcctgccaaatcgccactctgggaaccrtgcacgcactccagtgatgcgtgtagtgctcaaagcatttgaaactcctctatgggaattatctttcagccagtcagtttatgggtcacctaggaaaaccagtcacattattttatagtcatgcctcatttttcacctaaagcgatgtaacaagatttgatcacccactttattcattagacatggctccagccaatttttgtctttttccaaagttcaaatctattctcaaaggatgagatttgtcatgactgaggactttcaaagaaagtgccgcagacagtaaaaacagttacccactaaaagagttagagaggtgtcagcattgtttgaataaatatgttgtttcccaaggtgattgttttgaaagagataatgctaattgagatgaatgtactcaactggcataactgtttaaagggagttactgtattttatactgttcaagcacattgacctgtagagaggagcttaagagacagttcttgctgaggcagagtcyggcattctgctttctgcagcctaccgcagtggcctggggatacagttctcttccattctggtaaacgtttaaacctgctttggtgaggcatttaggagctgtacaaaatgggaaggtttgttaaaatataaaccgacaaaatggccaaatacccggccctgacygaggaagagagtcctgtcagctctaaaccatagaacttgaaacccaaatgctaagccagtgcccacctcgactgtgtgaaattgtcccctgacttcagaggccagaaaatggatctgggatggtataactgggtggrgacagggaaaggccttttgatttagcaataaaactattaggttataccacctccatggggactttgaaaaatgcattctgtggaacaagatgaagtgctttttaaaggaagattttgaaatgaagcaaaagggaaatcagtgtagaaaactcagatggaatcagggataagactggcacctgtcatgaaagcccagcttcctctctgggctgggccacayagttcactctaaccgctttgtggtcaaatccatgagaaaatcacttaccccacagtttgccatagacagctcctccatatgtagaagtggtattcgaaagagtaatcgtaatatctgccttgaaagattcttgtgaggatgaaataaaatttgtgaagcacttgttatagggcctgacattgtaactggttagtaaagagaagattctgatgattctatgattattatgattattccaaatactgaggccattggaaggcagagggaggggataagaagatgggcctagggagrgtctttgtgcctcttaccaccctcactttttggctgtcctatcctgcctctgtccacacattatcccttggactttttctgtcaggcagaggttcacagttgctctaaatctcagccacaggcccatcaatctgagatcttcacctgttttgagtcaccagctagcagtggctagctaaggatggatatttcaggatggatctgtggaatggttactgggcccaggccaatgtcttgctgcagatgggaagctgcaagaaatgtatgctggcatttctggaaacctcctgggacatgtgaatgtgttcatttgacaagcattgcggaacacttttgtatgccaggcactgtgcacagtggttgggggtacaggatgagtaagacaaagtccttgtgcttagggtgctcatgctggtggrggagayaggcactccatgggtagttacaayagggtgcgaattctattacagtcagtccttgacttaccatggaatgatgaattacagttgtccaactttacagtggtgtaaaagtgatacacattcagtagaaaccatactttggattttggattttgatcttttctcaggctagcaaaatgcaggatgatactctaggagtgagccacacctcccagtccaccacgcggtcccgagggtaaacgaccaataatgtacaatacagggtactgtatttaataaattacacgagatcttccaacattttawtataaattaggctttgtgttcaatgattttccctaactttaggctaaggtaagtgttgtgggcccatttaaggtaggctaggccaggccatgatgtttggtaggttaggtggatcagatgcatttttgactgatgatattttcaacttacaatgggttccaaatggaagtcagaccacttggtggctacctaattttaccacataacctcagttcatagtagtgggttggaagtgaagactttgagattttgcttcaaatttcagtttcataattaattgtacaatatcatgtatactgcttaacttayctaaaactgttttctcaccagtaaagtgggattaattccaatatatgctatatcagagaattttatgaggatagaatgaaataatgtacatacaaaggttttgtgaattctaaggtgccactcaaatatgaattatttggttgtttttgaaactgtaatgttgcttcaggaaagtcattccactggactaatgtaagcctcttgccaaaaacaaatctctacacacagtttcgtctagttctctcaaagtccaaaattcagatgtgctaaagaataataaaaaaaaaagttacaggcgttttgccattttgagaatcttagtggaatatcaaaattacatcttttatgttaaaatttatgttaaaagtatatataatctttggtgtgagatctgagtttgattcctggacatggtagttattagctgtttaatcttgggcaaattgcttgagctgcttctttactcatttgtgaaattaatatgttgggggttttgatgggaaatacagacactttaaacttcttgcaaaaggtttcccggccattaccccctcattttaacttctcttcttcccagatttgccaatgacctgtcaagatgctctacacctattagcttataaatttcagaacagaaatatctttcttacagagagtgtttcatgcacagagcctggggggagggagaactgttctgtataactttaggttttcagtaatatgtcgtcagcctgatacttaagttttctcaaaagaacacagcagccagccccaaagtaagcaaaattgatcctgagtagcttaagtactggttacggtgtttggtgtttgtatgccaggtctaccccttatggttttaggatagtggttctggtraatagttgattaggtccacttgctccagaaatctccgtgaataagatttgatggggtgctttccatccctgaaacatttactgaatgttttcttattgcttaatacagtgctgtgtatttggggcatgcagtagtgcataaaacggtctccgcaagtgggcattgcaatatagtgtgagaagtgcctcgttagggtgtattgggggccctagggaggggaacacgcaggggtggtcagaggaagcttcccaggggagatgtgtttaagccaagtcctgaaggatgataaagaggaagccaggaaaaagtgtagacatgggggtatgaagaagacattctgtgtagtgggagcagcccttgcaaaacaaggagatccttgtagaaagtaaaagcacagccttagactgtaaagtaggactcatcctaactccagcattgcaggaagggaagagggaggccgccggtgactcagctgccttaacccctgaggtcacacaggtccttaacccctgaggctttcttttatacacaggccaacataagacccagtctgggaattatcctaaggcccagcctgggaattctcttatggccctgagggaagggaggattttggagacaggatcaaaaacctaaaaagctatctgtaggccgggcgcagtggctctcacctgtaatcccagcactttgggaggccaaggcaggcagatcacaaggtcaagagatcaagaccatcctgggcaacatggtgaaaccctgtctttactaaaaatacaaaaattagctgggtgtggtggcacatgcctgtagtcccagctattcgggaggctgaggcaggagaatcgcttgaaccaggggaggtggaggttgcagtgagccgagattgcaccactgcactccaacctggcaacagagcgagactccttctcagaaaatgctatttgtaaggaggattgggttgaagtatttgcccagtaacatattaaggctatcaggagctggacgtggtggctcacgcctggcctgtaatcctagcactttgggaagccaaggtgggtggatcactttaggtcagaagttcgagaccagcctggccaacatggtgaagccccatctctactaaaaatacaaaaattagccgggcatggtggcgcgtgcctgtaatcccagctacttgggaggctgaggcaggagaatcgtttgaacctgggaggcagaggttgcagtgagccgagatcacaccattgcactccagcctggggaacaagagcgaaactctgtctcaaaaaaaaaaaggctctatcagtttgctctgactctctttctttaaccagcaggttacgtgacacgtgacaccatctgcatgtgacctactgtcttcactgggacaggccttctaacttgggtcaactggcctgaacccatacgtagaatgattgatatatagttcactaagttaaattatacatttatagacgcaaaaaaaattttgacatacagtgtggttgtgttgtatcctactgctctaatattaggaaaggggctgggatgctaggtcagctgggaccctctttttctcrcttgcattcatctctttttctctcttactctcaccacttttctacctcatgttgagtagcgccatgaagacccctccttcatcactctgcctgcagttatcctgggaagcaattataagctttcagcctcaaccatgcagactaactggctctacttccttcactattgcagtttctagttctgttcgtaattgttgcacragactttgtgctattgcaactacttggaatgccagttccaggcagagtgccctctgttgtagacaccttgtgctttgggaagttgtctgtgattaggggagtaattttctatttgaggttggtctcaggaagggaaaccactcctgactcctgcctgaaaactcgcctccttgctcagaaacactaattacaggggtcgtttgatgctctcacttaaatattttagtcactcacacatttattgactatctgtatgtgcccaaccccattccaggtactgaggttaaaaatgagtgagatgcagtctctccataccacagagcaaaggaggaagcttgtttgtgtatatggagcatggcccatgcagggttacttaatgctagaaaccaaacactctgaggcaaagaaaaggtgtagggggttggggggcagggtagaggaatagtctacccagactgcctgtcactcagaccagccactctgctgcaaaaggagttggcttatctttttttttttttttttttttttaagcacttagcagtttcctagggctgctatctgctgtaacaaactgtgtggcttaaaacaatggatatttattctcttgcacttctggcagcttaraagtctgaaatcgaggtgacagcaggaccatgctccctctgaaggctctaggggagactctttccttgcctcttcctagcttctggtggtggctagcaatccctggtgcagtgtaacttcaatctctacctctgtcttcacgtggcattcttccctatgtatctcttctgtctctgtctccaaatttccctctcctaaatcctgtcattgaatttagggccaccctaatccagtatgctctcattgtaacttgattacatctgcaaagaccctatttccaaataaggtcacatccccaggttcctgggttaagacttcaatgtatctttttttttttttttttttggagggggygggagtagtgcaccattcaaccatgacatctatactctgtccaccaaatgcaggtgggttttgtacagacaccaaagcacatatactttgcacttgggcagtagccctttgggagtcacttgggatctatttcctcttaattttcttcaagtttaaacaaatttgatcatccaaaggagccatacatagcccaatgatgagaaacrtgagctttggctttaaaactggtgttgaagccwgcctttccaatttattgtgagtcctggagcaactcrtgtaacttctttaatcctcagtttccttatcagtaaaatgggaatagtgagaatacctacaccactgagttgttattaagcctgcatgaaaacctacatgtaatgatattcactgtgctgagcactttacatgatctcatatagtcttttcaacaactcttaattgattggtatttagacttctgttttacagatgcagaaatagaagctaagtgattcgcccaagatctccaagatactaaaaagtatcaagagttggaatttgaacctggatttccactgtgctctattcctcaagaccctttttaatagttatgtagcgctacagtctaggggttcctaaactttttaaggaaagtccaactttttatatccctaaagccttgctctcactgaagccttgattgaggccaagagagaatgccttgctgctgcccccaygagccactgcccatctmaggaattcccacagatgcccacatttacccacatgctttaaaagctcttgtttattgagtctttgctgttcacctggctgcatattacattacaaggcaaggtagcatgatagttacatgtctgggctctggagacagactgcgtatgacctggtgtcttcttagagcaagccttctaacttgggttggctgaatcaaatctatatgtaaaatgaatgatatacagacagttcactaaatcaaagcccatctccacaatctacctgacctcggacagatgacataatctctgtatcccccattttccttatccctaggataagggctgagaataataagcccctatacagttgttgtgaagattaaataagttaatgcttgtaatgcatttgaaacatgacccagcacattgtggcctactgaatttatcttctactacctttgagcaggcatcattgtccttactattttacaaataaagaaactgaggccagaaaggccatataccactagaaggttcgagcaaagcaaggattcaggctcaggcctgtttgactccagagcccagtggttacagcagggactgtacttgattctttaaatcctccttctgctacctgtcccattcctccagtgcctggaccattggagatgtttaatcagtatttatccacagataaacccattgcatctatgccctcctacctaggcttacctgctttcgagatcaggggatgtgttagaaggatgtgatcagtccttatcaataccctttctgtttttagtagtttggataacatttattgagtgtctactatatggccaggcattgtgagaagcatttcacacatacctttcctcatttactttcagaaccttytaaaggaggcttcactctctgcattttatggaaactctggcttacaaggaccccatygaaaaggatgttccctctttgtggccaccttctttcatgtcctttacagccggacatcctattttggccagaccatataattgaaaatgatyttaataatgagacagacagaaaataacctcaccatttctctcctcttcttcttcttcttttttttttttttttttttttttttttttgagacagagccttactctgttgcccaggctggagtgcagtggcgcgatctcgactcactgcaatctccgcctcccgggttccagcgattctcctgcctcagcctcctgagtagctgggattataggccctgccaccatgcctggctaattttgtatttttagtagagacggggttttaccatgttggccaggcggatcacttgaggtcaggagttctctcctcttcttaaaagccccagagtcccaccatattttaattatttgatggagggccaaccactgcctgccacaaaacttaaaggggcacaatttcccttgtgatcttggtgaagggagcccatagagttgtgcaaggctgctctgggcagaggtgagtgaagcactgccccttacgaggctgctggcaatcttgcttgtttttccattttccaccacaagagggcaacatatgaccatgaatgatttgaaaataaagcgattccttaactggttctctttttaccaaagaattttaataattgtgctcctggtaagttagaatggggaaagttcttctgttagcgccaagtgaatattcttaagggattgaaattcaaattgtcttgagaattctccaaaaaggaaataaaagacatagaaaaatgttatatgaaccacataaatggctgtttttataggtcaaaatgtttgaatatgggtcatttctgataaaacaggagactccttcacacgtgccttacttatgaaaaggggttcctaagccttgcacatcttcaaattgaggagattgttttcagacgtaaccacatgggttcagaatggcaattatgcagatggagaatgccttccatggcttcttgtctgccctgtgagtgctcatagctctcttgtaggctcccagatgagtactttttactccattttaaaatgatttgttggcttatctatctctccttctgcaccaaaagtttcttggcaacttgagtcttcctgaggtgtacagtgcctggtgaaatgaatacaacacrtcggtctatataggacatattgggtagatggatgggtgaacagatggacagccaactgacgcgtgctaaaggttgtacactctctgaggcagaggcagctgttatgtttgtttttattttcaaaatctacttcaggagtctctgtgaacatgggattctgtagagctctaagccatctggcccttgtaattcttctgaccttgtaccttcttccaattttaatgtaatttctccttttctttagrgaacatttcctaactctactaaaatgcacatagccaatggcccgtcccaattgttgggtatgaaacacgcctgcttgttttcagattcagagcagtgctaaaggctaatacttacgcagggcttgcaaagcactagaaccagctggtgctaagctctttacatttgtaaactcctgtctcttaatacaacaaatctatgcagtagctacyactttcaatccctgtttcaaaggtgagaaaatagaggcacaaagagcctacatcccttgcccacggtcccctagtcagaaaatggtactcggcctgtctccttgctgtggactgagggagctcaaaggagaaggggaggaagtgttctctcttccttttcttgcctgtactggacagcaggtgaggcctggctcacagctggcaaacaggacccaggtactacggagccctggtcagccctgtaaagagatgtaagcagctataagtagcagaagcccaattagggttcagtgagcccctatgaggcctgacacacaaggactgcacacagagagaggggcgtctcctgcagccacaggcagtggtggggcagatggacttcaagaccctgagacacattttgggaggccaggcgggcagatcgcttgagatgaggagttcgagaccagcctgtccaacacagtgaaaccctgtctctattaaaattaccaaaattagcagggcatggtggcacacacctgtaatcccagctcaggtgggattgaggctgaggcacgagaactcaggaggctgaggcacgagaattgcttgaacctggaaggcagaggttgcagagattgcacaactgcactccagcctgggagacagagtgactctgcctccccmcaaaaaaaaaaaaaaaaaaaaaaaaaaaaagaccctgaaacaagaggaacccaggcagcgtctcctggttgtctcagcacatctgtttcattttcctctctctctgctgacccatttgtcaatggaaattaggtttctcagtgtgtgtggttttttttttacaaactcatttaatcaagcacctatgaatatttcaaatttttaagtcaaatatttgttttcttttaaaattccttgtctaataaggaaaacttttcaagtattcaagttgttctcatgtaatcaaataataacagcagatccttgtacagggcatactatagccaccctggtttcagaactatctgtaaattgcttcattcaaacttgactacaacaagtaaagtagagctgctatcattatctccatcttgacagatgaggaaatggaagcacaaagaggttaagtaacttgtccaagatcatattactagtaactggtagaataagggttcagaccctgtcactttggctttagaggccattccctcaagtactatagtatactgtctgcatgtgatgacttaaacttataaatataatacagtccaagttttctggaatgttccactaatgtttataattttgataaaattcttctcataaaattcttctcatacctccttaaacttaaaatcctgtctaaataagtaacacaacctgcacttaattataaactggaaccacaaggctaatctttagataaactaatatcccacatttcttaaatgtatttcaaatgccaaatatacctagttttcccccccttactccaaaaatattaatactatgttcattttattatttgtatcctatgtgatatatttcatcatctgtacacttaattttaagagagtatgttttaaaatgcctacttaaaaaaccattctctcacctcaagtgatgaggrgttacctttccagttgaattggggtgacaccagctgggtgaggtgtggctcggccaagggtctggatgtggaggcaccgagtccagaataccagcgccaaaagggattctccagtggcttgtgttcccagcccctgttcccrattctcaggtctgatgaatctgcaagccctacctacgtgagaagattcatctaacctattttctgcttgatactatttcgaattcttttctgattcttcccgtacatcagatccacaactcttagagatgtatgaatgatcccgagttggatcctgcatagctgtcacggactctcacatattgtcaggctgtcagcagcagttctgtggatattctcatgcctcaactgttcttgccccacagctcataagtttacctgtctttctggttcaagggctaacctaatctggctagtacacttttgagtcccaattctagattccaaggagagaaaacatgagtggtccagctttagtcaggggtctaccccwtttgctcatggcctggagtcagggtcctggagtagacacctggcctcaggccttcactctcatggaatagttgggggacagttctcagagaagagaggagatgagtagaaagcacagtatggaaaaagggtcagaggaaagaggttgttcaaggagtatcttcacagtaggagaggaaaaaaacaaaagcagtgctcaaactgggccaagaactcagagttgaagttgtgtgtagaaagctggcagaggaacagtgctggacaagatcacattgactgggaccctcaaagccaccccagctaaggatgggaccctttttgcaagccttggttaatctttttccactcttatttctccaagccattcaaggcatcactgccagccagtcaactttccaaaaacatattggtttatattctttttgcttacaaatttccatagttccccagcactttcaaaataaagtttagcacrgttcacaaggctccatagacttgccccaactatttctccagtctcatccctgtcactgcaacctcttcagagccgcagctctgtaaacacaccttcaggatagcaccaaggccatcccgctatgatggctcctttctgatgtgaacttttttgagaacagaggcccatccacctttgtttctatctccaaccccactcagaatgtgagaaaaaaaattgtatctttacatcattttccagttcataaaggctttcctagacattaactgaggcaatcttcgcaaaaaccttgggagagaggtattatttcatgaagaaattgaggctcagaaggacaagggggctgacaatgaccgataatctaccttataccaggcacagtactgggtgttttcacatgtgacctgttttcagttttctgaacaaacttcagagctatccccattttataggctcagatgagttaagtaacttgctctagattgtacctctcatacattttacagtgaaagatttgagccctagttgtatctggctgctgaacctgtgcccttcccgttagaatgtagtgccttgcctggggctgagcatttactacctgcttagttactggtggctggagaaatgaataaccgttttccactcttggggacaaacacttcaagccctctggaacaggcacctgcagccatcacaagcatagggccttgggctggagtgtctgattaaccctgctgctttaagccaaatttctgcctttctttctagtgcttatgcctggaaatagggttatcaggctcatcccttatgcccactcctgggacattagctaagaaagaattcttggtgtgaagaggtgaacccattcaggccagccctcayatggggcctgggacaccattattaactgtccattaaatattttttaaagaaacatagaaaagaaagagtgaataaaggattggtaagtctacggtttctgctatgctctactgggaaggtatcactgctgatgcaaatggaagctggagtctttgcaaggctgggagcgaaggggttcataactctgccattgtgaaattgattggacccaagaccagtatgaaagttccttgtctgaagggagtaatccttaaatcccccatatggtttaaatgtaatttgtgtcattgtgaaggagtactggcaatgcaggcgaattcattaggccaaattgggttcgctatgctcgacagtaacgtttctgaagatgaagttcaacctttgctggagagctaaaacaaatgagtttcttaatagctgccccacttagtctgagtgtcttaggaagcttaatgtttttaatgtctcttcttttttactatacttcacagtccatctaacattgctgcttctggtaatatttttatatggggttgagttctatagtgttcataaaattatgatcaggcccatttttagaatagaagcttttctagggcaaggattatgttcttttggtatagttttgcatattgacaaacaccatgcctggcatgtgtcgttgcttaaaatgttgctctcrtaattctgccctcagaaagaacttcaccgagagactgggaggctgccagcagagactatgctggagtgtggtgtattatgtgggcagagaggctttggtatgggatgtgggaatatccttgtgcccaagtacccccaaatttaccctgggatttcaagatctcattaagaaaactaccaattatgtggttggctgctctgttattccaatgaaaagattattggaatgatattttataaatctggatctattatcggatatgtcaagacacacatgccagcctaattcacaagcccatataaaaccagggaaaacttggcacagaacttacaaaataggaatttaaaaaatcatttatagtacgttgaaaaacagtggttatgtaaactgttaataaagcatgcttgctttttcaattaatttctaaagaatttgacttttaaaaacaaattaagagcccaaaataagctataaaaagtagtcgtcttttggctgactggttttcaacataatagatgtgttttgtgaattgtgttaatgttrtgtctcgaggtatttcctgcacatgggccaggcccatttgtcatttgaaggggctcccttgccagtggcctactttctgcttgtgagcytgttattcctgctggtcttgtgcagagcagccccggaacacagcggcattcttgacagagggcagttggcagctaccagtgcctgtctactttcggatgctacttgacaagttagtataaaaagactcagattttgttgctcaagggatgattcacttttcccttcaaaaccttaattcctcagtgcatgtttggtctgttgtccaggctggaatacaatggcacgatcttagctcactgcaatctcagcctcccaggttcaagcaattctcctgcctcagcctcccaagtagctgtgactacgggtgcacgccaccatgcctggctaatttttgtatttttagcagagacagggtttcaccatgttgaacagactggtctcgaactcctgacctcaggtgatctgcccactttggcctcccaaagtgctgggattacaggtgtgagccaccatgcctggctgagaacacacatgtatgtatttaaatagatcattaataaaatctcagggatcaaatggaattagatatgaaatttatttaggtaaaatatttttaaacatcctagtttcttcaaatacaaaggacttaaactgcttccctaaaaacattttattaaaagtcaagtatgcttaaaactgagaaaatgttaaaaacgaatctcatgttcatattatttttctaaataaaaactcgatccaaccctgtgtactcagaaaaacatatgtatattttttccgtgttttgcttacatttttaaggacttggtgcatcctcacgcctgtttttttgtatattcaaaggaatgaccaagctgttggttattcagggcaactttggaggtatctgttcttctagaactgaacactgttttcttaaatctttggtggccaatgaataaatctgttagataatttttttcctgatagattgcatgtgtgaagtaaaaataatttcttaggtttcaaaatgacagtgatgtaagaaaaccaggggtaaattaagctccctcacttccattttaagattgacctttaacttgctaggtggcatggggcaactttagctgcagatggccttctcagagatgaatgcccagagaggctctggtttaagggatggcaggagcagtgagagccacaccagggtgtcttgttcacaaatctgcttcgtgggactgcatttgccctctttgcctgggctctgagagtggagcctgtcagccacctggtgtttacagctgaagttggctgcatgcagcactccttggagctatctctaccctaacggggaaatgagacaaaaataattgaagggtatttggcttggttaagtgggcagaagtgtcctcatcaaaacaactttgaagacctgctttgtgtgtgggtgcgagtgggtgtgtggcccttaacttgttcacaagggacaacaacaacaaggaattaaccaagctttctcattgagagtgatcgtccatgcaaaccctctattttagttactcatacgacactgttgcagcttcaggttggacagacctattttggagtcccttgactgctttctggacaccctcactgagccagtcggtggaagtgaaggatgagtgattttgaagaatggatttctgggacatatagaaaaatggaagaaggtcctctccctctgttgacttttgctacagctccctaccacgatcagaaaccaggaacaagtggattacggaagaaaacctattattttgaggaaaagccatgctatctggagaatttcatccagagtatattcttttccatagacctaaaagatcgccagggatcatcactggtggttggtggagatgggcggtactttaataaatcagcaatagaaacaatagtgcagatggcagctgccaatggggtgggtatatgataagtattgttatgtttctggctctccaaataaccttaattttacagaagtatacaaacgtacaaggatttatatgtggtatacacttcaattctactaacatccagctaagtttcattgtaacttcagtgattgtatattgtgaaaatacttcagaaattacattagccacactgggatacaggaatgttaagttcagcttcttaggtattatgctgtgttctgttgcttgacaaagtacctgttgctttttagacatttaaagcacactcccggtcttaagctgttttatctacattctaactagcttcaaggggcaccctgtcctgtgtaagagggctctactgaatggtggagagaagaggattttgttttctttcaatggctttcttgttgaagttcagtcacttgtcaaacaggaaaacaaaagccagggcatgctgttgtttatggatcctggtagtcacgcagaaatgctaggaggaggttggaaaatgttaggtgtgagccttttgaggggacctgttacaggggcacctgcttataatgaccttggacacaaagaagccgtgcgcatggtgaatttgtgcagcagggtagagataataactcctgtaagactatagtatgaggcggctctgctaaacctctgcatcgtgaaaaaccgtgttggctggattaagcaaatgagaaggaayattgtaccagaacgcattgatcttgataatctaacarttcgtgcagcccactggtttccaggaaggtgggcatcaggacattgatgtttttgctctgcaaattcctcagtgggaccagaaatacatttttagtgttttagataatgattagcaattagttggagcacatagtccttcagtacctgcaaattttaaaatctggtgtatttcttttctggaagagattctgattcttgstagataaaatgtagtattgcaactaagtgtgttagacattcattttcagtgtattttcaaaatatgctgagcaggtatgtttgcagaagcaaaattaaagcaaaacaaaataaaatgtaccaccacactaaattttaaagtgtttgtagatcctgttgtttataattagagttttcctgatactcagtttcagaatctgaatgcctctcatgtaaaagttgctgataaagcactcaaatatgaaattattatgaagcatacacatttttaagataaaatgtgacrtgccataaattttttctttgaggagagctgcaaagggaacagtattaagatgcttttaatcttttgagagggaacgaatggaacattatttctccacatatatctagactgttgagtggatctggtacactgtcccctttgctgtgatatatttggctccatttcatttttgtgtggagctgaagaatgtggaagaagtggtaggaatgtgtaattcaggcacaccctacagactttctcagatttgccctctgaaggtttgctaaataatacatttaartgataattgactaaatatggtagctgcctatttgttagagctgttggcagcccaagcaatattttcaagtcttttcaaggtaagcttagaggtgagagccaccttattaaaaatagcactgcatttaaaacagtcatgctaaccaactgaattgcttaaaatattagtggactggataaagcacttcaatcggatgcgctttaaacctgtgaaattctaaagggtttgatttcttctctttctaacatatcctaaattctgactgttttaacatgcctttgattgtgggtgggactgcagggaggaaatctaaaggaaggataattattaccacagattttgacaaaagtcagtgctcctttctcattttctttaatacccactgtgcccataagctgattyttggagggcttttcagcccactgagctaaatggagatcattttattttttttccctttaccatactttatctggtgcatttatgggttataagtttctcttcattttttatttacatagagctctctgcttttaaaggacgttttattgcacaaaataagatattgacgggccccttttagaatattgatatctcattcagtccccagagctctaaactgagaggtaagtttagaggtaagagcaggacccatgtgcatgattacaggacaaagaaaatggaacttgttttttaaataacctaagaaaataccaagccctgttttcaattaaaaggaatatttaaagtttactccctgccatgtttgactattagatgtttggagaacaatgagrtacccattttggtggggaggcgtgagttttaaggaaggaagtcgtgggaaaggaaggcaggcaggggaggccatttgaggatggactcttagtgcctggctgagggggttatctctaacttgggagccaggaaaggtaaaatgtacataacatcagatttaccattttaaccattttcagtgtatggttccctggcattaattacactcacaatgttttacaaccatcaccactatccatctccagagccttttttaaaaatcatcccatacagaaactctgtacccgttacacaatcattccccatttccactcccaccagcctctggtaacctctgtactactttctgtcttgatgaatttgcctattctagttacctcatagaagcagaatcagacaatccttgtccttttgcatctggcttatttcacttagcatgatgttttccagccttatccgggctgtagaatgtgtcagaattttattccctttttttaagttaaaaaatatttatccttatgacctggcagtcacatgagaaaaaaaaagaaaaaaaaaattatcctatatatgtccttccaatcacatccatatctatagattgcaatgtcatctttgagtacagtgacaaattctttaaaaagttttagttgtggtaaaaacatgtaataaaatttaccaccgtaaccatttttaggtgtatggttcagtgatggtaacaaaacattgttgtgcagcatatctctagaaagttttcatcttgccaaactgaaagtctrtgtccattgaacaactccccatctttccctcttctgagcccctgmcaaccaccattgtattttgtgtttctatggtgttgacttctttaaatacctcatgtaagtggaatcatacagcatttgtcttttgtgacaaatgctgtatgacaaatttcacttagcataatgtcctcaaggttcatccatcttgtggcatatggcaggacccccccccccccacacacacacrcacttttaaggctgaataatattccactgtatgtatacacaatattttgtttatccattcacttgatgatagacgttagcgttctttccaccctttgacttttgtgagtaatactgctgtgaaatttggtgcttaagtgtctgtctgcgtcctgctttcaattcttcaggtatatacctagaagtggaatttctgggagggttttggagtcagaaaagggacacagaattatgatttagaaagataaactagatgggtttgagtaggtcagatggatccagccagggtcragtaagagagaatcatgtgggacagaggcaggggagattgagttaggagctgttgcagtggtccaggcatctttaagggaaggagggtaatagagcagtgtctctcctgtatcagatcgagagcaatattcctgagggtgattcccaagaaagagcctgatctggaaggggagttcttccaccagatgtacctcttcttgggctcaagagagaagctaccttgcttctatctctcaactttccttcttactcttacccctggcataatcccctcagcctggaaccattgcaaatctcaccataaggaatggtagaattaaggggtgacatgggtggtgtagcttaatatcaccagcctctccttccacaccaaatacaatctatataaaaattggtatgcttggtgtgtaaatacaactcgacaagccacccctaaacccctcctatggacattctggaactgcccraacataggcttttattctcatcacaaccacacctggaaactgctggaaggtgaaatgtcactgtgttgagtcaggacgtttcaatactttcccccaccatggccgctaatgtgctgtgtggccttgtcgtgtcatctacgccagtgtctgccatagtacctttccattaatgcttgttattaytgctgctggatggaggcaagaatgaatgaatkggcaggatcatgataactctggacctcagcttcttcatgtttgcagtkgtacttgggaagagcaaatgtgggaatggatcaaaagtaccatgggatgtagaaagcactctgtagctcagtaacaatcatcrgtwttgatttcacactatctgcaggttcctgtagtctaaaaagcagcctactgacagcatccaccctggtggttaccatttcctggggaaggcaggatataaccaatatattaggggagctacaacaaaaattgttyggagattgacatatgagagccaagaggtaactgaagggaaccaggtgctccytgggaggtggttggtagtggagtrgttgacggttttcaatgggctatggaagggtggcagagccaacagtcccagagaaactctccccagggaatccaggtatctcacggacattttcaacaytagaaacacatcttccaccatcaagttgtttcttcaatcatgtttatcttgggtgaagcaaaaagaaataacaaatggaaaatgtaaaaaaatccctgttttttaagaggaactgacagcacctcaaccttcttttccaacttgagtcatgttgaaacagatataaattactgtcattttagcaaaaaagatttaggagcagtactgataccatctgtaagagatatgggaaggtaagttaagaatgcaacagaagtcccatctgtcgccctttcatgtaggtcattctgactggtttactcaggaataactccagcattcttgtcttaggcccaggaggtaacccaggtacactgtaacagaagtaggtgtgtcttgctttgaggaaacccactatatgaaaaagccaagcttgactggaaagataaattgatgagtcatttttcawtaatcttgatataaaatttgccctttttactttaaaaaagccttctctttgggtagaatccctttaattagctaaaccttttcttttctcccgttgtggattgaaagtatgattgaattggataaaaatgtgggttttctcatattctttcaatgcatccaaattgtgrccccgatctggaaaggctctttttaatatgctgtgttttcatgctggagccttacagtgcacacagaccacacacttctaaaactacaaagtcccgaaaaccatctgaaggaatttgttcaacattgctgattctatttcagtaatatggtggagacatccaagctgcagatttttattaaataaaatcttttcttgtccaacagattattactattatttttttgtccatctgcctgttgtcttggtgttgtttctgagcngtgactctggatgtattgatgttaaagagtgtgttctggatttcttctcctagatcggtcgcttggttrtcggacagaatggaatcctctccacccctgctgtatcctgcatcattagaaaaatcaaagccattggtgggatcattctgacagccagtcacaacccagggggccccaatggagattttggaatcaaattcaatatytctaatggaggtgagtttgctgtcattttgaggacaggtaagtttacattcagtaggacaaatcaatacctggagccttgggagaccagggttttggttctgatcctttgcagggggtagggaggtgctctttgcttcctttcagtgacagtgaaatgcttctcatttgactgtacctgaatatgaagagccatgcgcaaatcttccttaacatgatattttcttttagaaaaatcctgctactytgctgactgaatgatgaaatggtagatgtgctagtgaagaggaactgatgagctttggattctttgtatttccatgtgagctgcacgaagtaacccactgtttgctgtttggtttccaggtcctgctccagaagcaataactgataaaattttccaaatcagcaagacaattgaagaatatgcagtttgccctgacctgaaagtagaccttggtgttctgggaaagcagcagtttgacttggaaaataagttcaaacccttcacaggcatgtttactttcctcctctttctgcccactcctatttccaagttgagcgattttcctttcaacgttttagtagagggtcttcagctttggaaagatttccgtgagtgctctgtaagctttgcaagtgttagttaattaacaagtctggaattaggtttgggagaccagagacctgggctccctgggccctgccagggatcagctgcatgacatcgagtaagtcatttccagcactctaggcctcagttttcatgccttgactagaagacctgcaggattacattcatagttaacttttattgacctcttgctacatgccaaggtctttacacgtgttaatccattttattctcacagtagatctgtcagggcagcactgtcagcattcactattatagatgaggaaacaaaggctgagagagattaagtaacaggctcaaggtcacagtcagtgaatggcaaaacgaagatttcaactcaggtttgaatgattcgcaagactacactttccattttagttttcctcattcagtaaaatcaatcagactattttggggggaccaaattgcaactccctacataggcagctgtggctaacattttgttgttgaattattgtaataattgacagaataaatatttataaaagtattcagattaataaaatgaggatgagatgattggcaatgaacttgcattttgactttgccctaacatgttttctttcttctggattgcaactttatggaatgcattttattagtcatttagttcctggctaaaggatggattgcatttttttgtttgaacctactcagggagagctgacaattgcatcctaacaaagataaagtgacactttggtcatctcgaagacattcttgaggttcagaagattccagtagggagtttcttaaattcttcatattttgaaaatgttcagaacccctgaatatccagcagttttgaaaatgttcagaagccttgaacatccaacaagaacaacaatactaagttcttatatttatataagttttatttttgttttattccttaagcagtacctgtgaaaagtgattcattaaaaaatttcattttccacttagtaccattaagtcttgatgacaatggacttggaaaaagaaaaggaaagaaaagtggggattacattttctactctctataacaccaaaacacacctctcaagatgacgaatggggaagcactgtggtggcatagcagaatttatacaacctctgttgaaaatcccctgtgtgcctcatccaagctgtgtgggcaagtttcttaacccttcacacgtcgagtttcctcatctatcaaataggactaataacatttacctctcaggaaaattgttagtattgggtaaggattggtagtattagatagtatcggatatcacttaacagccgtattattggagctgttcaataattgtccttttaaaatagcaatagcaggtttacagcaatatagtcacatcagaatataatatttctaaatgtgtttaatccttccatcttttgatgttgcttgttctcacagtggaaattgtggattcggtagaagcttatgctacaatgctgagaagcatctttgatttcagtgcactgaaagaactactttctgggccaaaccgactgaagatcygtattgatgctatgcatggaggtatacaatcatttcttttcaattcccatctcttgaggataggaagttgccctcttctgtgtgtatcatgatgcttcaacaagccttttctcaagtctctctgatggtttttaaatagagttattttgcaaccagagcaatattcacacagataaaaatctaattgtatgtagcaaaaatagtagagacactcctcgtggtaagctcgtgtgaaggtcagtgtttccaccttaagcatcaggttctgagtaacatgcaactgctgttgtggactctccctccccctcagaagataccttacattcttgctgcatgcccccatgtatttctgagaggacggtcatttgggagatgtgataaacatactcctgagccccacacccccactcacctgcccccaaatgctcgttttcttagaagagggcaagagcaagctgaggattaaattcaggagcaacatgatgtgtacagccctctcttcttcctccgtgggttgtgtggtcaggtccatagagagggcagctatcactgtgaaccagaaccacgagggttttctcagacatgtaggtatatgagaatccctgaaacctatacacatacatctgcctggtyggagaagcctttctgcctgcaactgaacccttttagtgatgcaattcggggattcctgtgacactgcaaaccacagaaagtcttctgctggtgaactaaaaccttccatccttgaaacttctycccttgggtcctagctggcctctggactcccatagaatggatctacttccttactcagacaaaagcgattctgtcattttaaaccattcaacagatgtgtattgcatacctgcaaaatgcatgcctggggaataggcaggaactgggcagattactttcttcaaagaatgtgcaatgtttggggagacgaagtgggtaaaaaactaaccccggggtygggcgcggtggctcacacctgtaatcccaacactttgagaggccaaggcaggtggatcatggggtcaggagttcaagaccagcctgaccaacatggtgaaaccccatctctataaaagtctctataaaaatacaaaaaattagtcgggtgtggtggcacatgcctgtaatcgcagctactcaggrggctgaggcaggagactagcttgaatccggaaggcggaagttgtagtgagcggagatcacaccactgccccccagcctgggcgacaaagcaagactccgtctcaaaaaaacaaaaaatccctaaaaaactaactcctgccaggccaacaaaatgagagttggaatttcaagtattctctttggggttggaagaaggcataatttgactaggtataaagaaaggtttcctggaagaagtggcatccaactcagttcttatgaaagaaagatctagagtgatgaaaaatcaagcaatggtcattctcatggagtcggtggcygtggcaaaggcatgaaggcttaaaaatggatgtcacattagggaaacgagaggcctgggctggctggataatggggcatgtgaggagggcattgggtaagaggagcttctccggaagaagactacttttctccaggtcttttggctgttcctctaatgctttcgtttctatatccctcacagccctggctgccttgacctcattctgtggtgtgtcagtaacctgcttaataggtgatgcctcataggacacatttattctacagtgttatgacctctggggcatgtactgtattgggattagtaccatccttgatgaaaatactctctcagcatttcagagatgcgtgttcttggtagttatataaaatgtcactgtaaacatatgtaactggcttctcctgttgtttgttkttggtggtgggttttttattttcttttttttttgagacggagtcttgccctgttgcccaggctggagtgcagtggtgcaatctcagctcactgtaacctccgcctccgaagttcaagcgattctcctgcctcagcctcctgagtagctgggattacaggcgcccgccaccaggcctggcaaatctttgtgtatgcatgtgtgtgtctgtgtctctgtgtgtgtgtgtgtgtgtgtgtgtgtgtgtgtgtgtgtgtgtgtgtgtgtatatatatatatatattttttttttttttttttttttttttttaagtagagacagggtctcaccatgttggctgggctggtctcaaactcctgacctcatgtgatctgtctgcctcagcctcccaaagtactgaaattacaggtgtgagccaccgtacctggcctgtttgtgtttttttaatcagtttgtcagctagcttgtcataatataaagataacagctctgaatcccaattcccacttttcctagccatgtaagtttgggcaaatgtctttacctcagaacaccaacattccaatgtatctgtaaactgcaggtgataatcataatataaacatttataacatatctgccaggtactattctcagtacttcatagctattaactcatttaatccttacatcaatcctgttaagtagttagcattactaccctcattttgcagatggaagagactgaggcacagagagtttaaataactttcccaaaattattatacagccaatgactggcagagctgggatttgaacccagacactctgattccagagtccaggctcttaagctctaagctgtacaaccttctgagcttttctgaaggactgaatgggaaagcacaggtataccgcagggcctttataatggttggtttcctttcctttccccactctgcccttcatgaactggccccaccttttccaacataatctctcattgttcctttttagagaacattcttctccagtcaggcgtatctctccactagtccctgaacacatttcacacattcctgttgtttctcatgccattcttctccccagaatgcatccacctcacccctgaatcctcacatactttaaggagttttattttctgattctgcataywtttattccatgctgtatatagttgtgggaccgtatgtaaagaagatcctctgtgaagaactcggtgcccctgcgaactcggcagttaactgcgttcctctggaggactttggaggccaccaccctgaccccaacctcacctatgcagctgacctggtggagaccatgaagtcaggagagcatgattttggggctgcctttgatggagatggggtgggtataagtgcatttaagtgaactctggtgcaggccaggcctgatcctgcagatggggaaaaaagtgggctgcttctgccagacccagggaataactgttaaggatccctcattctgacccgaggtcagaactaaattattagaagcccctcttgaacaggaataggagtcattgaaatgaaacccayacrtttaatttcagacatccatacttgctaacaatggcacgatgattaggttctgattatgatagaatgactggtatttcctgagctgggtgagttctagatgcctgtcttaaggtgggtttctgctctcaaccagcagctggctacttatttaatctctggacaagattttggtcttataatacacccattcattcattcacatgagctgaatattgaagctgtaatttcattgcctatatgaagatgatattgagagaattaacattttaatcattctctaccattaaaatgtttagaaataagctgttttatttacaagggtgactatgtaccagacaaggaagagatgtgtcttaggtttatatccctggtatctcactgatggtaggcactgtatacatttacttagttgaaaatatatttttgttgttgctagtgttaccattagctagaatccactgtttcctgaaaaatgatttttcccttatcaaaatgttgggaaattaaaggggttccagcagacattattctgtagtacatctttgtgatgagtgcattctgggagtgttttttggccaccctcccagttactgtggtacacagactgtggtacacagtttacccagtagacctaccaaactatgtaaacagccaatatttcttctctcattgcattttcccctcccctgggaaaaagatgattggttccagagtctgaaaaaagtctaggaggttaaagttagctggcctctggagggagaacagaggactcagctcaaaaggaggttgtgcttggactttaattgaaaacagttttaactttttggcatggaggtgccttcggcccaatggtactgtataaactcattgaaaataaaacccagtgttaaaaatgcagtatggaaaggagatcaatttcaaattttatagttttacattttataaaacccccatgaaagatagtttgatttcttatagtttgattaaaaggtctttctttgatcctctcttctccccaaggatcgaaacatgattctgggcaagcatgggttctttgtgaacccttcagactctgtggctgtcattgctgccaacatcttcagcattccgtatttccagcagactggggtccgcggctttgcacggagcatgcccacgagtggtgctctggaccggtaggtgtctccattcccttggccttcctgtcttaggtcgtcccagtcttcaccrtacccttcactgtgcctggaacacgtgtccttccctttcagcatgggcatctgatgcatagagtgtgctgagcgattcttgtgtgaggggatggttggctttttctggattcaatgcccctctccgcactcccttggcaccctgggcctcctcctcctggcacttaccacactgtgttctagtagctgttttcttgatgggctgccctgctagactgtatacttctgcagagaaaggactgttttgttcaccatctggactctgcctgaccatagcgtgcctggcacatagtaggacaaacacacacacacacatacacgtataattttttaaagttaatgaatagttgagtgttaatgaataacaatggaagtactcaagacatcattctggaggatcacttttcttttgcagtgtgcacagagtgtgggtgaaagagcagtttgaagtaattttagagtttcaacgactggatcgctcttgcccacacaaacacagtgaatgtttatatatcacttcattgtacaaaggctttgaggtggcttgttagatcacacttaaaaagttgaaaaatgaaagtcataacagatgaggaccagggaaaacattagttagaatatgtcaggtgtgcaggaaatgtttgatgaataaaaggtaaagaatgaatgaatgaataaaaggtcaaggccagggaggaaagtaggctgtaatatatctctaggctcttataataatagctgatatttattgaacattactttgttgtagacactaaatattttgcatgttttaattcatttacttctcagatgaaccccatgaggtaaatgctgtatttaacaccatttttctggtgggaaaaccaaaggacgaagaagtaacttacctgaggtcacccagctggtaaatggctgactcaggatttgaacccagagcctttgctcccactcactgggccatgcagttgttttctgtagaggggagatggttatagaattggtgctgactttgcttcagctaacaagaaaatagccactaatatccatatagtggtttgtagtttgtatagtgtttttttacattcaccatctcaattgatcctcacagcagacctcattttaaggaagaggaaatggaaagtcagggaagttagcagtcttgtccaagatctcaccaccaaattagagctagcatttgagcccagcacgtctaccatcaggtcctgcatttgaaattatgagctggtttgaggtcacactatcatatgttaggcctgtcaggtcctggaataccttctatgtcatccaagaacagtgtaattccaatttttggaaaaattgataatccacatatagaatcacaattgaagtacctcattacccagataaaagtttattgtactttcatagttttcaaaatcatagatttgatttttcctcaaatatcagaatgcaaagctgacattgctttcctggaaataaggcaaacattctgggaagcaaatctcgctcaaacagtgaatggaacttatcaggtaacttttcatgttcaaagggaaaggaatttttttttaagtcactcagaggttttaaatagtttaaagatacctagagagaaataaaagacgtgttagaagggaaggggaaccactaatcagtgtgggtgaagccagtacttaggggagaccccactgggcgtttcccctggggagacttctgatgagacaaaagcagcactgaccagagagctgaatactgggcggtcggtcatcctggctttgtgacctttgtctgatcacataacattctgggccctgtttccttctctgtaaaatgctaactgcccagacccagtatgtcatgattctgtgattacaggtgcatcaaaacatcattcttctcttctttatagattgattatagatgcagtctgtatccaaaatgtggatttaaatagcttaaacagcagccctgaacattttactrcggatgcttcttctaaaatattaaactccatgatctgaattaattctttcttcttccgccttctctgaatccacatataatagcccattgtgcacaaggtttctcttatgattttccaccaatcttagaattatgtatgactctgagcaatgctaaatgggacccttgattacaataacgattgcccttttccgtccctcacrtggcyacgctaacagtcctgctgtgatgtaactttgatttcatgcctttgaagggtggctagtgctacaaagattgctttgtatgagaccccaactggctggaagttttttgggaatttgatggacgcgagcaaactgtccctttgtggggaggagagcttcgggaccggtaagtcacactcctgtgctagcattttcctccctgtaaccactatttccagtaaaagcttagactgctaaggyagcactgaaataccaacggtagccgatgtgtcctaaatcaaggcacaaattatttataacaaccctgatgaaatgtgcacatttgaaaaggggtgagcacattcagccagaaaggctaattttactttcagaggatcatatcgactcagacaggaagttggggggcctcctcagcagcgtggtcattgagtctgcagggattaaacagagcgataaacagatttttcttccttcggtggtcaaagaaacctttataaatgttttcatttctgagaagaaatacggtggagcaagtcggttttttgtttttatttaagaagaggtttcagcacagcattaaatctttctcttttataggcccaagttttctatagcagagtaatcaaggctaaatgaaggaagaccatgagggtggaactaagttgctaggtgatcaagaaattaaaaatacatcgttgtgcctgaggatgtttgtgtaattgtattaatattagagtgaaagaagggtacatagtattctcaggggatgaccccagacctatagacctcactctctgcgctctccttcctcctctctgcttgtccaaatattgacccgaactcccacctccttcacgaccttctctgctacctcatgctgcctgtatcagtctctctttcctaaaagtctgttcaggtgtgtggccctgtcccatgtatcagtctccggccaggttataaggtagttaagtgactgcatctcttctccttttattccctctacccaatatttttaagtaaatrtgctgatcttggtcctatagtactctactgtcaccctttagtgaagaaaagaagatcaaaatcaagcattctctcagctttgcaattgagttgcaattcatgccaggttaaacagaacagaatactgacttcatttcctttcctataagtctggaggtagagcaggtagaatgagctgctaaattggaggcacatatttacagagttctaagcaacttgatattttcgagagtggtaatattccttggcaatgaactgccttgatagaattggaaggtatgaagaaggctggatgagtcttggggttgaacaacttccacaacaaaggctagacagtttcccaaagttgtgggtgtttaaatcagagattacaaggccactgcttagtccttttctacttcatataatgggcatggtgccatgctattctgagggatactacatgartgcccaatgagcctatgaggtggycttctcccatgaaactccccacagggtcatctagttcaggcctggcttcagtcattctttatgaatgaagatgtctttgaaggcagcaactgtgtcaaaacctttgttttcctgttctcctgtaccagtatcagtgttgagcctagtgaaaagataaaagtctagagtcaggtttcccagagcatgtgagtatgtggaagaatactagttccatgagagggttctaggggtcaagaaaaattggaaaaattggaccacacttctctgttttggatattcacaatgatattagcatttgaagattccagaacattctgccataaagaatcctgttagtacagttttgcctaaatatagtttaccactayatataataattatgatgatatgatacaatatcatcaccacaataatgattattattattatcatttcgtagtatgtacagtaacttctttttccacagacccatgtgggaagccttggtcaagagggatcagagccccagagccaagtaggaatccctggtgctgacccacagggaacaggcctgaagacaggatagcacaagctgctcctcttacacaacaggccttcaaatacaagaagcagctctcaggtccttccttcttcaggccgtccatctttgtttcctccagtcattcctcatttcacattgtttatagactcagtgccagactctaggtgcttctgagtttgccagtgccactcttagaaggtgatgcccagaactgagcccaaatcttccagggttggcctggcaagtgaagagtggggtgggatgattatttctagtgattaggacactgtatttttcttgacataactttcctttatgttagtttttaggaagttgcataatactgtttagcccacataaggttgtgggtaattaaacccttaaagtttttacctagaactatttgccaagggaagtctctcatgttatgtttgtggaattgatttctttgaaccaaagtattagactttagactaytgttaaagtttgttctcatttattaacacattcaacaaatacctagtaccaatcatggttttagcttctccttggtatatttcatgtccaaagagagaatgctcttcattatcatgaggataatcacaagctctttctctctctctctcttcaaaaaaagaaaatttttgtgtaatatttctgagataaacatttaaacagccaggctgcrtagccatagatcgctgttgtgaacgagtgcagctgggcttatttaactgaactcctgatcttcttatttatagaggagttaatttttagcaaccacgccccttgctagtgaatgtttccaacagttctttcatagagtttctcagggtagacattagtgactctatgaactttgaaacatttgaattctatagcttaattgagcacagagtgctttatttctgtatttttccaggcgataggagagacaatttctyaaaaacgtttccttgacctttcagagtgggccaaatcccctgattattggctcttgtggcaccatgtacctcttctttgttgtacttgttgcagctgtgattttacaattacttatggttatttgattaatgtctgttggctgtatatgccatgaggacagagatcttatgtgtcttatcctgcattgtgtccctcgagcctcccgyagagcccagcatagaacaggtgctcagtaaacgcttgttgaatgagttcatgaacactattcacttggcaccttccatttagacagattcctgctattggaaaagaaagaactttaaaaggtatctgatgtaaattcytgtatgatgctggaaccatagtgactggtcactgctttctggctgaaccacccacctcaatggagaatccacacctcacctcttgccgtagtctgggacccttgtaatgactcaacaccacttccactccacagtccagggttgggaaccccagggtctttgcgggaagaaatgcacttttacaaaagaaaagaagtttgcttgcaaagaggtgcaaaggagtctaacttcaggactggtccaccgagtaaaacaaaccactarcatctgcagaacaatcttggaatattactaacattatacattagtctgtttgtatacattatacattagtctgtttgtgctggaggagcagcagctttctcacctggatatggtaaccacagaagctaggtcacttacttcttcagaggtcagcattacaaacaccagggataaatggggaccagaactggacaggataagcctgttgttgtttgttgatctcatggtacaaagctgttttttcttcctaaccgtggatgattatgtacatgtttatacacaatggtagagggcagactgtcagttccatcccaccttagaattgttgggactttgaaagtgaagtcactgaatagtatacaataccatgcatttgaacccttcctcaggaaaatagggggcttgggaaagagcgatgggaaaccaggttgatgatgaacttggtatcacttagagatatgtaagttatgatctggtcaggtctagaggctagcaatattttttccctgtcctrtctttaaaggttctagtgctaatgtatcatacaggagtgataacttaaagaaatacagcattaacactttgcaaatttcttttaatttttagtttcwtatgaaaagtccttcatgtttgcacattttgcattgattcattcctcaaatatttattgaactttgattttatcctggatactgagttagactctgggacacatggtgaacaaggccttctcatagagggctccatgaattacaggtgtgcaaagcaatagaaggtgaagtacagggrtacttcgggagctttattctcagggtgcctaacttggttctgtggtgtaggagatcagattttctttctggctttctgcccattctaayttgcatagctactgagtacatttccctgtaggcaaagcccacaggggaagattgtagcaccccatgtctggggatagcctagacagaatacgccagtagaactaggcttataccctaattataactcactcatttaaagtgttacctgcctgtctgtctccctcacctgtatgtctgtgctcatctgtgagggcaggggatacgccttgtgcatcttggtatcttcttatgtgcttggtacatgctggcactgattcacatttgttgagtgtaaagtgaagtttgtgttaggacagagttcctgcttatcaggcacttaaactaccttcttccaaaggcaccttatggaaaggaaaccaagttccaggggcagtaatgaggcaggtcaggcctcattgctaagtggaaggcctgacagttcctggggccagcctcctggggactggagtggtctggagaaggctttctgaggagctcaccttcctttccaagygaagttgtttgtgcagtggaagaccaagaggacaggactgcagacacagcaggtcagctgagcctcccagccagtcaactggggcccggccattstttgggcagactgtcttaacaactgactttgggccaacccctgtttggggagtacaactcatagtctaggatacggcgtgatcacagggagtggtagaagcacagagggcatggggagggcatcctggataagactgaagttgaaagtaattgcaggacatgttagccaggctagtaggtgtatgtggaatgggctttccaggcagtgagaactgtatgttcagggggctggaggagagagagaaattgacagaaaaagaaagagacagacagacactggtactttcagggaactccatgcagctgtttttcagctgtcatgcccccatcctcaggcctgtcacctggcaggggcagaagccaggacagctcctgagatgcccatactggtaaatgtaacccaatccctaaactgttagctcttggctccctcaggaatggttgacatttttcttggctgagacccaggatgtgccctggctgagccgagtatgtgcttatcacaaggtgctgattaggccgaagtaaagtgacaggtgtttgaagatgctgaaagggtagaattcctgtccctgagcggagcaagggtgaagagacccagtgcaaaacccaccactgtcttttgtgccagctgggactagaagtccttgcccagagtgttttacctttctcacagttaaatgagcttggcttcattctctttctaaaattaaaacataatgaaacaagtaatttatgttcattatgagaaataaggaaggaggaaaaaaacactaatcccagtgcccagaggaaagagcatattaggttatattcttccattttcttctccaatatgtacaatcaaggagcattatttttaaaagcataataaagtcagtggaaaatgtaataattttccataaaagccttttatttttccctttattcgaaacagtatctagtagttacattacacctcacaatgtataaactatttctacttgctttttcgtagtaatttctcacagttatgagagagaagttagcattatttctgttttgcagttgaagaaactgaggctcagaaaatgtgatttgtccaaattcaagtagtttacaagtaacagagcctcaaattcaggtttatctgattcttaagtatcaagctttatctgctgagccacagaaaatgtgatttgtccaaattcaagtagtttacaagtaacagagcctcaaattcaggtttatctgattcttaagtatcaagctttatctactgagccacaactgcaaaaagaatagctttagaaacacgtacctgcaccattggtattttccactggaaacttggcatcattcatcagaaccctgaagaaaatgaaatttgctccaacttcctgagtattaattgaattacctggaatttttgatacatccaaggtgattagtgatgaaccagaatatccaaagaggctgaggattatgcaattggaattggatatttgtttatgttacccagggcaggtattttgtttatagtattaggtgtatgatttagttatctccaagtaacttggccagagttgggtaagatttttagattttattttcatttccacataaaagaaaaaatcaaattccttgcttagggcaggaaaagccacaaggaacactgccttctatgctttcagtctagccaaaagagaaaaaagaaaaaaaaattaaggagaaaaagaaggaagaaaaaaacccagtggggcacagacaaataattccaagctgtatatgctgtcatgaattcccaatatattagggaagctgccagaatcttgcttctcaggatgaactgttgccaaaacatatcatttgcaaaagccgtaagagccagagagctttttgctccttaaaatagcagtaagggcaaataaaagtctaaagatagtaaaattaggtaaacatttttaaaatatgttatataaagcactaaaaatattgcctactctctagttttgcctgcatccgggttttgaggactgttaacttctaaaagtagtatcctattgaagagaaaagtcttttgaaagaaaaagtcatgtttttttaagaaccaaaaatagaaagagaaagtgttggagtaaattgattggttgattcattcacacagtctttcataattagttatttaccgtattccttgtgctatgctrgtcaccagacttaattacaaggataaataagagatgcccgtaagaagcacacagttagtggggagaaaggctcacaaacagatggttgagactcgaggaggctgatgccaccccagatgttttgtgcaggttgctacaggagaagaaagagaagggagttcatgactgcctagggaagttgggagctagtcttaaaaaagagaggacatttgagctgggtctgaaaagatgaagagaggaaggaaaaacaccacgtgcctcctgcatacccagcatggtgctagatactctaacaattccaagaagaataagaccagygggaagtgcagtagggcaggcacataaagaattcaacataggataatgtgagagcatgattatagagcaattgtgtacagttctattcagaaatcagaaaataaggctccatgtagactgctttctttcagaataaagagtttaaaggcaaaaaaatgagagttgtgttccatatcaggctcttggaaaagggtgtccatgcatataagcacatcctcccgagaagcccattttaaaattttgttaaagattttagcaaggaccttagcaggagacagatgtctcctttaagagacatcattaaggtttgtttaaccaaaccttaatggttaaagaacagtgtcttggagttgctggatccatgagtaggtccaatttgaaggstttgatccttttttgccaaattgatgtccagaaggattgtgccagcgtccactcccaccagctctttggtggaatcccgtttcccttttattctcctggcactggctgttcggatttttacacttgtggatttttacaccttttgtcaagcaagtagcagtttctcattgtggttttaactttaatttttcttcttaaaaataacaccagctttttattatactaattggttgggtgtatgtgtctatgtgtattgtttggcaaatcgcctattgatatccttggcctgtttttctattgaaattcttttttcttattcatacataagaattttttctatattgaatgtattaaacatctgccttaaaatatatcaaatgtggccgggcatggtggctcacgcctgtaatcctagcactttgggaggccgaggcggatggatcacctgaggtcaggagttcgagaccagcctggccaacatggcgaaaccctgtctctactaaaactacaaaaattagctgagcatggtggcgggcacctataatcccagctactcgggaggctgagacaggagaatcgcttgagcctggggggcagaggttgcagtgagccaagatcatgccactttactccagcctgggcgaaagagcgaaactccgtctcaaaaaataaaattttacatatatatatatagtatataaatatatatatatatagatatatatccacttttaaacaaccagatctctttaattttttaaagtttgtcaatgggcttttaattttgtccatagtagttttacactatagaaatgctgatttttaagtagataaatacatcagtgttttcttttatgaataccgaatttacattatttatcacccctaagatttatatatataaatatataaaaagacatgtatattaatataatatatactagtatttaaaagctttcaggttttacattcgaatttttagttcaactggaattatttttgttatggtgttttatagggaagaaaacaattttttaaagctatttatccagttatccaaacgccatttaaaaagtaatctactcttttcccacagccttgcagtgagacctttgtcatactcaagcctcwtgtgtgcttggatctctttccagatgcactcttgttctattaagctaccagactatttgaattattgaaattttgtaatggtcatgttcttctgctgtttgttcatttaagatctattgtgttttctcttcacattaatactttataactgatatatcaaattccacctaattatctcactgacatttttattgacttatgccttacatttctaaatcactttgggaagcatcaatttcttttcagtatcatgttgcctacttaatatgtgattcctcctgtatacccaagtcctcagtcaggcagtgtgactcttttatttgggtctgcacacctactgttgagtactgtattagtctgttctcacactgctataaagaactacctgagactgggtaatttatgaagaaaagaggtttaattgactcacagttctgcaggctgtacaggaaccatggctgggaggcctcaggaaaygtacaatcatggcagaacaatgaagaggcagccggcaccttcttcacatggctgcaggagagagagwgtgaagggggaagtgctatatacttttaaacaaccagatctcatgagaactcacttactatcaccagaacagcaagggggaactttgtcccccatgatccaatcacttcccatcacgtccctccctcaacatgagatttgggtggggatgcagagccaaaccatatcaagtaccttctcaggtactgggagaaagcacgtttcttacagcagcttgctgtcccccctccaggttctgaccacatccgtgagaaagatggactgtgggctgtccttgcctggctctccatcctagccacccgcaagcagagtgtggaggacattctcaaagatcattggcaaaagyatggccggaatttcttcaccaggtgagcyacagcccagctggggtacaaggtaaggtggggaagtgggcagagagaattcttgcgcatccacagcctctcctgtcttaagtgctaataaaaccctagktcatccagcctctctcaattggagactttaaaaataatctggtcagggatgaaatgaagtcaatttttatgtcagccataaagagtgaggctttaaaagtttagctaacataatcaaaagaataaatgctttataagcattttaaatgtgtccattgggtggacatgatcataacattggatttggattcagagaaatggattagaattttatttcttccccttactagaytggggagccatttagcttttctctgtactcagttttgtcatctgtagaaatgggaataacagtccagctgttgagaggattaaatgaataatgagtctgaaaatgttttgttaactttggggcactgaaagcctagaaactttttttcataaattatagaaacagttatgcttagtccacatcgacttttctgccttgtgaaataggtccccaagggctatatacttgtcaataatttttttaatttattcaacagatatttactgtatacccgatttccatcgggtacttggaattcagcagtgaacaaaatacttagaatacttagtaattattccttatcatgcgtacttctatttttaaaaagcattaaaaaatttttgacagtagtacttttcactaattccaatttgcctttcccccagttagtgtaaaaatctaacaagaatttttctggacctcagtattccaattatagagagaaaatatggtaaaaaggatattagatgaattgtttatgtataagaaatgaataggtgtaatttctctggacctcagttgcctgttctataaaatgggtgagttagactagagaatttaaaaaatatatcccagattttatagtccgtgatctctggatagtcaagaaagaattcaactaagtaaattaagctccttaatcagaattattttattaactttggacggattcattgatctctttctctctcacgttactgttttgtggaaggaataagtaataactacctgacaccacacagtagccctgggaaccaaggcaaaaaaatccctactttataacagacagaaaaacctggtcattcagaacagcagtcatgaactgtctagaacctagagtatcataaaaacaaggccatgtctgtttttgtgccctaagcacccaactcatagtagagactgcataaatacgttttgaaccgataaatgaatgagttaacaggtgaacaatagccagagtagaataaggttaggaggggttgttcagagaaagggtcacacccttgaattagtcacaatcctccatataaaaactattttaacatgattttattaattatcaaatataattgctaaccaagtattacaaatcaaatccttagtacctgcatttatgattagttaaaactccattataccttccacttactgaacaaaagcgctaggcacttttgcatgcattgtctcactttagcctcaaaacagttattgataaggtagctgagattctgagagatagggcagctggccctgtagtcacacaattaatagccaatagaggctggattcatagctcatctgtctgattgcaaaacccagactcttctattccacccctctgtgcctagggtttagaaaacatttctctggagtacccagaggtcaaaaatgtaaagcacaaacacctggttgtaatttcttgttgtttatcatgttaactaggggaaagagctgactttaagattaaggggactgtttggcccttgattcatagaatcctggagccagaataggctggccttaattcctcagcatttctcatgtctcagaggtgtcatcttgcatatatgatatctatttcacgattacaaataaatatagactctgctatcttgagcttctaaaaaataactctctcaagagggtgtatgccactaggtcaagaaaagccacctgtacaagtctttaacatcataagaaagaagtcaaaaagaattcttgaaggaaaactcatctttatagaatttcatttgtgatgcacttttttccttggccctttttcatccgcactgggcctcttctgtcagggtgaacccaaaggaccttggaccaaaatccactgccactgaaaggagggaggcagaacttaaaataaaacaaaatttaaaaaaaaaaattgggagagcatcaggataaacagctaatgcatttggggcttaattcctaggtgatgggttgataggtgcggcaaatcaccatggcacatttacctatataacaaacctgcacgttctgcacatgtatcttgaaacttactaaaattaatgaaaaaaaaaaaggcattttagatgtaaagagtcagtgtttggcgtcttcatctggtcggtgaaaacttggccctgctttaggaagctcctgtggagctggaactctgcttagtcaaaatctcagcagcctcaggcaggtctcaggctgggagcaggcccagcattcaccccagagaagcccagggagcttggaggagaagtgcctgagtcacgtgctcctttcaagagagttctccagagataacattgcttttcattttacctcctcaggatgtggtgactaaatgttagatagcatctttcaaaagcctttgaaacatcttagagctttattctgtagaaatgccaagatgggtgttttctgcttattcagaagctcataacccttccctgaaatcctccaaacccttcctttcatccctggcctgttccatccccagtgactgacaggcctgtattttttttgccagcttcttctgaagttagatagttttgcgggagggccaaacaaatgatgaagaaagtgctgactgataggccttggtgtgatctgcagtcagcccgtgggcctcaacttcgtgacttcttccaggtatgattacgaggaggtggaagctgagggcgcaaacaaaatgatgaaggacttggaggccctgatgtttgatcgctcctttgtggggaagcagttctcagcaaatgacaaagtttacactgtggagaaggccgataactttgaatacagcgacccagtggatggaagcatttcaagaaatcaggtagaaacagaccngtgtgtaagtgagagagagacctcagagcttcatctctgacatctcaagggaaaaattaaaaagttcctgttggctatttttcttttgctgctgtgtttttctagggtagctgttcttacctggttttctgctgtcccacgtgactctcacatgcactcgttgggacagtggtttatgcccttgttctgtgcactgtccagtaccctcattctgggattcttaacctggactccagagggatttttgcactctctggaatgatatgcaagatgatgtgtccattgtacatgcagaaaggagccccagaatctaagaaagagggagaactgtgggaacttagatgtcaactcctctcttttctgtcagcagattatrgcagagtgacagcatgtaagtggcattatacttatacgtttctctcgtatgttctaatttctaaaggagagaaaaatagatgaggcattcccagacttagaaacgttgaccatcgtcattcgcagcacatgagtggcaccccacctaacacagcagtacctggcaagacgccacagtttaggacctggagcatctctagatgtggacagaattgttagtgcttcccttactgtgtgccgggtaccctaggctgcaggctgggtcaggctttctcctggcttctcatgaacacttacgcmccagggttctctcacctctgcttctgttgcctgttgkcacagagtaaactcatctctcacaattcataatagaataaagagcaggatgaagattctgttacaacctcccagtttacttttttccaattgacccagatttttggcctggtccttgtcaaggcatctcatagggtttggaagggccgggccgtgggatttactggaggcttccctctggggagcaggcagtgaatggatggatgggccacagcaaccctcagtgcctggagtctcccctcctcaacttctagcacaagtggtttctcatccttgtgcctgtttgccatttgtgagaacttggggtccagtttggatgattgtaaattatgcctgagataattagaagagagacctgtggttgaggaagaaaggggtgtagaaaaggagtggagctgagggatggcagagtgggacagaagtttgtgtcattaagccttcagagacagaagggaagtcaaggaaaagtaaatcccagctctgcagtgcctctggcatctgccaggagggagaagaggtgtaaaggtgtgtataggagacagtggcctaagcycgagagctgccctctgtgctgtaaagaaagcagctgccccactttctgtaatcagaaaatccaagcattttgatgtgagaccagataggagggaaaaatatgatccaacatatrtagatagaacatctgcaatctagtgaaaagaattttagaggcttcaagttgaagctgtgargaaaggagaccaaccctggtgtgttcctagaaagcaagaaatggtcagtgaaaatggaccgtatccttcccatagtgactaactgtggcatatcctctgtgtatttcatctactgtcttcactaatcagtgctaatgaatggcaccattaaacaccagatggggattggtgacgaacagcaggtgaagagcagcatctttttggtcagtctttggtgttatgcaaggttctcctttttacagaggatggatagactcataaagactgaagagtcctcaggcaacttctgtcccagccttcttccctcaggttgggaaatatctaccccagagttcccacacatttttccccaagtgagaagataattgaygtccagagataccgctggggaggaaaaagagagggcagcagagagaaggatgggcttggcacttcacacggacctcgctttgggtccatcagggattggcaggagattggccactggctcctgcttgttaggttgggaatagccagtctctgccatttgggacctctgacttcctgttctcttttgaggacctttgctagtggtttgtaagagtccttcccctcatctgcctgaaacctcttcagctctggtttcagcccctttggtccatgtttccctcttgatctgggggctgaatttttgcatctagcagctttatgtgcttcattattaagcttcaaactggaatggttagtccataaatcacagggaagtggggagaggagggaagccctcacatcacccagcatcactgaggtcaggtctcccctgaccctggaaatgcttctcccaccgtagctaagcccccatcagctggatgcagagagggtgacggaaggcaggctcacaaggtgcagctgctgccatttatcaaggatttaaccctccartgawcaagtatggatgaaattacatccccaaatagacccctcataatttgccagccttcagtctcccagcatttggggaaaaaaatctctgcttatcttttccagggcttgcgcctcattttcacagatggttctcgaatyrtcttccgactgagcggcactgggagtgccggggccaccattcggctgtacatcgatagctatgagaaggacgttgccaagattaaccaggacccccaggtaacgccyagccctgtgccctggttagttctttctgttcaagggaatgatagtttcccattgagcctgtgtttcaatgcccatttctcaaatgactcaacaaggtaccagctgtgcttactttcttccatgtttctttctccatgtcaacattatagataataattataataataaaaatagggaggctgaggtgggaggatcacctgagcccaggaggtcaagcctgcagtgagccaagatcacaccactgcacttcagcctgagcaagagtgagaccttatatcaaaaattaattaattaattaattaaaaataaaaaattttctgagcatttatggtttgccaggctgtgttgtaagcccattatgaaaatatactcatttaattctcaaataacttagactgttattctccctgctacagataaggaaactgaggcacagaaaagttaagcaacagttaataggtttacatgcctagtaaggataatgaatctctctttttttttttttttttttgagacagggtctcactctgttgcccaggctggagtgcaatggcacaatctcagctcactgcaacatccaccttctgggctcaagcaatcctcctacctcagctacctgagtagctcggattacaggcacgtgccaccatgctctgctcatttccttttttttttttttctttttgtagggaggaggtcttagtacattgcctaggctggtcttgaattcctagcctcaagtaatcctcctacctcagcctcccaaagtgctgggattatatgtgtgagccactgcacccaacccaggataattggtctttaaatcagcccctcatctggtgttctgctctgtctgcagcattttgttgctttgtttggtctgatcacctgcttgggcagaacacaccactgggtcttagatttggtgggggcagggagaggcagtttcatgtgtcttcacagaacagtctgcagacctgcagcttggtaagctgggttcctcagccattcccccaaaagtcttcagaagtatatcagagtaaggagggactctgggagcaaagggtgggacagtgaacttgaaggacaacccccaaaaatggaggagccaaggggaagcagtgaaggacaggacagtttctttaagtgtttttcacaatccttatctcaaccagagctccatagcttaaaaaaaagttggggaagtgttgtggtatattagccccttcttggtgattcacagcatacaatgcaatgcaccataaaggctccaagatttcggacatggtggcctrcacctgtggtcccagctactcaggaagctgaggcaggaagatcacttgagcgtaggagttctgggctatagtgtgctatgcctgtcgggtgtctgcactaagtttggcatcaatatggtacctcccgagaggggaaccaccaggttgcataaggaggggtgaaccggcccaagttggaaacagagcaggtcaaaactcccatgccgatgagtagtgggattgcacctgtgaatacccactgcrcttcagcctggtgacatagcaagaccccatctctaaaaaaagaaaaggaaagaaaaaaagagggtgctgagaagacttgcagtaaaggtgcctgtttacatagcatttgctgaaggacatttctccaaagaaaacatacaaatggccaacaggcgtatgaaaaggtggtccacatcactaatcatcagggaartgaaaatcaaaaccacaatgagctgtcacctcacacctgttaggatggctgttctcaaaaagacaaaagataacaagtrttgggaaggatgtggagaaaagggaaccatcagacactattggtgggaatataaattggtatagctattttggaataaccaaaatatggaggttcctcaaaaagttaaaaatattttagtactaatatacgatccagtaatccctcttctgggtatatattcagaggaactgaaataaatatgtcaaagagatatctgttctctcttgttcattcaatattattcacaatagtcaagatatggaaccagcctaagtgcccatctacagatgaatgaagacattgtggtgtgtgtgtgtgtgtgtgtgtgtgkgtgtgtgtgtataccacaatggaaaattattctgccttaaaacaacaaaaaccaaaatcttgccaatcttgccatttgcaataacatggatgaacctggaggacattatgctaagtgaaataagccagacacagaaaggcaaatactgcatgatttcacttgtatgtgggatctaaaaaaagtgaatctcatagaaacagagcagaaaggggcttactagggggtagtgaatggggraaatggagagatattggtccaaagggtacaaaatttcagttatgtaggatgtagcagttctagagatggaatgtacaacatgatggctataatgaataacacttgaaatgtactaggagaatagatcttaattgttctcactatcaccaccacaacaaaaaaggtaagtaggtgacaagattgataatgttagttggcttgactctagtaatcagttcactatgtatttgtatatcaagacatcatattatataccttaaacataaacaatttttattaaaaaattgaaagtaaaataaaataaatagcatttgccatgcttatttttccacaaaggcttttttcttttaacacctaattaaaatcctgtgaaactcatttggaaacccctggcatagtggttttgagcaaagttaaagagatcttgttttaaattctwttcctgccacttaataactgtgtgtccctgggtaagttgttacaattttatgaatcttggtttccttgtctgtcaaatggcagagtaatacctacttcatctagttgttaccggggtttaaggagataataaatgtaaaatgtttaaacactgtggctggcatataggattaacttttcagaataagcagcactcttagtttttttagtctaaytttaagtgtaacataatgctattataaccatttttaagtatatagtttagtaatgttgtacrtattcatattgttgtccaacgtatctctaaaacttttttcccccaaaactaaaactctrtacccattgaacagcacctccctgcttctcccttttcacaatccctggtaccacctttctccttcctgtgtctgtgaatttgaccattgtaggtacctcacatgagtagtatagttgcttttattacagaaagtgggagatgagagaatgcttcacttttacattttttccagtggccaggccccagtttcagtcatcaccagtaccttgttgtgttgtaggcatccctaaaacttcaaccaaaggcaatggggtctgcattatagacacttaatagcacaagagaaaaggaagaaggaaattgtgtttgtcttttgatcatcaagataaatgcctggcacgtggtagattcaaagagtgaatgaaatttgtttcctctgaaccatagtcctcagcaggtggaatggcagtggatggtgtgaggttcccacaatgcccaggtgtatcaccatctagccggggagctgcctttccttattctgcagctgctaggccatcagcactttgtggggactgcccaagccctaaggggaaatgtggtagtttcagcaggtggagttgattctccttttccaggtataatggatcrgtggagatttagataagaaaaagtagcaktcagcagtagaaaatgtactactcctggctctgctattgagtcatttagtcaaatcacttcatctctttgggtatcagttttctcatctgtaaaatgggcagttmaaccagattagtagttttttttttttttttaatattgaaagcayttattaagcaacagaattctctcttttttttttttttctttaagcgagaagtagatgtggggaggggttgttgcatttttaaagattcctgtattaggccgggtgcggtggctcacgcctgtaatcccaacactttgggaggccaaggcaggcagatcacctgaggtcgggagttcaagaccagcctgaccaacatggagaaaccccatctctactaaaaatacaaaattagccgggcgtgrtggcgcatgcctgtaatcccagtcactagagaggctgaggcaggagaattgcttgaacctgggagccagagattgtggtgagccaagatcgcagcattgcactccagcctgggcaacaagagtgaaactccatctcaaaaaaaaaaaaaaagattcctgtattagtctgttttcacactgctgataaagacatacctgagactgggcaatttacaaaagaaagaggtttaattggacttacacttcacgtggctggggaagcctcacaatcatggtggaaggcaagaaagagcaagtcatgtcttacatgaatggcagcaggcaaaagagagaaattgtgcagggaaactcctgtttttaaaaccattagatctcatgagacccattcactatcatgagaacagcacagaaaagacccacccccatgattcaatcatctcccaccgggtccctcccacaacayttgggaattatgggagctacaagatgagatttgagtggggacacagagccaaaccacatcagtcccattgggwacagtrtgggaaagaaattggaagatgcacaagtggatgtggaggcactcactgctccaggtaagagacaggacattgacttagcaagacttaacagcaggagagwggagagaaaagggggccatggagagagatttagcggggaaaagtcattkaggcctgctcatggactgggcatggggaaaatgcagaggaagatgtcaggagcaactcctagttgttcactttacatgaaagactgtagtgtygatccactgaaatagaaactgctggaactaggtattgggggaaataacatgtgtttgtttttggatttgtggagtktgaggagccttggagacctggaagtaggcagtcagacgtacgggtttggagctaagcatctgtgtttagaggaagtgatggaaaakcttctctctatgtcttcctcaggtcatgttggccccccttatttccattgctctgaaagtgtcccagctgcaggagaggacgggacgcactgcacccactgtcatcacctaagaagacaggcctgatgtggtaygtccctccacccccrgacycatccaagtcatctgattgaagagcatgacagaaacaaaatgtattcaccamgcattttaggatttgactttttcactaaccagttgaygagcagtgcatttacaaggcactgccaaacaagatgcccttgggagctgtgagggaaagaggacctgygggcttagatcaatctcaattccttttcatgccctcctgcattgctgctgcgtgggtatttgtctccttagccatcaggtacagtttacactacaatgtaagctataggtggagcatcagcagtgagtgaggccattcttcatccttaggatgtggcaatgaaatgatggtgcaagttcctttctcttttgtgaawctttccccccatttcctgtttacatgtaacccaacaaaatgcaatttctagtgccttctgtmcaaycagttctttcctctgagtgagacgtacttggctacagatttctgccttgttttgcgacattgtcccattcacacagatattttgggataataaaggaaaataagctacaattgcttgtcgtctttttttcttaactgcaaagtacttttttgattttagaaagaaaaacaattttttttttagaaggaggggagtattgtattttgttttcatgtcctagtcagaaaatgaaatggtctctaggctaggttgcaaatccttagactcaagaactrtaattttttttattgtcctgaatattctaaaaagtaacataaattttaagagaattgtaatttaaaatcttagcagggtcaactgagctctggattcttccaaggtagacaaatcaagcttgacatggttaacttggaacaagggaaaggaagagtgattttcctcttcctagtgcttaaatagcaaagcactggtacgtgctctgcagtgcggagatgccttgacgcttattgaagggatggaggcagaaccctcagaatctgagagcagggttactgacatttggccaaaaatctgagcccactggcatcttattcagctcagaacacttatattccatccatgagtatattatagttaaataagcgtagacttgagagccaacagacccaagtttgaatcccacttgagaccctgagtgacttttgaatatcattaccctatccttaaagtggggatgaaagtagttctacctttatgaattgttgagtaccttaagtgagtacatttgtgtaaagcagtgagcacagtatctagtgcatggtacattgttaaataagtgaaaactagaattatgtttatgataccatttttagattttaaagtactgtatatacaggaaaaacaaaaactgtaacactaatatttgtaacacattttacatttccaaggtactttcacaaagtcaccttgccatatgggctattctaaaaagtcagcccagctctgtacccctcccctactcagtatggactccctgatacaggtggcaggatctttatctggggtaagatttccattgttgccagctcagcaaacaaaactatgctttgacaatgatgacaatgatggtggtggtggtgatgagtttgtctggaacgttaaccccttgccaggcactttccatatattctttctgagcgctttccatatattctttaaatcttcctgacaactctgaggtaggtactctgaatattcccattttacagatgaggttcagttactcaaccaagatcacactgctggggagtggtagatgctcccagacagtgcagctccagccctacagggttcaaaccacttcagatttcttctacggactgtctacttctaggctacacctaacgtggaagaaaggtgtgcaaatgcccctgtgctttacgcattaaagggggatactgtgtgctctggatgccaaagaatctgttattttggcattatattagctcctgcagagatctggatatctggatgtatcagtcagcccggaaatatgtattgatccacattaagtgtgaggtgcttgggaggaagagctgtataacacagagcccatgccatcaagctgcctgtaagacttgccaggggaatcgaatctagcacaagtagaaactgtatgggataaatgttatgagttgtgtaggtaaaacctacatattctccaagcacctattctatctcagatgttgggctagatgctttccagtaaccctcgaagcaagacatcattcttctcgctttccagttgaggcaactgaagctcaacagaagctcattaatttgccccaggttctcagctaccgtgtgatggaactggaattctgaccctaagtatcgttcatgtttcctgacccttttctgcctcctcatctcttgaatcagctgcggatactcccagttctgtggcccctggaatggcttcaaaaatttcctcctccctgatcgtatttcaactgcttttcctgcctccacttggcaacagcttggaagttaaaagctcaggggaggaagaaggaggtggctggagccatggggcagtggaggtgggtgtgggtagtaaggatcactgtgtctctccagggcttccaaagagatgccgcagtgtgtgtgccccagggagtgcgggagaggagtcctgagaggcgggcagcagcacccagccaggcttccccgccttccagcgttgatgtggtctgtgagtcaggcttgttttctttggggtgtggtgagaattacagtgagaaaattgggttggaactgtttggggcccaattctgaaatttcactttttctctccctcttgacattcagctattctctcagagaagcagtttcctgttcagcgatgtgccccaggcctacacagtggccaggcttccagtggctgggctctgcctcatagggagtgaaagcagaggccaagctcactgtggttctggggagtgtcatctccttggcccttcaaggccaggcttgaggacagggtccctctgcctcctctgccatgctgctttcttcaacgtttcttgttgactcattagaagctggccttgcttataagaattctccagaaaacatattaccatgagtaagaggtgccccccttgtgtttctgcgttctgaacccccccagcagagggggttggatatgagtataacagccttcatgcaggactcactgcatggcctgtgggctttggcgggggcaccccatggccttctggccttcccacttgccccttctgatccattctccacaccaccagctaagtactctttcaaatgttgaagtgcagaggcctttgtgtagcctccaggtccgtgtgactcacctgcctgtcacttcccgctcctctccccctactcacagccttacattccaagcttcagtcgtggggaaccatggcacctccctcctgcccccaggccttggaagctgctcttctttccacctgaatcacctttaccctccatcccaccctccactacattctccacctttcccctccattccaccatccgccatattctcccaactcctacttgttcctcaggtctcaatttaaacatcgtttcctccaagaagtgctttctgagcctccagtgtctggtttgggagctttttctggtgttcctatcacctctatttcccccttcgaggcgcttatcccattctatgttcataacctgtttactttccatttcttctactgccctgggaactcctacatggcagagactgcctttttcaccagtgtttacccaggatctaggcctgtgtctggcacatagcaaaagccccattaaatattttcagaatgagtgaatgaaatctactagttgcacggcagaatgtttcattatgctggaatctccctgacctataaggcaggattgtctcaattttacaggtgacaagtgatttgagcaacttccatgctagtcactggttaaccaagaactctttcaaaaagtgttagaggctgcaagtgagaaagcacccaggagaggcgggcaggagggtactkgcaatagatgggagttatgtgtcatggtcactttgaagaaaatgtttaatttaaatgataaaacacattttatctcccactgctacaaaattaattgggaggtatagttggggaagagttctactgaatacagaaatgagtgctttaaggaacagaatcaataaaaccagcctcaatccccaaagcccccctctgagcagattcacggaaaggaacccatgatgggtaaagtgggtaccctggcactgggcgtcatgctggcatggggatcctcctctgagcatctatttctggaagtctgagaggctcttctcagttcccattatcagaacaagaagcattcccacaagtgtgtcattatccaaaacaagtgaggtcactggcgggagcatgtctcatgtctgtctgatcgtcctatggaaaccgtggagggctttggtttggttttcaccaaatatgaaagctccacctccatccagtaagttgtcattgtgggtgtgggttaataactattttccagaaagcatgtcttattgagtgcagctctccaattaacagaaaggctagttacgagtagcaatctctttgcttctcatgacggtgtcatttcataaaagcttcatcttcattggtttctgacttcatttttacatgatggtaggagtgctattattatcccagataaagcaatggaagttgtgagagtttatgtgatttgtgcagagtcccactaatgatgaaggagaaagcagaccagccacctccaatcacccttggatgtttggatttttttttttttctgttcaacctttgctgtataacaaagtaccccaaaatctaatggtattaaacttttgcatgattttatgatgctcacagactctgcgggtcaagaagccagtcagggcacagtggagatacaagcttgtctctgctccacaatgtctgaggccttatctggtatctttgtctgtttgggctgctataacaaaatactgtaagctggtggttttgtaaacaatagaaatttcttacagtgctgaaggctgggaagtccaagatcaaggcaccagcagattcagtgtctggtaggggcccactttctagctcatacatggtgccttcttgctgtgtcctcccatggtggacggggcaacaggtctctctcaggcctcttttataaagacactaatctccttcatgagggccccaccctcatgacctaatcaccttccagaggcccatcacccactgccatcaccttggggatttagatttcaacatgaattttgggaggacacaaacattcagaccgtaggctttggtcctgggtccccaaatttcatgttcttcttacatgcataatatactcattccaacccattagcctcaaaagtcttaatttattctgtcatcaactcaaaagtctgaagtccagagtcttttctaaatatcagctaaatcagatatgggtgaggcttaaggtgcaactcatcctggggcaaatttactctccagctgtaaacctatgaaatcaaacatgttatgtgttttcaaaatacagtggtaggataggcatagtatagacattcccattgtaaaagggagatacaggaaagaagaggggtaacaggtctcaggacccaggtctgaaacctaacctggccaacaatgttaaatcttaagactgagaataatctttggtttgccatccaacctgctggacatgctggggcagggattgggacctcaggctccagatggccctacttccgtggctttgctgggtacagcccatgctacagctctcgtgggttttagtcaagtgcctacagttctcccaggctggaatcacatataggcggttctactggtctgacagcagctctactagacattgacctagtagggactctgcagtggcccagccctcttggcagccctctgcctgggtcacacacctgaggctctgggtagttccatcctttgaaatcttgatggagggaataatgcctccttggcttgtatactctatgtgctggtgaaggtggcatcttgtggacactcccaaagtttactctctgtgccctctggaggaggagcagctacagagtaccactatgcacttgaattcactagagctgaacttggggcagccaaagagcttggcaaagagcagagccttgaaattgttctgttcccccagtcccttgcagtctggacctgtgaagtgagggggcagccttgatgatctccaaaatgccttcggggttattccattgtcttgcacaataggtcctggcttctgtttagacgggagtctaatctccccattgtctggatgaatagcttctagctttgattgagatggcccctctgaactaacttccttatcaaacttggccacacccttcatgttctctctcaaacaagctttctgattttttctaatatggataggctgagaattttcgaaatttttaggctctggttcccttttggttaacagtttcattaactt

SEQ ID NO: 95141 - DNA, 76455 bp, Homo sapiens
  misc_feature (1)...(76455): n = A,T,C or G
cctctgactcttccctcttctctccctctgtactgtcttcccaggcttaaaggagctaccctgaaagtcctcatggccacctccagccctgttctctctctctctccagccccagctcactgtggttttctaacggccgcaagagaaagggggacctggggcaggtgccaaaagactgcagggtcagaaggtgacaggtcccgggaggaggaactctctgctcgtaccctgctctcaggcaatgtgggagggggcgtcactctgatttccctaattatcttcccatgacctgcttccccttctccagcaccccagccctcactgaaccaagagacaccggaaatggcttcttcttataatagatttttccttgttacaaaaatgtttattcattgtagaaaatttggaaaatacagataaatttaaagaagaaaaaagccttattatctcatcactcactgataactactattaacctttcttctattttttccgtgaatatataactgcttctaaacatcatttgaataatgctgactatactgttttataacctgcatttttcaattggccgcatgccatgaacatctctctgtgtcattgtgcagtctcctgcatcatcgtttttgtgggtagcaaagcatatgccatcctatagatatccaaaaatgtttccaaccttgtgattgggcattagggtagcttccaacttggcactactgtaaataatattgcaatgacaatccttttgaacaaataattcctgattcccacccccctcaccacatacacacactttgtattaattcctgagcaacccaccattgatagtccaaaggtaagaattttttgaggtttatattactccttaccaaacacccccaccccccagaaagggctctcaggatgtcagaccctcagatacacagtttcttaacatctctatcctgcttttattgtttaaaatcatctggcctggttggtgggcttgagttgcttaggtggccactggggaaaagggtctggattcttagtgaagagaaaagtgattggggtgggtgagggggttccagatggatgagatggggcttatggaatgctggtcatctctcctatcacagggatcagcaccctgcgatgccaccatagtctctggaggagggagacaaaacatacaggcaacagcttcacatttcgcctgggtgggcagttcggctgagaaggacagcatttctttcttgaattgcctgtctatggcttttgctcttttgtctttttcttattgatttggattacatgtcataccctctgttgcctgtggcataaatatttttgcaagttatctattgattctttagatttttgtaatggtgttttttaacaactaaacatttaaaatttgcatgtattcagaccttcaaatctaccagtcttttcctttgtggtttctgccttctctgttgtgcataaaaagaccttccccatccccagatggtgtaaacattaatctatattttcttcaagttggattcattttcagtctttaaaatgtagtttgtttcccattcaattctgacctcgtgtgagtgggagacatatgcacaggcatcccctcaggaacctggaggtgccagtgctaactcccagccagttgacgattgctaacttccagcccagtggactcaggacaacttctaagagctctatctttgcctttccatagctctggggaaatcccagaagcccttcagttatttaattggcattttttttttaaaacgaatctcattggttttgtctgtctggttggatcaacagagaattttcaattagaagaaaccctcccaaataagcggggttaattcatgcctgacagatggacaatggcatttccacagggcaagtgctctccatgcaggcagggaccttttgtttgtttactgctacatcctcaggacctagaacaatgccttgcacatagtggggactcagcatatacttgttagatgaatgaatgcgtgaatggctctcatgtattcattatttaaaatgcaaagaggtaataacatgggaaaaaaactcatgttaggtttttaaaaagcagcataagggccaggcatggtggctcatgcctgtaatcccagtacttccggaggccgaggtgggcagatcacctgaggtcaggagtttgagaccagtctggccaacttggcaaaaccccgtctctactaaaaatacaaaaattagctgggggtggaggcaggcgcttgtaatcccagctactcgggaggctgaggcaggaaaatcgcttgaacccaggaggcagaggttcagaggttgcagtgagccgagatcatgccactgcactctccaaaaaaaaaaagggggcaacataagatactgaataaacaatatccatcattcatttattcattcaacaagtatttcttgaactgcactacacatggggaaaagacagggttgatgtaaagattaaacaagttagcatattgtattaggctgctggagctgccataacaaaaataccacaaacttggtagcttaaacaacagaattttatttacttatgattctggaggctggaaatccaaggtcaaggtgatggtagagttggtgtctggtctgcaagacctctccttgtcttaaagatgactgccttctctctgcaataaagttatcacaataaactttctcgcaataaagttcaggtctttattcctgatgttactcttcttataaggacactagtcctattggattagtgctccacccttatgacctcatttatccttacttaccttaaagaccctgtctctaaatacagtcacattgaaggttagagcttccatatatgaattgggatgtgggggacacaattcggtccataacacatacgtaaagtgcttagaaataatgtctggctcatactaagccctgtgtaaatgttggatattattattgttgttagaaaatatacagaactgcattagttattattgcattctcattgggggatgaaattacaagtgattttatcttatacttttctatattttccaaaatttctatgttgaacaattttactaatctgagggggaaaaaacaccactactcagtaaaagacatggttgaatattgtttgcagctccccaaccattatatcatgtgttaaaagcctttgctccagattgggtagttatccttagtggattctttgttgagtttcaagtttttggttcaggtctccaaatatgtggttgtcagaatacagagaagcaaagacctggctcagcccacccagccccatcagtcagagcttccactaggagatgcagtaatggggacagaggatgcatcatgctgtgtgccagccccatatccacaccctctggagggcaggaaagaccttcagcagtgggatggtgagtggatcagtttgagttcttggctccaaactgactaaacaaagtctggactgactgttttaatcagaaaaagagtacattaaagaacatgttcacttctaaaaggctcaacttttggggcacttcaagaaacaggctcaaatttcagtttctgaaatgactcccagaatcatccaccatccatggcttctgttaccacccttgtgccagcaacgtagatgccatgtgcatgactttctttcactcatttctggcttttttatcgaaggctcatgagagtgtgtttcattggtacagtctaagtcactaatccactcctagctgcaaaggaagctggaaaagtgagttttctggattctaccggagacacttgcaacttgggaaactatcaaaatgtaggagagaatgaatgaaaaatgaataaatgggagtcaggagcccagaactgctgtgtgacctaagacagttgttcgcctttcccaacgtcagtcttctgctctgtcaaatgggataatatcctctgcattctttgggccagaccccaagccagggctgcaaatagatgattaggctcctgcctgccaacccacttagagatgctagtctgggaggagatatgtgtgaacatggctggccgctaaggtggctggatttgctggctaaggaccaagagggatatccaagggctccccagcctggcctgggcatttctgggccctgggttccatggatgccacacccatgcagtctagggcctgagtcacagcgtctacccatgcctgcagatggtccacagattgagactcacagagaaggaagaagaccttgggaactcaggacaggaaagaacaagtcccattactcagtggaaggaacaggcctagagaggagagagacctggccatgatcccacaaccaggctagggcctttctgtycccatctctcaggggaagccaagccatgctcagaggaaaacagaaaaatacttggctaagctagaatcagtcacagctccagtactggtttttgaattaaaatattcacaagtagcagagacatctgtagggagagtaacgggatgcgacatcctgctggaggccaagctaaatgtgtcccatgacatcactctgaagaggaggctgccagagccgcatagggcccggagtgctcctgcagctgagtgccgcagaggcctgaggcttgcagcctggctcctggccccctgctctgtgaagaaatgctctgttgaaccactggcctatggggaaattacctgaccacctccctagaccaatctggtctggggagatatgttctttctgcccaggcttctggttcccctgggtctcctcttcagtactagcagatctccagttactctgctgccagtgggagtgtatgggtggggtggggggattctcaaagccatgttacttgctgggaggagtcctgccacacagcctctgtcacaccctcttggaggagccctgccaagcttgagatcccagcaaagtccctgccaggctgtggctgagttcaagctggagcagctctcccaggagtccagatcctatgatggagaaggtgtaggatcctattgtaaagattggaagtgactcagaggcacacatctgcacacttgcaccactacaaggtgcacacaggcctgggcacacacatgccatgtactcgtactacagatacaggcccccccacacacccagctgctgagctgtgagcccacatgcactcatggctgatggtctctggtgggcctgaagagatctcatgctcttccactctctgcttcctgacttctgctctctggttttctatcctcttctttctgggctgtggctcagccagctcctggcctgggagggctgcgtatagagaaggcccggctgcctgagcgctgtcctcggtgctggagtcctggtgggctctgcatgcttgaggaaaacaagcaagggcattgggaagaggtgatcttgcttggaggtgcagatgttcatggggtgcccaccaggatgcctacccttattatttcagaaaatgtgcaactgggcttcctcctttcaatggcagacactgcaacaggtgtccaagccctcagcccagcagtgtgggcatctgtggctgtgtgtggctatatggccattcattgtggctatgaggggcttcttgagacctcgtgtgccacatacagttgtgtacgaagatcatgatttcctcatgagacacctgtgattccatgtggctgcctgtgaccatgttactactggtgaacacatatggcagcctgtgatcacactgagtctcctgtgaccttgcgtagcctcagacctgaactcgtgcgtccccagatgatctgggcactatctggtctagctgcctgatttgtcagagcctaggtgaacacttgccactccctcccctcactggtttgcagaggtggcacccggaggctccccatgtctgcaaactcgggtcctagggggcgttggtgtcagcgggcaacagcccacaggagtgtgcacctcctaggacaggtaaccgcgacccggctgccattcgagcctgcccagccataaaacccaggctgcgagtcgcgcgggggcagggtcgcgtgttgatggggtgggtggcggcggggtgggctcaatgtcacgctctggcgctcgtcgcccgtgctcccccttccagccggtttccgcagaatgccaggtactgacgttggagagcggggccggagagggctggttcgctctgcggccgggcccctcccccgcccgggagcttggcggttccgayaccgcggtcagtgcggggcaagccccagacccggccggccaggctgcagggcagggagtaaggctcggttgcgagtgcgcgccgcgccctcccccttgagccgtctccgcagcggcgcggggaggcgggagctgcggggccggagggcgggggctaaaaatacccggcagcggcggcggcggcgcggctactgctggggctgctgggctgcggggctgcggggctgcgggtcggggaggccgggccgggccgggccgggccccgctgaccgccatgctgaccttcttcctcgtgtcggggggctccctctggctattcgtaggtaagtgcccgtcctgtccgcgtcccggactcccatctcccgcaggctatgaggtcttcgcccgaggtggaggtgttacatctccgcggccgccgagcccccatcccctgctgctgagctgtcccgtcaaggtccccagggccgcctaagtacaccctccgcccccagttctcgcgggctccgggccgggtttggggagcacctgggtctgcggagggagatatagggcttgctctctgcgaccccaccacaaacccccgccgagttcttgcgtcccccttccctgatggcaaggaccatccgcggatcagattaggccctgagccaaggccaggaacagacattgcgtccttgtccatctcctgggaccagaaaccgagggtgttggtccccgaggtcccacagcaggtcagctatgtaacccggactgacctaggcttcctgatcccggcgaggggcttcctcacgacccctccctgcccgtccttcagccagagtacaagatttctgtaaggtagggttcacctggctcctctgctctgcccagggctgctgtrtctccactgtttccagacccctcccctccacctcacaggagtcagcttcaccactgcacttcttaggcggctacaaggacccctgctcgatcccgcctccgcgcttacctccctcaaccccccatacacccacacctggagtctcaccacaggcccttttatctgccagttctaccaccygcaccggctacttcccctctctgagcctggggtcctccagagtataataccactaaaggatctccacctccaccccaacccccatgtgcagattcagcctgataatttgtgtgcagtgcttgatccttaaattggccttaaacctgtcctaggccacagcaaatgctctatgaatgttagtgtttattattatctcacattcaaacagcaccatcagaagtggtaataaagctttttctgagccaaggaaggggaggaagttgaccctcttgaaatctttacctgaggctttgtacgtgttatttaatattcatggaaaaccctaggaggtcggtggcaccatccctttttttactgagttcagaggtcaattgacttgcctagtgtcacatggatatttggcagactgggattccattcgaggttttaattgatcaaccaatgctaagtgcttggctggatcaggcctgaacctggagggttggtgggcctagtaatcacttccttcacccccaccatttccttaagttaggccacagggacacttcccctgagctgggagagtgagtgaagcctccctaatcccctcagctccctaagctccttctgtctgccagtgtctgtgactggctgtgcaggggcactctggtcctgaggcacatccagcagacaagggcagggctagagctggggttggaggtaaagggcaaggataattaaaataatggtgatggtggtcgtaacagccaccatttaatgcctgagtgatggatggtctcagagcctctccccactgccaggacccctttgccctaccctcaggaggccccacccaaccatgggtccaaggtcagctctctgaagacttgatcttctgtggctgcagggaggtgtctaggggctgcaagaccacttgtgaccggggtcatcagcagcctgtgagaaaaagtccctcaccctgtggggtccttgtctgtgagcagggttagctggcactgactcaaagtggagtcctgtttccttgtggagcatttcctaaagtggtcagctccctcctctaatgggaaactggggaatctgcctcactgagagactatacagggcctcagaaccgtcaagcaggagcgattcttggggcaggtagtggctgcttccacagaggccgagcttcccaatgcaaaaagcaagaggctgaggctggtctatggtgcttattggatagaataacycagacaattgctggggcattttaagttatgtatccaccctccttgagactccacctggcccccagcctttctctggtggcagaagagactcctgagttaagagctgtagttctgtgagcacacctgagaacatgctctgccttgtcatctccagggtcccatggtcccacggcagctgccagatcccttccactcagccagtaacaggaggcaatgtctctctttagtagagttatgtgctttttgccacctaacctggccctagggagacaaggtagggccaggcaagggtttccctcaagggccctcagggagagatgacataaagtcggggatgggggtgtggcaatgcaccaggaggaggagctgactgttgtttgtgggaggtagccatctgttctgggctgtgtctgtcctgttgcctgctggagaggccagcaatgagtcctgggccagcccagatctcacctgtgtgttgaatactmaacamggagacaagtaaaataagtccmgcatgagtcagatgctaggtctggcttggggaagcatgccctcagtgccataaacacctagaggacaatgggagcagaggatcagagcttctgcctgcctgtacagcacctttgtgcaaagtaggaagaagtctcactcttggtggataactttctaaaagggcacaccttcctctaggctaaggcagccccatgccgcagggtctaatctgttcaatcatatacccaaccatcagtgacatatgagtgggcttctgcagcattcaggggaatttgtcagagatagggaggccaagatccaagtggaggaagccagactagcagagtytgtggaagaactgcaatgggggatgagtcttcarggtcttgtgcctgagcaatgtgggttgtgggagaggattctggagaaggttttatttggatggtagaggatccctccatttagctgctgagtcaagaggaagagagtggagtccaggagggtagtaggaggtcgttatgatgttatggataagaatagatgtggtccaaggatggcttgagtcatggctgggctccagtaaggagaagagataagcccccacccctggcctctgccttaggagaagtggggctggccctggkggggcgagacaaagttgcccgtctaaagaatggtttggcatgctcctggctatagatgcctagggcaagcatagacttgcacactttgrcttagttcaggcctgtgagatcctccccttaccccactctgggctcccattaggacagagaactgacttgaggtctagggccaccccaggggtttggagattgcagttatgaattgggacagatggtagagctccaggcagaacaggtggctctgtggccagctggggacatgcctcacaaagaaagcctgaatttgtacaaggtgcaccagcatggagcaggattttgcccgcagcaccttctcacagctctccagcctatatggtaagaacatactgacaccagggggcagcagaacccagtcattatgctctccagctattgttctgtcccttgtggttataaggattcatgggttgaccttcagaaggctgaatttggctcagctacagccccagatgggactcaggactgtcccatacatggggtgagtgatcatgaggctctggcttgtttataaaaatgggcaaaagttacaggcttttgtataacagaagctacactgtgtatccagccagcactgggcacatagtaggcactcaaatactcattaagtactaggtgtgtgtggaggggtgtttttatgggattaactattgcaaacaggctgacttggctgttgtttcactgagcacctaccatgtgtcaagcaccctgtctatgattctccraactttccttccatcctcccacaacactgtgttgtgttctccccattgcctaggtgaggccctgagactcagcgaggttcagtggtgaagcaacttgtaagagctgtgagtcaggccacattctcagactttcagtccaggaagggaccaccaggcatgatcagccagccatgttagctaaaattataataacttgtattaggctttccttaaaggggatccaggattctgacatgcagaaagggagtaggaaaagaaaaggcattccaggccaagggacctgtgtgagggaagattggcaataggactgaatgaagktgaaggaccaattctgctgggccagtgaggttgccagaggtgggctctgcaggcctaggataacaggccaaacagcattggctttattctgtgcagcggttatgtcaaggaggtgtgggtagaactgggcatgtggatgaccaaggtgacactattcctgtgctccagaagcctcctccacaagtccatggtctccttgagggcagggccaggtgtctcatgtctatgtccccaacccagagttgggcacacagggtacataagagtttattgcataaactaaagaattccctgagcgtaatttattttaataatgtgttttataagctgtttccttaccacaagtcaatcagtaaacaacagattttgagtgtgctcctgctaggatgctaggctctgtgcccaggtgggggatgatgccaatatgttagaagcagtagggaaaagcaggtgtaaactccttgcaggcagggccaggttacccttcactggagaaccctgtgtgctgagaaccagtgcagcctggaatagaaggaggtrctccagaagtgtttgttgaatgaatgaatgaatcaactagtgaacccacagcttctgggtgaccagttttgtggaagagagtcttctctgagggctgctgcttccttagagctccaaggttccagtcacctgacagattgggagcttgggccactctgccaagcatagatgagaggaattcccagtcaaggtcctcacctcactggatggtctggtgtgatgctcccattccttgcgttggcctcgccagagttcccactaaccatccactgggtccacagattggtggggttaggggagtgctgtggatgagatgctgctttgagcccttggggttgtccttcaggatgcccaggggtggttcctcatcatttgctcrgctgcctcgggagatccgtggtaggtgtggttattcctgggcctacttcctttgtgtagctcctaattcatgtgaatcttggggcctgggacaggcagaaatgggaagatgggaagtggattggaacagaaatttcaagccaagccgagctatctattctgagacccaaccaatactctcagagccagaaggatttcaaatcccaagaagtctcacctgaccctatttgccagctcttcccagagatacccttcctctccctgcacctaagccaggcatgtagtaggggcgtctgggggagttgggaatggcttctgatttgccatctgcccatttaagcttgtgttccgagatcactgtctcctgggaatttagagcaggaagccaggccagtgagggaacaatcagcatcttagtgctcagcccctggtataagcaaatgtgggctggcacctgttagggccaggaacagacttagtaattgatagctattggagaaatgagtgagtaggtaggcccaggttgactgggcagctctgggacagaccctattgaccagtgcctgggaccccgcctcactctcagcacagcctggcccaccagtgcaggatgtggattccaagggactgatcaagactcagctctgctacaaagctctgcttttccctccaactcatggactgttgtaggggctgagactcccccgtgggactcctcctgsccacgcacccctgtcccagccttagctttgctgcagaccattctagatactgactgcagatcctgcctcataaacaggcagaaatgtcactgggagagacagtgaggtcaactagatattggatagaaagggcagctagaggctacacagcaaggacagttagagctgggacagagatcagcaaggtggcatgtgagccggccagtgagattggacagggaggttggctggagtaaggccttaaggcctttaggccagtgagaggaagacaattgtcagtatggagaaagtagactcagtggagacccatccaggcctgcagtgacccctctgctttggaagggaagctctggccactctgccctgccactagagctgatgctgcatgaagccacatagaccccaggaccctgcttagtggctggagaacttcagtgttcatcgtgactgtgctttccagcagatgggctggatgtgattctctgaggacaccttcaactcacgcatttttttttcttttttcttttttttgagacagagctttgttgttgttgcccaggctggagtgcaatggcgtgatcttggctcactgcaacctctgcctcctgggttcaagtgattctcctgcctcagcctcccatgtagctgggattacaggtgcctgccaccacaccyggctaatttttttgtatttttggtagagacggggtttcaccacattggccaggctgttctcaaactcctgacctcaggtgatctaggtgatccacccatctcagcctcccaaagtgctgggattacaggtgtgagccaccatgcccagccaactcatgcatattctgtaggccaactcccctaagcctaggtctgtctgtggtggcagggagggtttagagagaaatggaggttgggccttcccccatccagtaggctggtaggggatttgggtgcatgtgtccccgatctccttgccacagaccagatatggaaggctatgacctgtgraaccaacttttctaggtcattctgaagtgtcctgtctcctctgtctcctgcttctgctccctggacagttccatgacctctcacagagacatgcctggcaccttggcttcatgaagatactgtgtggcccaaacgaatacyagtttcctttagccccagaggctgacaagacatatctcccttggatttcaggagatctgtggagcatccaccaacccacctgttggttcaaaatcaactccaaagtggttttgtcctagatgtcctctcaggctcaacggccacatgtgtgcttgagatcttgctgtgctatttctcctggtagtgggagtctgagtgrcatccatgctccacagggcacaaggtctgtgctgtggttaataggcagctcctggtgaccatggggtgtcagagaagcagtgttctggctgctgaaagtcagccaaaaaaaaaaaaaaaggatagaagcctgaccttggcatggagccttggttgaagaaggagccccagccctggaagctagtgrtcccgcacatggggctctgggctgcccttatccccacctcccactcgagggcacttgtggcagcaggagtgtgggcaccaggcagaggacacacgtgccctccattattgaaagtcctctctgtgcactgcagggtcttcttgtgtaccagcacttttttcttcccatttctttctccmtgtttaccatcaacactgtgagaataactgaagtttccttatccaaaaaaagggtgctactccagattccgccactactgttttcgaaaagcacaaaaccaacagagcctcagagggggctgaccctctttctggatcccacctccatccccccgaacttacgtagtgctttcctcagcagccaccgaggcctccagttccstctccaaagatgatgggttccttccagtgggtgcaaagtgagagccccagtgattggtgttcatagtgggtcagtgtgaacaacgcccaatggcctgcctgggccagctggggcctcgttttgctttggtctgaaagacatttttgttttctggtgagaacagccccagcctggccaggagccggccagcggcaggaatacaaaccctttcatgtgacagacccaagtggagtgatgccctcctgccagcagcaggccctcccctgccgctcctgggaggcggccatttgcatatttcccattcatcctggccttgaaaaggaggcctgagttcccagtgctcctgcccgctgagggctgggccgctccagtctartgttaactctgtggacactgtaggctctcacaggccaacagcagaacttgaccgcttgctgccggagggagagcagcttaaggctgcagctgctgtgccgcctgacctccagaggggggattcaggaggtggcagattcccgttgaccagcacagccttttgctaaactggaggaaattcagatttgtttcttcttgaggcattcagaagaggaattttgtcagactatggggatgccagaatattcagctatttaccaaatttgccagaaaatgtgcccttaaccaagggcaaaactctttttgtcttgctcactttctagtctacaaaaaaattcagtgactctggaatggtaggtgaaggagccatgccggatcctggctgcagcagcaatccctttgccaaggatgtaggagcacagcttgcctggggcacttttgcatccccagggctgagtgccattagcttgtgggctgtgactctgaaggcatgaggcagatatacagtacccatcaccatctttttcctttctcccatagctaagtgccatcctgccagcctcagcttcctgccccagtcctcagtgcagacaggcctctgcctccttcccgccactgtgtgagggctcctgccaggggccccaacatcttacaggctcttcctgtgacttaccaacccacttctgtccctcttcgatagccctgttctctaccctttcccacccagctcggatcctctccttgttctccctccctggctaaggatgtctcaggttctgtcttttgtgcatttctcccctagcacgtgtccccaggagaccagcagggctcctaagtgaacaagcaggcaagcaaatccctctgttgctccccccacctcagtgacccccaaccatatattggcaggaccctccctacttcaaggagcttccctctagctggaggaggtcgcatcccatcctgcttgtaccccagccacctgcagttgagctctgagtgcatggcctcgccatgagcagcccatatgccctttactggttcaagcttagtttgcagtgtgtcctaagtttgagccagtggcagaaatgaatcattgctcctgaggccgggacaccagcagtcctaacgtggacatggccggaaaggcaaaggatcgtgttacagccacaggatttggcttcctgcacaggagggcctggccagggagtgtccctgtgcctgtgaggtgatggtgaccctggtcagtattcctagggtcctgcctgctgtcccagggcttggcgtggaaggatctgaactcgtccacaccatcagtcctggttatcataccctgtaaatatttccaaagggactactgctgtttttttagcccctgctgtccctctttgctctgagaactttgtcctgcctaattcatggtgagggcaacgtttatctcagagcgtgtgaaagacactgtgtatctgtttgctcctctgttctcaaggctattcatattttaaagttcctgaaagcattgtttgtgcctggcttcctggtgctagcatcaggaatgtggacccacattccctgagcagggcttagggtgagtgagatttttgagaggtactgtcatgaggatggggaggccagcgggcagtggaggctgctaaagggaggcatgctcacagtgagcttgggctagttgcaacaggtggctctgtaaagtactcagtcacagccagccttagctgggcctttctacattcaaggggcttaattgaaccatcagagctatgatcaggctccttggggaagcttggcaggtgagccaccatgtaacctggcaaccccgtatcgtatcctgggcctctatctcatgggggatgtacagtgggtcccacctggcaattcccaagtcagggaggctctttgctccatttctgccctggtcttatgtggttctgtgaatctaattaaaacccaagaggaaaatggagagcaaacccttctctcacagcagagagaagcttgaatccctgtgtggagagggcaggtgttgggcaagtgtgcgctgctgtgtttgcacctctgcaggtcagggttgtacatgtgtgatggtgaaggctgtgcatttctcaacctggcaactgggctgcacactgcttggggtgaaactactccctcagctctatgcctctggcactctgtgggatttcccacagaccactggatttcctgccccasaggctgccttgagaagcattaaaggaagctttcatattaaaagcatctctgaagatatttggagaaaagtaagggtcctgcctagaagaaaggtgaagtgactttgtgggctgatcgggggtgctcagatattcgttcattttaatcggggtgggttgggggaagctagggccaagttccagatgagggtcgctgaggcaggacgctcttctcatggctcacccagatggtagggtgagtagtggaagctgttatctgctccagggaaggtgttgcaagcctgtgggctctagacttgccaggcaattgggcaaacagctttcaagagggagctcagagcactgggtcctgtcctgggacattcttgcagcaagggagcagggttaaatttgggtggacagtggcccagtgcaggcagactcgtaattgcccagaagcacctgatgtgggtagggcctgggggtggtagtaagctggctcctgtggcctagacttgtcttttacttattagcaggtgccaccatgagtctagctgtctaccttatgatcagaatgagtgtccaattcaaaatacgcmgtgatcatacttgtgtgctcagccacatgttagccatggaaatagtagtgaaaatgctatggaagtagccacccacacccctaagcctcacagatcttgcagtagtgagacccccgagagcccctgggacctcagtctctcagtctggcagaggtgctgcaggacttcagagctcagcttcggtcctaataggcaagggtgtgggttctggctccagggtgaccattcccatgcaaactaggcaacagtatctcttagtgcaggcatgagagcagggctggtgtgctgccctggggtcttgtggtggagatcagccactatcttccacctgctggctctgatccttggtccagagtgtcctcactccccagagcatccctaagcagatgttttatctggaactgtgccatttctttcctcttcccaagtagattggctgtgaccttgtgggggtggggagcagaggcagcccctgggagaggctggaggcagaatctcccgggtagatggtacagtcgccctcagtgccagagagctagcatccccatcccctactccccactacttcctgtcaccccccaccccctacacacataaactcatgctcactgcagtcccaagcccacagcaaaggcctggccctaatcattgtctcaaatggatgtgtaaggagactttgttcttaagaaacccacttggcaaactccctttcagaactgcaaacagggtggggtgaggggaaaagcaggggggtgtaagctgaggctctggcacgctggcagggtgagggttaaggctgggttgcttggctctgagctgatctgagccagcaccgccctgcatgcagatggaggtggggctggcgggggccttgaggggccagcaactccttacagaactgctgtgtgccctgttccctgccagacctgctcccacagccaccagggagcctgtgctaccactgctaacggctctaccaccacccggcttctcagagcaggcggctgttgccatcgactgtccccaggagggcagactcggggcagggccttcgccacttttgtgctttgatcaagatgtggtaacttctttccctgggccccacaggccctataaagggaggctggttctagtgggacgagctcagccgcctcctcagtgccaggagcctgctggaaaggtagggtgtgaatgcatctacttgtgcaagttgtctttgagcccctttggcttgcaaagagatggagtaactgcttcagctacttgctatctactaagtgtttcccttactacatgcctggcactgcactctctgtccatgagcttgtttgagatgaggcccagaggggcaaagtgacctgcccaaggccacacagctatcaagagactgagtcatgatttggacccaggtcagttcagcaccggaatacccagaatacccactttgggtcctctcccaagctcgtttgctagggtccctgggccctgggagaggttgtagttttcttttcagagctcttcacttggagttgaggagattctttgatgatttggtggctgggcttgagcttccccacccgttttgaagacctcagaagtttgcagaggcccagaactccatcatatgaacccctattagagaggctgatacagaggaagctggagtgattcaaaggggagggaagaatccgaggatcatggagagcctcagtgtgagcattagtttggactctggtcctaaggcaataggaagccagataaggtttctgagcagtggcatgacatgatcctatctacatatcaggaaataactttggtaacagggcaagcacctgttagagcaaggagacctatggagagggtggtatgggagtctgggctgtggttggtggtggctgtcaggcctggggccgttggggtagagaggagtggtcgggtatccagctagacaatgaagcctagagtattgaggttaggaggctggaccagcagagagttcttggagccatgtcagggtccccagggccagttccacagtgactgtgctctggggctttgcttctgccaccccaccacattggagccaacatatttcccaccagggcccctttcttcctgttctctcccatgctggattgccctaaatcagcagaggscatgctgaggtgggaggaagttccagtttccttagccttagctaccacttggtattctgaactggtctgtgctggagaaaaagatgtcggatattccaggaagagaggaggaggtggctagttcatgttaggtggcttgttcatgcctgagtcctcctgccaggtgaatatttacaaacacagtcactcacctggcaacaccagcaccactgattcccttgagtgctgtccacactcctcttgcccccgacacacacacaatgcacatctctgctgcagccaagagagtctcttggggtatggaaggaggcagtatggctgggaccctagagaccaccaagccctaccccaggtcaaaagagaggtgtggaggtcagaggaggccaaggccctgtgaaataatgagatgagaccagactccaaggcctaggctctgccctccccatgtcaaaggcttggtggcttgggctggctctgaggcccatgtcctcaggggacctggactcacagctctgccttgcagtggctcccaggtctgaagggaacctcagtgtaaacgcaagcagttctgactgagaaggtcgataagcctgaaagaacgagaccctctggttgctgcccagccaaggtggggtacaggcccagcctcaaggtcagaggagctgccactgctgcaaatacctccttcagggtgagcacctaagtagaagttgcaaggaggagtgggcagccaagccctttgcgcactgccttccatcaccccaggtaggaggagaaggactcagccaggagaagatggtgagttcttgatgtaaggccaggaagaagcccacccatgtccatggcgaaagatagcaaatgactggcccaactggctggtcccctcatacaggctctggtggccctgcacttcccccagcccctgaacctgggcctgggctcttccaggcagctggagctggttgtctgtgggttcagtgccaatgcgaaggaaaggatggattgtgggagtgggcccaatgttggcaggggttggggtggccataccacatgaggggctggcattgagactgcagtcttgggcttgagtctatgctctactacttgtttactgtgtgcctcgcttgctgaacaaggtggcttctccagtggagcctctgttctcccaccttagagggagtacctgcagctgttgtgagggtcaaacagtacagtgtgtaggaaaaggctgcccaggcatcaggaactcaggaattttaggccaagtccccttcttcctcccactgaggaccatggtaataccgtgactgctgaaagctcagcatatccaagaggccagcctcacagacttgtagcactgatctttgtatsagattttgtgggctcagtgctttattttctgcacagaatattctgttccctaagtgtcccatgtgctctttcaactccagcctttgtatgtttactttcctctgccaggccaccctttcatctttatctttcattctcaggatcaatatcacttcctgccagaagcctgccctgactctctcgtacctaagtcaggcagcttttctggctccccatgtctgatcataacactgcccatttcctcatgtgtccttcccaggggaccgagggcaggcccaactctgagctagatgagaagagggactgtgtgagggtctgccagatgcgttgaaagacagatggatgacttggctaatctgggctgtgctctgtaaaaactctagcattgcaccgaatgccacaatatgcaaagctcagagtctgtgagcatctgccaaggaccagggactggtggtaatgaggtatccttccagggttccctttaaaacttttggggtatacagctgagccctcgtgctaggcatgagtttcttggtccttggcttctcatatcattaagtcagttcagctccttcaagaaaaatgtccatcagctcagaacccaccctacgagttggtgagcatgtctggattttctactaagtagtgagtcatttatctgataggcctggctgtgatttcatcttcccatctatagcttaaggaagtaaatgtcccaagaaggccagctagtcacctacccagagtcttctccagagtgattttccctggtgaatctactgtggtctataactyggcctctgctttattatgcagaagctgaattggatggatatgctaggagtgggttgttcctccaggatggtctcataactgacccagctcaaggaagcttctgttaaaactggatttccagctcaggagctcagtgaaaataccacacttggctagaggctcacccagagcctgtgggtggctgatgagtgttcccaggactcagcctgctgtgccatctgcagggcataaactccttctgtggggccacagtgtgcaggccaaatcacctctgcccagtgcttgtaccaggcctgctcctgaccccttttcatgtgtcctgggctgagcagtcctcttggtttgacaagcatatactttaaccatctctttagtcctctgaatatgccagatgcagtgcaaggggctttatatgtctaaatggtactgccctcattttaaagatggggaagtggaggttcagagaagaaggataggctcaaccttgcattgctcataagagaaggagaaggaattacaactgaagggctttttgtgtgtctctgcaatgactttgcacatcactgacttcatctccggtgtcatgatgttatggtttaacacaaatgccatttattgggatttcagcagatctcccctctctcaggggtcaagcaattttttggctcatatcccatggctgcagagtagccactgttgcattctccttgtttcccttcttggaagcacagccatgcttccaaaggcttagggcctgtgaggagggtgcctcggggtggtacagggcagccttgagcccaccctgccatcactgggctggcagacctgtaggtgcctctagcctcaagtcctactaggcagtgacatgagggggtcccattggggatgccagcacccatcacctggcccacccttgatactttcctcagttccaagcaaggtacagaacccttgagccaagctggctgtgtatttgctgtgccaacacggcctcacttagtggccgagaggaggatgccgcaggcccctggggcctgcwtctctttcagccattctccagtgcttctcacagagaccttccctctctctaccccagggcatctgccatgtctccctgatgggcccactgtacccacttgggctgtagtgggtgagggtggctccctggctgccatctgtgacatggcaggagatgttggtcccccggggagcgcacacagcactccgctgagccatttctctctgagtcgtggtttctcttcctaccaggttaacacctgctctcctctgccacctgccttgcctctgaacacttgctgaagggatcagggaggatagcacagggcccagttatggtggggccagttgtcctcttggtagtcggtgagggacagtgcagagccatagtgctcatacagtcagataggtcttcaccttcacatcatgaggrctggagtatctgtcagggctgatctgcggtctttgccctgcccccacttcgctytcactcagggtcagggcctggagttgggagattagaggtagagagggaggagcctgcattccttcacccctgggcactgtgctgagcacttctgctgcccttccctcttctccacaccccaggagcaaagataagtaaaatgctatgacagctgtcacacaggagaacagagcacccaggccttgaggtccaggaagcatcattcccagagctgccagagcagtggccctggaaaatatggaagcagctgtcagccatggcccagggcctgagcgtatgattctcaggaaaagtgggcaggayatctgactgtcaggtgtgacggcagaaggttctggcctcttcctgggaaaagcccttctaggtagccagcttctggggtgcactctgtacatcccaactccccsagggcctgccctacagtgtttcagaccagatatcaggtcctgtgacccaggacccctccctaacctgcccgtcaggtctcttgccttatctgactcttgttttcaacagagtttgtcctctcacttctggagaagatgcagacacaggagatcctgaggatactgcgactgcctgagctaggtgacttgggacagtttttccgcagcctctcggccaccaccctcgtgagtatgggtgccctggctgccatccttgcctactggttcactcaccggccaaaggccttgcagccgccatgcaacctcctgatgcagtcagaagaagtagaggtgagcaggataggagacgttccactgcggaaagyagggggcagaggacaggcatcttggaagtagaagccagacttgtggcttatttgacctcacatggcccagagaaggtgtctcccctgscagtcagccncttagctctgcagcagccttgggcagggtctcctaccnggcactccttctgcctctcccaggaactgcctctgggtagagcctgacctgggccttgcactgggcctctagtttgcctgcttctcgggtaggagggccttggctcattggtattgcagtaggaagcctaagcaggttcttgaggagcttcctggtagattccctcccaaactctcctggtctggtgctgggacccaggattcagcccactcctggccctgctctccctgagtacatggactcacacatggtgccaccaaggggaagacgatacaagggccagtggacaagggtgttctaggctaagcctggaaggactggtgaggtgtgtttcattattaagcttatggaatttatttttgccttttaaaaatttgctttttctcctcttgaattctgttcatttggaatagataatgtatccacatagtccagaacaaacaaatggaatgtactgaaaagcttgtgtcttcttccttgctctcccagttctcttcccctgatgcaacctgctaatgctctgtcctggccgtgagcagatgtgtagagatactcaccacgctttcactcatayccaccacataccctgttgtgcaccttgccttttgctcttgacagtgcaccttggcgatcataagcatgttttgccttgtaggggagggtgcaggttgaggtaggggctgggatcttcagggcatttttccagcggaagaatggtatgtgcaaaggtgcaggtgtgtgctgaggcacatgggggctttgcgtgggacgctaggtagtggagaggggccagagatgggctggccaagtgctgttgagaatggcctttggtgtctggcagtcctgggtttgaagcctggctgtgcctctgaggtgtatggccctgggcagtttcttaactctctgagcctcagggctctcagttgtaaagtgtgtaataaaaagagcacctgctttctaaggtgtggtaaagattgggtgtgatgacccagagaagtcactaaggacagctgtttttggttaagcttgkgactatatcacatctggagaggtcagcaaggacagagccctgtgaactgtgcagggaccagcagagggaacagcgtggagctatttgagattttcagtagggagagacatggccagtttgtgccgtagaaaggtgggtgtgacaggggcaagcgtaagaaagcagctgcaggcatctgggttgaaggtgacagtggtctggatggtgtcagaatggtgagagggatgaccctggctcgtgtgtaggggccactgagtgagtcaccttgtgggtctggaagacaggacatgggatgaagctaatgcctcccttcctggaatgactgcatcctcccttgcctcatcccccaggagcccagaaagccagagtggctgcaccggagtaggcaaaggagacagtggtaggaaatgagatgggagaggcaagaggggcccagatcagacagggcctggcagcattgactgtgcctgctgtgtggtgggaaataattcagatcttgtcactcgcctggcctaaaaccctttcctggctccccattaccctcaacctcaagtccagattctgccttgatctgcagcctctctggcctcctccccaaccattgcgatctggagctccatgaatygcctacagttccccaaatgcacctgtgcctcctgccggtgcatttgcatgtggtgctgcctatgcagggttgctattccctcctcctcactctgtccggcaacccccatccatccttcgaagcccagcttggcagctgatcgataacacacatgcccagtgttgagcctcttctgtccctggcatacagtctctccttgtaccatatctgttgcccaagtgcaactgggtctgattggatgtgtcccagcttctcttgcaggtcttaggtgggcttggtccttgaaagcactggccaatcagaactttccactcgaaaacagtcgggagctgcctgtggttttgagttcggctgtttgctttctggttctcacagatgttttttttccttagacctgctgttccaagaggtggcaggctctggcccagcccagsgtagctcaaatagtgcttgaagaagaggtggagctgtgatactggagagtttgggtttgggcaccctggggaagggtgacagggtagaaggggaggaggcaggagaaggctggctcctcrccctactcaccagcacagaggggtttgccaccttcccactctgcacccgtgccactttgggcccaggaacttgctgcctgcctctcctcccccattgcacatgaacataattcagcctgtcctccctccctagcctcctaggcttctgtgcctgggacagaaccttcagcacagtcctctaactcacwtcattatgtgaatgatgggtggcagccttcttagctaacaccacacccaactgatccttaactcaggggcatagcagtagatgatgggatgggagataccttggcaggttgttcctgaatccagccaatactccccactgtgttgtatgaatgagacatgggtgtgtacgaacattaactgaaaactctggacattctgcatatgctgacctgctgtgtgaatgctgtatgtgtgtgtggagtttgtatgtggggacactggtatacccggcctttatgcatgagccaactatgtcggagtgtggctacatgcaggttgagtgtatacagtccaggtgtgtgtagtccatgtgtacgcgggcacacagatgccacggtgctaactgcatgcacgggttgtacatccgagctgggtacagccttgtgcatgctgcggccctctcctggcacccctacctgcctcagccaacttctctggccggtgcttggcttgtaggacagtggcggggcacggcgatctgtgattgggtctggccctcagctacttacccactactatgatgatgcccggaccatgtaccaggtgttccgccgtgggcttagcatctcaggtgagaagggttgtggggggggtgtggaggggctgtgtggcaggggtggagtgggtgcaakggtgggtatgcaagcatgataccagggccatggcaggtgagctatccccaggttcagtggagagaagctactcctggcctttctcccaccagtcagagaagcagctgcattatatggctaaagggctgacctcagctttgttccagcccttggggcagcttgaccttaggccatcacttggcccacactctatactcttggggagccttgaactgccaggccactggctggcatggttctgaacctgaacctctgagatgtctgggtgctctcagggtaagaggcaaagagaggcagcctaccacctcctcccagtggtccccaggtgtctgtatcctttgggtctgtaatagggatcaccacacaaattatgatggggactaggcactgcatcattccccatttccagacctccctgatccctgggatgatgccatacttatgtgctttaggccctcttgggcttcagcagattagacaggtagctggcagtgcaggagggcagttcacttggcccatggacacactacagtatgggatgtccatccaggtttctgatgggcggatgcaggtggcacacccactctgacccctcnctgacacaaggctttcttatctctctacagggaatgggccctgtcttggtttcaggaagcctaagcagccttaccagtggctgtcctaccaggaggtgagtgatacaggacaggccccaccctggccacccattcagatctggcactcagggcaggtagggagggatgtgggcacctgctgggtctcagagggtcatttatttccctggcctgtctgccaaactcctggcaacagccttgaagggcttccagcatacccgggttggaagtcagggaggtccctcagatctataagaatcccggctgggcgtggtggctcatgcctgtaatcccagcactttgggaggccaaggcgggtggattgcctgagcacaggagtttgagaccagcctgggcaacgcagtgaaactccgtctctactaaaatacaaaaaattagccaggtgtggtggcatgcacctgtaatcccagctactcgggaggctgacaggagaattgcttgaacctgggaggcagaggttgcagtgagcagagattgtgccattgcactccagcctgggtgatagatcgagactccatctcaaaaaaaaaaaaaaaaaaaaaamaaagaattcctcctggggatctccttcccctgttgaagagtccttgttttcccatcacttccccacatctgtgtgcagrtggccgacagggctgaatttctggggtccggacttctccagcacaattgtaaagcatgcactgatcagtttattggtgtttttgcacaaaatcggccagaggtgagcatctaccttgactggttttagagggattcgtggggtaggggttggctgccatggaatagtcctgctttcactgtttgtagggcccaggacaaaagaaaaaacagagacccttgggctatgccaccactcctcttcccaccctggctctgcccctcatcagcactggccaccccagccatgctccatccacaccccacccagctctacaaacagctgccccttgagccaatggggaggaaagacctgaggaacaggctcatgcaggccatggaactgtccttggggcagtttagacatgaaatccaggagttacagaattctctggtacaggcctggtccagaaggctgtgggtgagcagacacaacccattaacctcatggattccttgccacaggcatagggcttagagcagggacgctggttacctaggcctaagggcaggacagccctctaatctccccttcttccccacccccgcctcatgtgtctccacagtggatcattgtggagctggcctgctacacatattccatggtggtggtcccgctctatgacaccctgggccctggggctatccgctacatcatcaatacaggtaagcccactgccaccccaccctgccactggcaactggtccccagcctccagcctccagcttctcaggttatgctgattgtctgacactcgtaagaggcactttgctctcagaaaatacyaggggcttacactgtggctcctgagttggcttcctgagtcaagctgtccctggtcagacttcacacgaaggttccttccacagggctcagctgccaagaaggagcctctgcaacagcctccacacacagggtacagccctctgaagttcatgacagcttggcacagatgcagggggtggtaaatatctcaaacagacctgggatgatgggggcagagcctggaacaaaggggagcttggactctgcttgaggaggttccmtggccttctgcccttggttccgcccaggacccacggcaaattcctctgtacacgaggcctgtcttatgtatttatttacacataagctatgggcacacagaccatggaagtgctgcctggcatgtgctgcctggcacatgctgcctgcactcatgacctgggcccacatggcctgactctccttgatggccccctgcagcggacatcagcaccgtgattgtggacaaacctcagaaggctgtgcttctgctagagcatgtggagaggaaggagactccaggcctcaagctgatcatcctcatggacccattcgaagaagccctgaaagagagagggcagaagtgcggggtggtcattaagtccatgcaggccgtggaggtgagggtctgcttctgggcggtttgctgggctactgctggctggtcaccaagtcagaacttctggttatctgtccctctcatgccctggggtggctgttttgggcccgcagggtatatcagtgtccagacagggcaggctttgcaagggctggtggtgagtggtggggttggtgcccacaggcatcctctaggagataggctccgtggctggatcagttaatccagcctggcactaggtgctgactggtggaccgtggtgccagcttacctcagaggtactcacacagcctctggagcttcctcatttccagctagcctcagcctgtctgtgtctgaggactacagacataggtccaggagtctgggagaggttcttacaaatgtgatccagacccccagcggccagcagaatggatgtttctgtgcctggcctccccagagacatcaggttggtggcagttggtggtctgctggggtgacacaggacatcctggcctccaaggcctcaggccctgcccagtagcagctgaccccccactatgccctactggatctaggccccaggccctccytcctgcctccctatgtgctccccactctactggtaatgcctatgcattgtacccctccctggcactggcagctgacctacactggcagcccccacctgccccactagcactgactgctcatccagaagcctagtccacccagctgctgcatcctgagcatgtgcccagccgtgccaagagcactttaarcccaacatgctcacactcggattgccatcatacaggtggcatgtgcactttgcttagcctctccctggggctcagactccctgtctgtaatgtgtggggtggcctagaacctctagtcaccctccctgtctcccaggagcctcaggcttagatgtctgtctgagaagaggccactgaggtcatgtctgccatgaccatctcagtggctgctttggaatcttaaactctgggattggtgcaggagtaaggcctactgagctgtttattctgattttgtgtgtggtgtgtgtrtgtgtgggtatgtgtgtgtgtgtatgtgtatgtgygtgtgtgagagaaagagacagagacagagggacagaaagagagagagagagaacttttgagcatttaaaaacagcattttcttctttcaggactgtggccaagagaatcaccaggcycctgtggtaagcgaattcacctgcagrtctttattgagcgagatggcgtgcagggcctgtcctcacagagtccctcactgtgcacagaacagcacctctgtgttaataagcaactcctgtgtgcaagccaggaaatgcccacttgagtgtccaggacttctgtgggccgagggcccagggaaggacctggaacaggagtcaggtatttgggagggagaaaaaagagmtgccaatcctggccacccttggttcttcaagtaacttctttgggaagtcttaytttctcactatgaatatggcaaactctccagaagatgcagtagacagaagcaacagcagaaccagaaatggactcttgtgccaaatggccttgtggcatctgctgtctttgttcatctttgctttgtgaactgttctgtgcgtcatccccatgtgatacttcctggggttgagccacagtgagggcagctgcccccgggatgggccatgtggggrttttcaactttctaaaaggcatatggcctccaggcctccctccagctcagtccttccctctcccttcacacaggcctgagcaggtcacccccggcttcccagggcactgcatgggtagctcctggtgtttgcccatctcctacacatcacggctcagttttagagaaccactctcccatccctcagcaccctttctctcttctgcctctgtgcctgtgcccaggctggttcctctccccaaaacacccacccacacttcatcgggagaaatcttgcttgcgcttccatctcaactcaactgtcacctcctctgggaagccatcctctacatgcaagcagacttggtgggctccttctggtgaccccagactatgtgcccagtgccagggcaagggctgatgcagagyagccttggtgacacagtgggcagctcagtgcccaagccacacgtgctcccaagcttaacctcagatacttgggagaacatgggaaggagggagggaactgggtcacatccactagaaaggtcagagctttgatagagactgagatgtggccactgcagcccaatcccacctaggataattcagcccaggctcaagtaggggaggcagtgggaccagatgtgaggttggtgggacagattagtgttcacaccccagttaggtttcctcagcttctttttctttttcctgagcgctcatctgcccacctttctgagcgcagcacacaggagcatgcaggygtgcccaacacatgctcacacccacatacagcatacatatgggcctggctggttggggagcccaggcatcttgggccctggctggccacactgggtctccctaacacactcctcttctcacscctgcagcccccgcagcctgatgacctctccattgtgtgtttcacaagcggcacgacaggtaagcagaggcacgcagatccccagccatggctacctgcacccttccctggtggcctagcaggtgactgctggagtctttgataccctgtttgaaatgggctgagccttgtcttgttcctggctccagacactgggtgmcctcctgcacctcccagwgccctgcataagagtggccagatgcagatggatagtgtgcattgggaggtccagtgtgagggcttggcacctcccagagctgagtcagcagagtcatgggcagctggatcatgtgctgagggaaggtcctttctcactggcatcatttctctctggtaaacagctctcactcccctgctttctgcccctgcctggcctttgtgttggagacyrgggaaagagtgtgaggtttggcgtctgagagccttggtttgagtcctacctccactgcttgctgggggactgtgagccactcatttaacttctctgccaccagtgtccccagtttctcatctgccatgagggtggctaaaggtgccaagtgggagatgggacagtgtgtgaaagggcaatgcagatgctctgcaggctggggctggtgtgccatgagcaaggctgtcaggcaaagcacacaagcagaaatgatatcctctgtgcttrgagctgacagaggagcacacacatcaacagtggcaggaataatcaaggaaggcttcctgggggaggcagaaagcacaagaggacacacacagcacaggcacaaccctctgcatttctatagcatgctgtccaccctctctctgcaccactggggcctcagcacagcctrtgaggtgagcaggattgtcaccaagcctgcttgctccaaagggacaccatcagcaagtagaagcaccagggcctgtgccctgctgtcataattcccaggccagagcctttcccagtgctgcctttccatctcatctgatgacgtggatgtcacttgtcttgccctgaatgggcaggaagtctccagccttctttttccaaactgaggattggcccatcttgatgacagctctcagtgggcagtgaactggggctctgcatgccttctgcagatgcagcctctaaggcatttgacagacctgtgaccagccctacaaccaggattattcatgtcagtggatcatgataaacatgctttattgaatatagatagatttttaccattaactcacatgggttcaaggatttccaccatattctactaaactttgtcagaaaaataacaacacagcccttcctctccaggagctgacatccagagccaacccagaattcaaaaatgcccttcaggtttatgttgctttttaaagagcactttccaatgtctttttgtcttgagttttacaatgtgaatttttggtgacatggttttggggagcaggtcactgctatggccttacctttggacctgccttcaaagtgtgccttcagccttttaacaggtcacttggtcacagacattgcccttggatctggagaaaaacttcatgatgcagaaatgtgctattgcctggctggggagggcagacatcatgtccagtgcttttccagactgtaggaagctgagccatcctgctcaagctctgtgtggtggaagcagaatgtatagggctygaaacataggctgtgatttactatcccagacctcccactccaaagctatggctgttgcctgggcagagctgggggagtgagcagggctctggcctgatatcaccccatctggctgtgcacttggatttccttggctttaggctaagcccatgctgtgcctcttgtactcatcctcttgtcgggcacatcagccttgtgtgtcctcagcgtcacagcccagatacagcttcccttaaatgtaagctaaatgtcctggctcccagcctcatcaagggccacattgttcttttcatggggaaagatggaaaatatgatctgaacctgacatttggcccatgattctggtggaatcattccaggaagatttcattcttagcatgtggtggaaaaaatctgtggagattcctagaataagtcagtactytgaagtccctattcaggccaagaaggcctgggaggtggtgagagcttgtggtctgtctgtacccagtgatggctgaggggtgggcatgtggtttgctgttcatttcaaaataacagttagctggactggaatctgaacccattcccacctctgaaaaaaagataatatgtgggtgtaacatagcccagtttgggaaattgggtctcttgaatgatagttaggatgttttatccttgtgagttcatatrccttgtcttcccagcaaagaaaatacagtgcttttaaaaaacataactttcagtctatgtgtttttagcactctttttctaattcatctatattcactcattcagctcatttttgtgagtacccactatgcatcagacctagcattaggtgctgagggcatagggatggagaagacataggtctgcacccgtgagctcccagcttgtgtcatcaggcagttacaatatgatgcggtcactgccttgaggtctgcatccctggtgcatgggttacccggccactgagagatcagtacagcaggacagaaaggattcccagaggaagtcagtctaagcagagtcctgaaagatctgtagctgcagaagccagggaaaggcattccctgcaggagaaagagcatatgtggaggcctgatggtagcacagaacacgctgctttgagggagttttgagaggaaaagagagggcccgaggcagggcttgagggcacgagcatgagggagatgatgggacaggagttcccaatagaggtcaggcaggaggggctggagaggctagaggagaacaggatttgtcagtgtcgtctgtggttaagttgtaactggaggatgtcaccatgaaatgacctgctggtgctcttgacaaagactggtcccgggcgcggtggctcacgcctgtaatcccagcactttgggaggccgaggcgggcggatcaygaggtcaggagatcgagaccatcccggctaaaacggtgaaaccccgtctctactaaaaatacaaaaaattagccgggcgtagtggcgggcgcctgtagtcccagctacttgggaggctgaggcaggagaatggcgtgaacccgggaggcagagcttgcagtgagccgagatcccgccactgcactccagcctgggcgacagagcgagactccgtctcaaaaaaaaaaaaaaaaaaaaaaaaagactggtcttcccagcactttgggaggccgaggtgggtagatcacaaggtcaggagatcgagcccatcctggctaacatggtgaaaccctgtctgtactaaaaatacaaacaattagctgagtgtggtggcgcatgcctgtagtcctagctacttgggagcagaggcaggagaatcgcttgaacctgggaggcagaggttgcagtgagccgaaattgtgccacttcactccagtctgggcaacagagcgagactccatcacaaaaaaaaagaaaaaaaggctggtcctggggcgtggggtggaggagctggtgctgtggactgaggagcaaatgggaagtaaagatattgattcagtacaagcatgtgtgcacttctttcacgaagcttggccatgccatcaaaaggcatgctccatcatgttcatagcaacactgtttgtaatagtcaaaatctggaaataattcaaatgcttatttgcttacagtagaacattatgccacaatgttgagcaaaagaaaccaggcacaaaagattgtatgatttctttcatataaaattataaaacgtgattaattaccctgtggttttacaaatcagggtagagggtgtcttctgggataatggcaccctggaagggtgataagggagcctctgggatgctggttgatgttctatgtcttgatctgggtgctggttgtacagccaagttcactttggaaaactccattgagctttacacttatttgggcacttttccatgtgtgtgttatacttgaggagaaagttgtgttttttttttttkttttttttttaatagttgactatgaaggtatggcagggagcaagattagcagctggtggagccaagggctttgggggaggtttgttgctcttctggagatcctgaaagtgtttcttatagctgagaaggggccactggagacagaagaaaggaagaggatgctcaagcaccaaagcccccgaagctttggtgtgggtgggggagaaaggaggtctccaagtaccagggaggagatggccctgctaggaaggaaggggtaagagaagagtctgggaggccaggaagatgcggggagtcctctgacggcttctgcctcctttgtggagtgggagtcagagtcctggctgaggatgagaggagtctaaagggggcatgtgttgacagtttctgggaagagagcccctctgggacagagactgtgagcctcggggsstgcgctgtggagggagcaggaaggttggcaactggattggcttggtggggttttcagaatgggatccttggggaggcccaagaggtgaggcacttgacaggagagtgactgaagggagggacacaggagtcagcatgggagggaggcagggatgagaaagaagataggaggggaagggccacaggtctggagtcatatgaaagtgtctcaaaacatgagagatcaattctaagcactggctgtggggctgggaggctgagggggtggagaccattcaaattggggcgtcccttctgttctaactgaggatgcccatgaaagcccaggcatatacagtcatttagctgagcatgtaagtgcccatcatccccagaactgtggctactcagaggkgggctttctggggaaaatgttcaccatgacctattygttttgtgctatttggttcaagacctgaatgaatgtagcaggagtgctgagttaccatgtatgaagtgcccagcacagtgccaacattagtgggtgttgagtacttggctactattatagttattatttctattcttactagccctcaagtctgattttttaaaaattggtggatatgggattgataaaagtaagactcagacctaaagatttgagagcctttagcaggaagacgaacactctagctgcattatgaaacttccagagaatgtcagtcacyggtaactattataacccacctttgagtatttaaaagcagaaacaagcagccagaatcccccagctgggtggcccagaactgtccccaaacccacttccacccctgcaggagaaaccttgagctcaagtccatccgcagctgctgtcacctggagccaacatccaatcagggcagatcgtcacccagcaaaatgcctttctacataatagccatgggaggcctgcccaggaacactgaccaaagccaaaatgtcattggcagaatctaacacttggagagtttttcttcagtggctagagagaaaattaaatacaagaatggtcagcttatgagtggatgatgggaaatagacagtgggtctcataccgctgagacattggcggcctgggtagccagcatctcttactgacattgcaccagaaaaggagaaaaccagggaaaattctgcaatttgattctgcaacctttcagtcttcccccacaatttgttgccaacattcacttcttcttcaccctttgggaccacatgtagagacaacttaaagaaataatttgggcatgtctgggaatgttttaaaattccatatgccattagacatgtataaaatggcattcatatccacaagaaaactaaaggacatgaacttttctcatcatgytggagaagaaaaggacttatctaaccaagtggaattgaataactactgctgttgtacgtgttttggcttgaactgaatggcggctttagaatttttttttatcaatgaagacagttttcccttgagattcttacaccattcaccctgagttctctcaagcatgaacaagtcagccaactttgcaaatccaaagctctgtaacacaggactcttatttcatgacacttctgatttcatacctagtgtttgggagatattccttagaaacttccagatcctaagagtcagtgggaagaaattgctaggtgacacttggaatactctgtgggcccaggtactctgtgggcccaggtactctgtgggatttgtatatgagacaacttggatatttcttaatctgagcctgggtttgaggaaggatgttaggaagaaagaaggataggcagagataaaattagaccccatggcactttttcttttcaaaaggaagatattttgacagctatttattagagaaatgtaactttttaaatcatgtcataatcttctgtgtccccagaatcacctctgtgatttgcaatatgggtggaagtgccagagtgcaggttaaaatcccatccaccatacgtttcagtcaaacagatgtgtcttgtctcttgaattcaaagattgggccatgcctgatgctcttatctctgacaaatgggtcaccagtaagttgaacaagtaggcctcctgggatataattatgagagcaactttatttttatctccattcgtgcctttaaatttgtgccgcgggggtagttctttttctgctcctgggcaaaaactcaggcatcttgtgccttttctggtcactctcagttaataaaaagtcctatggacattgcaagtcacaaacacagtcttaattcagaattacaagtgtcagtccaaaataggaatcagtacacttcactgagactccttcctttcccgagcgagggctggctgcaggcttggtaaggagggcacggtccttctctcctctgttcctctctgatgtttttccttctcccccagcttgctaacagaggtttctgccctctcctaccaggtttgaagtggggtaggagaataaataagtagactatgaaagttgaaagatggttttgggcaaacgtctaaaactccctctgcttcatggctgccttcatgagcactcttgatttaggtggtgtccttccttgggttgcctgctgcctgctccacttcagcttctgtctttggtgtactctkgattgtctcccctcatgggcgattgtcattttgccctggcaaactggtctcgtggataagatttcttgcaccccaccattcccaccactgctctctaagactgatgttccttctgtagactccatatccagattccctgggattaatttggtttcttttcgttttacaaccacagtcttcttcatctttctcattgggtctcccagctgcagggagcacaatcaggcacttcaagtgatcccattaggggctgagttagctcgggtgttaggttgagattaggagagaggacccttcattcctccccttttgatgggctatgactcagtgtagctgtctccaaagatgaaaaaaagttctctctctctctctctctttctctccccaccccctcattgaggcaaatttcacatagcataaaatcaactccattttaaagtgagcaattcaggggcatcgagtacaacactctcttagtctctctcagcccttttattgcctcattcagggtgagggttgcaaagttaacatgttggcttatttgatgttttgcagctattgtatctgctgcctcagtggaaacgtctgatttaacatctctggctgcctcagtggaacctaatttaacatctttcatacttagattatatctttagatcttatagaagcctgtgaggtgggcattactctccccatcttacaggtaaggaaacagagaggaacaatggcttgccagtgttatgctggcagtgagtggcaaggctaggatttgagccctgtcagatctgtccggcaggaactttgggattgtatctaccctgacaggaaatggtggccaagttgtcctcccttcccagcctgctgtgcctgggatccctagccatctctaccctctgagtcatcctagcagcccctgacttcctcaagggcccagagaactaggcctcacgagcagtagtgaaaggtcatatcaaaacaaagcaagaatatttgtgtcccatttctgccaaggagcaggcaggaagggctgcccagccctcttggatctccagcctggcctgagcctgggrcctttccaggtgccaaatgcagcagagaagtcctttgccatcagagttggctgctggactcaggagaccaggcccactcaggcccagggagtagtacagagcccttgctatatgtaaggggactcggggctgacagcctctgctcctgaaggaagacgggagaggataaggcacagaccacaagcagttgacccttcaggccttgaggcacccctcctgtgcagccatatcacctgcctcctggtcccatgctggtgggagcctaatggtaggctatgtctataggatagcggtccctgaagcagcattcatctgcctgtaagtctaaaggtggctgaagacaaaggccagaggcttgggtagacagcatgggtgtctgggactgccaacttgggcactgctctcaagaagtggcccttgagtttccaactaatttgacttcttgctttctttttatagggaacccaaaaggtgcgatgctcacccatgggaacgtggtggctgatttctcaggctttctgaaagtgacagaggtgaataaagtagmattactgttgcaggtgtctcttgaggacaacctcaagcctcagaggatttttttttatttgtttgttttctttttcttttttttttttycttgatataacctgggctgccattcacaggcaggagtttctgttctcattagagcaaccccacttttaccatcacttttcactccaaatactgaaatgacccatacgtgacaaatattcagttgatttctgggagtactaagatcccagaaagaaaagcatgcaaacctatttttcctttctaacttcaaataacttcaaaaattgatatacccatggttttgtgtgtacctttatttagaaagtaatccttaataacttgtttttcaaaggtcagggtttaattcmgtcattttgtgtttaaggactactagagtctgagaaacaacggcaactgctaatttataaggctgtacttaaaggtaaatctaaaatcaaaaaagctttgatgtcttggcctgaccaaagcatgttagcattttataactggctaacaaaggaggacttttcccacaagtggtgagtatgtcctgcagtttccttcagcataaaggagtgtatcttttcaaaaaagtttggctttttcttcactgtggagaaagtcacactccacattcatggtagatgacattatgaagtgtgtgccccaaacacttagtagaaaactgtgagagacagtttattttagcagaaaactgtgagagacagttggtggctgagcccaggtcaggagccaaggtttgcccaagctggcccaaaagccagcacaggagagtgaaggcctctgcaaaggggtggagagcagggaagtccagcagaggagagcacgtggaggcacagcccacccagatcccaagccttgtgcagggctcccctggctggagtagcccctgtccctagggtcagtcccatctgtgagatgtgtcctgggccctccctttgctggcggggcacagcagggctccctgtcagcattcctctttaaggccctggttccagggatggcttgtgaggccaggctcagccagtgtttggggtttggccttgtctcctcctctggctggggctcataccccagccacagttgcatagacttaggagtctctgggcccctttctctgcaaggactagaaagtgctgactagccaagaccttctgaatccctgcccgggtagcccagggatcctggagaaatggggtgtggggcaggtcctgcaggtgtggggaggaaggggagagagccgggctagagccgactgactgcaagtgaggggcaggccctcagagaggagacttccctgcggagcccactctgctggtttctgtgtgcttcatttggctctttgcttctgcagataacctagacccactgacgctgcgacctaacactccgcttcctatgctgccctgtctctctcttctttctgcaccttccccctccctctctctctccctstctctctcatttcttctctctttcatctcacctctctctctgtcctcaccactcccattcccctccccctcttcctgtttaccctccaggaccattttytctttattgttttatgattctcttgtcgtcttcctgtcagtgtttctttcctttctgtctcccatgmccgtcgcctgcagaaagtgatctttccgagacaggacgatgtgctcatctccttcctgcctctggctcacatgtttgagagagtaatccaggtaagacacccacctgactgaccgggccttgcctgggctccttcttttttcttacagagtcagtgggctcccacttgtgcggatgtgcacatttcctatttgcctttagcacacatgtttgagcgaatggtgcaggtaaggccctggcatcagggaggcacactctgtgcctagaacccataaccctagcgggtgtcacttgtcactggtggcatgaagtaggaccaaactgccctgtcctcagaaggtaccataggggtcagagggctcagaggactttagccaccccacttgtccctcctgggagcattgttccagggaagcccccaggcctgccctgtcttacccatggacacactcagctgagagagaccccagctgatagcatcttctcagagagtattgcagctttgcagaagtgctttaccattcaagctctgtgcagtacagctccgtttatgaccaaaacacttatgttccataacttttataattcacaaactcctaaaagagaaaacaaaagagtaaagttggggaatgaaactggcatggctcttcaggctgcagatggggactggcctgaggctggccctgagacaggccttgtggaagtacagagggagtgggaggaggaatccatatgtgattatggagacaaggaattctccatatatgtgtcactcaagggaccagcatatgaaaaaactgtgtcttctaggcctttcccattttgccttgggggaggtcttatgtaatagtgcaggtaaggccgtggcatctggagagcatgctttccagctttccagacctggattcaatgccagcaattactgtaaattagttttgtgaccctgggcaagtcatgtaacctctctgagctttgtgttccttacctgtagaaatgccacttcccttatagggttgctatgagcattaaagaaaggagcatatataaggcccctggtgtactcctagtcccattaggaaccagccaggggctcccccttggcctcgcactaaacagcacccacagccaacttcagcagcatctccagtactcatggggcttacacaccttcaccttcccagaattccctggggaaatccaacaactctaagacctggagcagacccattagtaggctgtagtacatctcaaaggcctgagtccccagggaggcccatgtccagggtttgggagtaggtgaggggggcacacgccagtgagaatggctgctttggcatctcccagaggctcaggattccactccatcttctgcttcatctccctgtgcctgagtgggacttggttggaaggtgagggggtgggggtcacctcagatggcattcatcagtgtctcatggcagcagccagagctgggtcagggggtcatgggtgccctccatgtagggcagcactttggacagctttggactatcgccagtagtgaccaccctaagggactcctcccttcctgtcctgtctttctagtctgtcgtctattgccacggagggcgtgttggcttcttccagggagatatccgccttctctcagatgacatgaaggctctatgccccaccatcttccctgtggtcccacgactgctgaaccggatgtacgacaaggtaagttctgcagggagtcttcagccaggctgaggggctgcatatttgcttgtttggacagggtctggagccccaggcaggctttcagtgcctccactgccaagtcctggaacttgcctcctctcttgtagttcctgactctttctcattcttccttctcctgttttcttcctattctccaaatacccctgcgggagagattttttttcaggaacttccatcttcacagcatgcctggaccctggcagtgttaaccttcagctcaatgtcacacattcagtgacctcctgcaggggcaaaatggaacatggcttctctgctggccagtctgggccttattcctgggggatatatctagaaatgagacattcaggctctgacagctgcttccaacttatgttcctcagatcttcagccaggcaaacacaccattaaagcgctggctcctggagtttgcagcaaagcgtaagcaagccgaggtccggagtggaatcatcaggaatgatagtatctgggatgaactcttctttaataagattcaggtaagaaaatgaacaagtgattatagagtgacacctaagtatccaacgggtgaccttgcaggagaactggagaagttcatcccagtgccctgtaatcatgtgaaatagtaactcatttgctcatgaaatcaaagcttaagctatgattgaaattttaaacttagacatttttgatttttggagataygttacatttgagatgagcaagaagaaaacctactatggatagtaggtcccttgatctccacaggcaacagtgtggctttgaccttgggtagtcaggtcagtgctccactgagaagctcctgggccctgaagttctcttgcccctccctgtaatcctggccatggtggctttccagcagcatgggtctagccaaatggttcaaaatcttctttttcttttctgtgttctgtccctttagtatctcccacaccaggccaatcttgaattactcatttctgtacctcctcaaaagtttttaaactctgcattatccaaggaatctgtagtcaattagtagcattattcatttttttcttgctactctatttttagttatgaaaattaatatttaaaatatcttggctcaacttacataaacaaagtgtttcaagtattcttcgtcctcagcagtacatagtaaataaagcatggtattgatttatacatgaaaaaaggcaatgccattaaaatggaaattggaagaaattgtcctaagtaattgttttggattcttgtcaatgatgggagagtgacggaacagctgtgtattttaaggaagggagaagaaccaatattatagaatgccacccagactgatggtacttatctcaaaaggcataaaagaattggtcatatggtggattgagctgcagagctgattgtgtttatcattaggaaggggaaggagtttcctcagctcgtgtgttgtacaacctcaggccttctttctgatcccagccctagcatccaggtaggacccagttgttggatgttgaccttggatgaaacccagatggactggayaccatctcagacatcacaaaatttggcagctcttctttcttcccacaggccagtcttggtgggtgtgtgcggatgattgttactggagcagccccagcatcaccaacagttctgggatttctccgggcagctctagggtgccaggtattgtcattgtgtgtcctcccttggaaacagcaggaagttcgttagggcaggaaaactactataccctctactgctcagagaaagaaccgggggacaagatttttgtgagacaaaagctccctcctctgaggaggaaaaaactcagagccagtgaaagccaggatggcattgccacattctggaaagcccaggtttatccactctgggaaattcttttatctggacctttggaagtttttcacaaagggcaaagggatcagacaaaccatagacagatcatcaatgtgcggtagaatctgtaccatacctgtactgcatctctaccttcttcagcctgcaaaatatcttgcaacccagaaaaggagaacaagggagaaagcccatttatgtgttatttgatctattatgttttgtcatctctaaaagtttatttcttcattttccattcagctcatatttattaagtttctgcatatgaagggtatcataacgtggttgtggctgatggatttgaagtaaagtagacccatctttttcataattgtgcgtgcttaaatttttctgctttagaagccttgatctttattcactgtactcctattccacatcagcatggcctaaccacttctaaaggcagacactcctgcatggtgtattcatgcaaacaggtggggctctggaggggaatagcttatggagccaaartaaaacacagagtagattttaaaatgtttatctttaattcattattatccagatgaaaagtagattcagtggttgaaaataggtcagaaatctttaccctaaactatataaccttatctactaagtgtctgtgataaaaatagcacttctcaygcctataatcccagcactttgggaggccgaggtgggtggatcacgaggtcaggagatcaagaccatcctggctaacacgatgaaaccccgtctctactaataatacaaaaaattagccasgtgtggtggcacatgtctgtagtcccagctactcgggaggctgaggcgggagaatggcgtgaacccaggaggtggagcttgcagtgagtggagatcacgccattgcactccagcctgggcgacagagtgagactccgtctcaaaaaaaaaaaaaaaatagcacttcttccaagcaaatgtggccatgcttgttgtctgtgttcagtttcacctggagttatctacctccagagcacctccctccctccatcgccctgatcatgaagcagtcagacacgctcagtgggaggttagctgtctggaaggggtggccagttagctcttggagggtgtgtgcccatagtgtggcttctgtgttttgtttgaaggtttatgaaggttatggccaaactgagtgcacagctggatgtaccttcaccactcctggcgactggacctcaggtaggatgggctagagatataggactggctcgcgaggcactgtggagtaaaagcagccagctctaaaactccctcatggaaagtaaatttgcatgggtacttaggaataaagcaaaagagacagaaaaaaacattaatggtggttatgtctgggttgtgrcattgtgaatctgtaaacactgttgaggtttttcccttttttattcatccttaacacactggaagaatctggtctaaatttggtgagtaatccatgggctacccactacagccctgctttcccttggccctgaaggatgaatctcctcagaatgagggtgtggatgagagctgttcctttttgaggttgccgctgcctttgagacattgatatcacaggagaacgtagttctcaaagggcctctaaaatggccctttaagaaacagtaccctggccmctatgaacctgcctctcctttacacgtcaggtccaattcrtagcctgcttccttcattctaaaatactataagcaaggccatgtagtatctagaatctataaaaatccaatatactgatattataaacatttttccatctggagttgtatcttgtgatctattacttcttttgtgcataacttctatttagctataaaagaaataggaaaatactaaaacctgtgacaaaaaaaaaacacaataatctccaaaggtggttcctgtgggagatctgccagcagcaaattgattaaataacttatttacaaaataggttttattcaactataattttaaaagacaggactaaggaaaaaatgcttctatacttagcttggccaaatatgatttcagtttaaaatccacctatcctgtttctgctgactatctcaaggtactctgaaaataatattgcattaaacagcatatttctttcacatgcacatcatcctaaaattttccagtttgtagctgagcaaacttaagtacaaagagtggccccaggcttggaaaggaagtcagtatcctgaaggattcttttgctgagtggttttcagcaaaaggggaaacaggtctgtagtaggcagcccatggattacccatcagatgtagagcagattcttccagtatctaccctcatgtatcccttccttttggacatgtatctcttccctctcaagtcatcctttacattttcctatgtaaacactgctgaggtttttccctttttcagttcactcttagcataaaacttgaaaaggcttttgtgtataaggattgatatctttgaatagtattgccaaaaatttgacagcctctcttttaaaagagaaaccaaggtggtaagcctcatttttcatatacgcggctcaattttctttcaggaccttggctagcatctgcttaaaactcctccaacttgccagtgaattatctaacaaccacaatcactagaaaaatgacttagatgtaattttgtggtaaatttgaccaagagaatttggagtcttattttcatggggcaagtttcttcatcccagctttccattcctttgttattcaacatgtggtgtgggaccagcagcagcatcgccttggtgcctgtaagaaatgtcgaatctcaggccccattccaaacccagtgaatcagaatccacagcttatgatttctagatttccagcatagtaatcaacagtctggtggctagaggaaaagcaatgattgctatattttatgatccccaaaccaagacgtgtgatctgacaatggggaaaatgatttaatgtggccaccattttcaaaaatcttgaccctgtgtttgatgccccccatcctaccctacccaggaccctgtgcacgttggtgctgggccaggtgtgcctgtcctgcttattaagaatcggatgtaaaacaaatgcccaggcagagattggcctttgctttctccagcactttgttttattaccaacacttgcagtaacaaatgcccctttaaagatgtgttactttccatccataattccccactttggccactcagagattttaaggggcttggaacatcttcagtgctaaaacagatctgaacactaacaaatgccatcttgctccggtgttccagggcacgtaggggcgccacttccctgcaatcatatcaagctcgttgatgttgaggaactgaactactgggcctgcaaaggagagggagaggtaaacaargatttagccrttcatgcctgtggctgctacatgtagtgagtaaaaacaagaacagtagggatggaatgattttccttttgccttgtgtataaagtcattttaaactactgattaatttgactcagctcaactcagcatctcctctcctgtttatgaggcaaccaagagctagtgctgggactgagctggtttaaataaagatttggaattcccagatttttaaattaattaattattattattattattattattattattaatttgagacggagtctcgctctgtctcccaggctggagtacagtagtgtgatctctgctcactgcaacctccgcctcccaggttcacaccattctcctgcctcagcctcccaagtagctgggactacaggtgcccgccaccacacctggctaattttttttgtatttttagtagagacggrgtttcaccgtgttagacaggatggtcttaatctcctgacttcgtgatccgcccacctcggcctcccaaagtgctgggattacaggcgtgagccaccgtgcctggcccttaattaattaaatttttaatagagtcaaggccttgctctgccacccaggctggagtgcagtggcgtgattatagtccactgaactcgagaccatagcctcgaactcctgggctcaagcaattctcctgcttcagcctctcaagtagctaggaccacaggcatgtgtcaccttgccaagataactttttattttttttttagagattgggtcttgctgtgttgcccaggctgatcttaaactcctggcctcaagcaatccttcctgcctcggcttcccaaagcactgggattacaggtgctagccatcatgcccagccccaaattttgtaaaaattcattttttcccctaactgtgtcatggcctgctgctgtgtgatctgtcccagcagaaacatgatcctttacaaataggccagatggagtagatagagctggcctgtacttgttcattccatgggagtaagtgggaatgattgcctgctaatggagcagggggctgaagcatccctggtagaatcagccagccatcaatatctgtgatgagtccccatcaagtgtcacagagcagcatgtggccaaggccagagggctcctgagggagaagagatgacaaaggcctagggtggccagggcaggggggaaagatggggaggatgttgcttgacagaaggcaggagacagttcagatggctgctggctgttccttgtcctctgtttccatccctgccatatccacagtggctttcctgatgggtagtgcaccttatctccgtatgcctggtgacagcttcccatctcctgattcctcatgatgtggctgagagaagccatggtttttgtcccatagatatgtgtgagaggaccaaatgtgttcaaaggctacttgaaagatccagacaggacgaaggaggccctggacagcgatggctggcttcacactggagacatyggaaaatggctgccggtgtgtatgtttggaaccayggagctccaaacatttggcagtgggagggtgtgtggtccgggtcactgaggcaggagtcttctccaaatcccccctgacaatgagtcattcaggagcacctctggggcctggggggaggctcttccttccctgagccccagagcatcttcctcttctcactccgtctcatgaaggtgatgagggacctgtgcaggtgggtgtggctgaggtcttggagactgaattcctatccttaatggtttccagaaagacatctgacagtgtgtggaatctgatgtgaagtaggaggaacagggggtacatgtctctaggacgtctgagaagggcaaggcctgcaagccctccaatgctggcccgcagccaaaaggtggcactgagtgaaggggaaagcttggagacaggagggagaatgccttagttcctgtggctttgccagcagttgctcatgtaaccttgagcagagcctcatcccygtctgtggcttcaccttgactcacttatagaacaggagaacaagccttcatagcattccttgcccatggcccccagcttttagccaaaaccactttgcctcattctctcatttttaaaatagggatcacagtgttgcttacctctgaaattattgttgtgttgtgcaagatctggactttatcctttattatttatttatgaaatggagtctcgttctgtcacccagactggagtgcagtgacgagatcttgactcactgcaacctccacctcccaggttcaagcgattctcctgcctcaggctccccagcagctgggactacaggtgcccgccatcccatctggctaacttttttgtatttttaatagaaacagggtttcaacacattggccaggctgatctcaaacccctgacctcaactgatctgctcatctcggcttcccaaagtgctgggattacaggcatgagccactgcactcagcctggattttatcttttaaaaatgttttaataaaagaaagaaaaataaagttatttttgtgaggaacaaatgagattatgcctacaaagcacttagcacagtaccgggcacataggagatgcttagatgaatgctttgaccagaaaacggctgtcactgacactgagcactcttgcctggagcagcccaccccaggaaactctcctgtgtctttgggaagtgctaaggtttgggtggacattttgaggtgttgagttaatgaggcacgtgaatgatgttgagcccaaggcaggctgagtgggctggtaaatggatctgcccctgcttgggcctgtgtacttccctttgagaaaccctcatgcctgccccagacaaagatgtatctccagtgagtgccctggcccagggactctgcttaggggagatatgcatgattagacagttcccaacccaatgtgatgggcatgagctgggggcacactgggggcacactcacctcgggagaggcagaggaggacaggcacctactgcatccaagccttaggatatgagtcatgttccaaaggtgggattgggaaggacaatcagggcgtgatagtaatatatgctgagtagaggcactagacatgggaagcaactaattccaactgaagacccataggtgtgggagagagaggctagagaggtcagcaggtcctgaacatctgcagaaggtggattgtcctgttggctcagggagcttaggcttcaagccccctcacttgcatcagccccttccaaggccctgcacttcattttacctggtttttcttagaaagggccctcaatattgtaaaagcttgaagtctcacaaatccctggatctgctgctgatgccctgtaacttgaatgaaaccattcaccatttagggggtaatatgaagcaaataaatgaattcatgtaaagcacttagtgttgtgcttgagcacagggcctaaagttgcaggcaggtagtctgtgagagtccattttttaaattattatttttaaatgatttttgaaatttaattaaaatttattgcagctattgagatacttattattctatatttctcatgtaaagcaaatcatgcattcttgacataattcaacttaatcatgatgtgactttttaaataatatttttcctaaaaattgtgtttgacctttccatttatattcacaaatgagattgatctgtaattttccttttatatacaaccctattatggttttgttgtcagcttattgaatgagttggtaagtgggttttttccccatttttttggaagagtatgttcaagctttgaatgattcattcttgaaatttaggtagaaatcatctataaagacatttgtgcttttaaaaacgttattttgaaatcatgttaaatagatcaaggaataagcatagtcttctggtccagaaggatcgggattcaaatcctggttccccaacttctagctgtgtggctttggaggagttaactaagctttctgatcctcattttcctcatctgtgaaacagaggtgacaacacccagctaatggaccatgaggaccaaataagctggggtagggaaagtgcctgatgtctagcctgggttttgagcaaaacagagtctgctcatttttctcttttggagagattgctctggcactggcagatcaagcagatggagtggagacagagtgtgtgcagaagtccagtcagaaagtggttttgctgggaggaggtggtggatatgagatggatttgtgagcaaggacaggtgagcctgaccactggagatcccaggagaggcaaacaacaaggtcatctccaggtttggggtttggaggctggggcaggcttgagaagcttggtcgtgagtttcatataggagcatgttacatcctctgagacaaatagcctagtttttgaagcattccaagggtatttgggttctggatctggagctcagtgaagagctggaagcttgaactgacttgggagtgaccaatgaagagaaaacggtggttactccaaggtgcattgtcagtggcggtgaggggaaagaggcccacgtaatcaccttggaagctcagaaaggtcaaggagagtcagggaggtgaggacgggtcctggaggccagtggcatcagcactccctgtccaaggaggtgatctgcctgctgcagaagtcctacaggggcctgggctcctagtgccatctggcatgtcaggtaggagtcacaggggctctgtcaggtctgtgctatatgccaggggatgcagaggctgctctttaggggtggagacagtagctgggcaagagacttgagtgtggtctaagggagtgaaccaaagatgctggtgagaaaaagggcacctggaacaagggtgtgtgcaagaggggtgccctgatggaagggcggtgggcctccaagaaggaggaggtgaggatacctgctgctaggcatgagggtggcagtggtgggaggactgtgtggggggctaactgctgaggggaaaggacagtggatgctcacggcccagcagaacttggatgccatcaacctgcggtgtacagtggttctctccaggagccctgcagctccctaagagcagacacaacagatggaaaagaaatcggggtggggtctgcagggtggggtagggcagggagttacggcactgaggagcaaaggttcaggcttgagagtgccatgttcttataaagctgtttgtccaactctacaggcaggaactcttaaaattattgatcggaaaaagcatatatttaaacttgctcagggagaatatgttgcacccgagaagattgagaacatctacatccggagccaacctgtggcgcaaatctatgtccatggggacagcttaaaggtgaggcctctaggcttcagccctcccacatatcctgggcatgctgaaaaacccagattaaacattaacctccaatcaggcaccaggattctcctccgcattttaaaacatgagagaaaactcctttttaaaggagaaatcttacttatagtttgttaaaatgtaattaggtcaagtaaattgtctgaagtagtactaatgaacattcccattccttttcacttatgctctacttacttccaaggatttttgagataaaatactagagcaagattcagggtttctactgtttttatttttattttaaaaattattattactattattattattgagacagggtctcgctctttcacccaggctggagtacagtggcacaatcatggctcactgcagcctcaatctccctcctgggctctagccatcttcccacctcatccccttccccctccctccccatccccaatagctgggactacaggtgcacaccaccatgcccagctattttttttttaatttttagtagagacaaggtcttactatgttgcccaggctagtctcgaactcctgagctcgagtgattctcctcctgcctcagcctcccagagtgctgggattagaggcatgagccatcacacctggcctgttttgatttttttaatatgcaaatgaactttacaaattaatgagtactgcaaaaaaatgtactaatggtactaatactaatataggttactaggattcagttatttggaggagttttatacttattttcctttcaatactatttagatttaaagtcagaaagatcatgagtatattctatgatatctaagatatcaaatatattcactctgtcacccaggctggagtgcagtggcacaatctcggctcactgcagcctctacccccagggttcaagtgattcccttgcctcagactcccgagtagctgggactacaggcgcccaccaccacacctggatatattttttttttatttttagtagagacagggtttcaccacattggccaggctggtcttgaactcctgacctcaagtgttgtgcctgcctcagcctcccaaagtgctgggattacaggcataagccaccatgccctgcctgatatcaaatatattctgtactatcattgcatttctataaatattatgaaattattttcraagaaatgctttaaaaatcaaaataggcctggcatggtggttcacgcctgtaatcccaacactttgggagaccgaggcaggaggatcacttgagcccagaagttcaagaccagcctgggcaacatggttaaaccctatctctacaaaaaatacaaaaattagctacatgtggtggcatgcacctgtagtcccagctactcgggaggttgagatgggaggatcacttgggctcaggaggtcgaggctgcagtgagccatgattataccactgaactcctgcctaggcaacagagtgaaaccttgtctcaaaagaaaaaaataaacaaaatgaagtctttcatgaatgaagatcgtattaatgaaaccatttcaacgtggtttggtaatcctgggaaacattttggttcagagaatttggatcagagagttgtttgctcagcctcctgaagatgtgctgatttgagattggcatgagaatcaaaggtgcatatcagtctaactttactgattcttaatgtccttattttttcatataaaactaggggaatatatcagaaaatgaatggtatgatatattggcagaaagatttcatgacatcaacaaatgttttataaacatatacttagtttttgaaaaaggtggagtctgagaattttaatgctggaccacaaataaccactttaaatgcatttgtcatgactgtgttctcctttggtgagcactgcaggcctttttggtaggcattgttgtgcctgaccctgaagttatgccctcctgggcccagaagagaggaattgaaggaacatatgcagatctctgcacaaataaggttggtatcttggggctgtctcctgaaaggttactgaatgttttatggtaccacataatgagaagacagaaaagttgtagaccagtgaaattcgagctcgtacgaaatttctaacattactttatatatagtggggattctaaaccagagatttgtctttttgttactgaagaaactcatatttcttcttagaaagattgacaaacgtttggattttaagccaggagacatcacagaaagcttatccagccctgttgctttgtggcttagaggagagtccagggaggggggtaacttgcccgaggtcacacagctggttagcagcagagtcagatgtgagcataggctttctgactcacctgccatgctccttcagatgtaaggtggattttgtgtctgctgggtgtagacagctagtcatggaatagaaaaagtagcacaattctttctgcttagagcattagctactcacaccttcctgaaaccttctaatggcacatctagaactctgtggaggaggtcgccatgctgtgactcagtgtagccccttgagtcacatggtccatttcttagtagtagccatagaccctccctctcctacgggaccctgggccctgggctcatctaggggtagcaagactcaccaggctgaccaaaagcctgctttaaaaaaaaattgagtggtcccttagcccattcatggtcactcctttggccatttcaggtacttacttgccagatgagaggtggtaattggagtgttgccagggagtatcagcctcagttgcgggctgtgggttagcacatgttggcacaatcatcagttgtwctttacccaaaagtgttgtttcctctacctccattttgaaatgtgttcttgtcttgtaatttttctcatatggtttgattcaggatctgaagaaagccattttggaagatatggtgaggttaggaaaagaaagtggactccattcttttgagcaggtaactgttaccttccccatactcgttacaacccttcaggcagtgatgaaaattaaattaacccatggtgaccctgacctagattcctgacttttcatggtgtggcccgccagcaggctgtgtaccaatggacccctgaaggcctgttccaagctgcctcctgaaccaaaataggtcacatatcaaaagagattgcacccatccttataattacaaactttcataaggctgaaataataccctagctgtcactagtaaatcatgtgtacatgatctgtcttccaagcttcctgcattaccgaagacgacagtcctatcttatttttatttttgtggggaccgtcttcttggcttcagcagacaagtttacttgttaggaggacactggaaagattggtcttctcgggccagtgatctgtcagcccagcatgccctctgtaaagaggaggaaacagaatgctttgggagaggacacagcagtcctccaagacttttttttttttctgcaaggttgggttcttactgtaattgagctcataagcatacttactctgacttacatataccatttatacatccccttttgtcaaaaattcaaagagaaaaatgcttcaaatggaaaaatattaatatactgatttttaaaatttccttatatttaaaataattgtttttcataagataaacatttcattaaaataattgtttttcatacaagtttgttaccccaaatttagtgacaggggtcttcaagtttgacaagaatctttaaattttgtatattcgcttaataacctaaaaacatttaaaaccagtttaaaatataaaactcttacagtgctttaatttgcaattaaaaaaacattttcatggattaaaatttttattttttagtttcaaactatggaaatctaagcatagtttcagggtctaaaaatactgtttttctttaaaaatagatctttacattaatccattttgagaaacactgctttaccctcaactgtcagtatgttttagggcaatttaggcctgggtaaataaatattttttaaaagtatggaatctgaggcattcaggcaagttacatttatctttctaaaagacaaaggtcaattttggcatatgaactgacttcattgcccttcctcagtggggagttgtgtgatgggatcctctgtgatcatgtagaccagagaccacaaatgagtggtcgtaggcctggctggtctgggcctacgtggatttgaagggctggctgcagcctaagctgcagttcctgcggacatcctggtgcattcacaaggccttcacgcctcctgcttgtgtttggatgcgggacctgtcccagggcacacagagtatcatgacacccagattcctcttcatggaaaaaaataccaactcttaagattatgcttaaaagagacctttagttaagtttccagtgttaaccattgctctggttagagctttcactgagaggagacgagttcttgactttccacatgcctttcgcagagtttctgctctaataatctgccctcaccatggtaacctcaaatacagagaagtcatgtgggatctcagaggcctttagttttattgccaaggctgtcgccttttgattttctctgttctcattctcctctttgttggtctatgacatcctccctaccatagccagtgtgtgccctcagctgaccacaggaaagcaaaaaccaggcctcatgcctgaggagggtgtgctctcagttgtgatccaaagctcaacataaattatttcagttaatccataatccattgtcagcttgtccttttccctcttcctcaaaaataatggccaattaaggcataactctaattaaacacacacatacacacagaaataacgaattcaagttctatatccaaagtttaagtcattcaacaaaagctttaggagttcagacttactggacttggttgatctgaattaaaccttgaattagaaaaacaaatgatgtaatttaatttccaagaacagacaattcctagaactaggccaaccattattaatttatggagatctttggaagatatattttaatgagtagataggtggctgggcagtatttgagcatacttaaccatgatttaaccatttgtttgacatttatatgccttattaatttgcataggcaatacaatgtgaactttgacacttgatagatttttcaatttctgactaattaagcacttactaaaaatattttattgtatttcctgtcattgaaatgaacacttacctaaccaatttgcctttaaataagaaaatgagcatttccctaactcatgtaattgtttttttttaactttatctctcctgttctaaattattcactctgtgtttattatctacaagcaatattgtgttaaaggatttcattaagaccactgaaaaacttaaaatactatgtctctaaaattatgaagtttgtgcttttatgagttggcataaatggacaattttgaggaattttattccaatgccatatttaaatgttacagtatttctgaattatttttaaaaatcctgtagcatctcttttcagtgaaaagagtatggtttcaggaagggaagctaacattaggcatctccctttttcttttcccaacaaaaactttgcttattaaaaaatggaaattccagtttcatgaagtgtgtggcataaagagagaataargactctcatacctttttttaaaaagttcacaattggacagtttggctttatgagaaaataattattataaaaaatgaacatgtgtttttatcattgattcacttctaaaaaaaactataggtttgtggcccgtagttaaagtcagtgtcagttaaacaactggctgactcatttttttccacttactgcctatattttttagtcactcaagcaggttgtataggtattttcatagaagcatttaaatagtccaagggctgtaggtcagaccagaccagggactggcagcctagcagcagtgccgctccgacctgctcactaagggactgaaaggtgagcccagagcaggctgccatattgcttgggcttctgcaaggctgtatttaatgatatagcctcttctcaggcagaactattttatagacagccacatagagctgcagatgtcccactcagccatttaggtttggggaggtagctggatcggcaatattccaaatctacctgttgatgctgttctttcttcctaagatcataatgttttcttttacatttctacttaaccatataaatgacattatatacctctccttataaatctatatttccagtactgtattttttagtagtttctgcttgtcactgcyggcttttcaaagatactcaccccaagttcccatactgaacatagactcttgtcccaattatacaatgttctccacatgctgttaggaatgcagacaagccgaaacccaggctacaacactgagaaattacatcttggcatttgtatctcatttttaaaagcatattattaattttaataacaaaagaaggtggatagatggtttgtacttaccagaagtcttcatgtgatagtgcttctacagaaagaaatttttttgaaaagttaaggatattagtactgtcaattttttagtttttcattttgacagtaaaggttagttactactgcattaaatccctgtaactaaggttaaattttattttgattgtgttaatgttttctttaagctaattaattttgtcatcaaatggtgatttccaaacttatttaagtagaacttagatgacatcttatataaaaattgagcatgcacaaaacataagagcagtgctactcaggttggtttagggcttgagccagagcttctacacacacacttttcctcctaagcacctcacctcatcttcccacccttctccatttcctttctacccttacctatctaaaccccacttctataccatccccagcagtggcctctgcagatcacctagttctcagtgcactatggtttaaaaacgtctcccttgggacctgtttccaataaatattgggtctcttaggatggtttatgttttgtaacaacaaattaggaaaaaagtatattctatagggtacaaagaacagcagccctattccttactgaatctgtgcttctttgaatgtcaagcatactgaaagagttttcaaacaaaaccctttttacaataaccatatctgattttgaaacacttgatgatacacatctttagccaaaatttccagctatttaagatgatacctatctttagccataaatgrtaccataaagatgatgcccatctttaggcaagatttccagctatttaaattggatatcctagaaataccctcaaaaacaatcttcccatttctcttggagagatttttccaaaatgtgtattcagccatgccattgccctaactaaaaaccttcagtatcttactattgtatttggaataaaatttgagctcctccataaaatggctcatctaccactttagcttcatccctcacactctttgcctcttattttatggaacaagaaaccacttagagttcccttttcacacgctgacatttctcactcccatggctttgttttggtgttgcctctgcctataatgcccttctccacccacttttccccgtttgctggttaactataacccattatttaacatccatctgatttgggaagtcttccctgactgtctctccctctcccctcctatgcctgagatgggtgccctttatctcatgcataccatactgataattgcccagtgtttctctgtctccactactggacgtgaatgtgcgctccctaagggcagaggcattcatgattcctctttgtatcctcagtgcctggcatagagtaagcaactaattcatttctgttgactggctaaatgaatgaataggaaggaaaaaagttggcttttagatacgtaaaataggctgaaatgttctcaacataattttgacttagcataatgtctgtatgtcaatatatctactctcatgtgcctgtttgctttttaccatgtatactataaatactgtgttctattcctgttaaagatgttttctgcatttggtttttaggttaaagccattcacatccattctgacatgttctcagttcaaaatggcttgctgacaccaacactaaaagctaagagacctgagctgagagagtacttcaaaaaacaaatagaagagctttactcaatctccatgtgaagttcaaggaaagttcttctcagtgtaatgaactgtctagcaatattatagttattcttgaaagtaatgagtcaaaatgacacagctgaaaatgaataagcatctgattttatgactgagccttttcctgtcccaagaggtctttaacaatattttctctatcatcaatgagtatattttatttttattataaaaatgatattgtggtggactgctaaaaatatcacaaatggcaatgtaaaaatcaagacattttctcaagaactgtgtaccactaaaagtaatatattgtcaatgttcacagaactattaaacataaaggaaaaacataagtgatatattctacttaattatttgtgaatcagtaaccagatgcagcaaatatctaggcaatgtggactacctcattcagtaactgattgtcaaaatcacaattaaatcagacttcaaaaattaaagctaggtgtatagaatcatgctaaaagaaaacatgataactcatagtctacgtaacttcagagtctttaaacatgacaatccacattgtcatatgtgaaaattttctctctgatttttactttcattcatgaaaaatgaaaattcagaaattctttttttcctttttgttttgagacagggtctgctctgtcacctaggctggagtgcagtggcttaatcatggctcattgcagtctccatctcctgggctcgagtgatcctcctgtctcacctcccaagtagctgagactacagtacaggcacatgccaccacacctggctaatagaaattttttttttagagattttgctcaggctggtctcaaactcctgagctcaagggatcctcccgccttggcctccctaagtgctaggattacaggcatgagccattgttcccagccaaattcagatattattaaaacacatgtcatatttatatagtaacttacaaagacctttcaatacattttctcatttattaagctcattaaagtattcaggaactacctagaaaaaatataatgtaaaactattcaaggatagtgtgtgtatgttcatggacttcttattataatgaattctaaaagacatctgttgactctacaatgaatggatccttgaggaatacttgggagaagaaactcagagttatttctcagggtaggcagcaattaatgtacctacattccttgctggggtcttctagtcttccattcccaatgtgcccatgctatgcctggaaaccctatatggttgtaattctgaacaatttcactttttttccagtaagaatatcaaggcagaaggtgggaaggaggggacattatttccagggaaaatagtttttcaacaatataactttgataaacctctttaaaatgccccaagaaaactttttaagtccatagacaaagaaatactgcctaatggcataattacattcctaaaatctttaagygtgccgaagtttaaccactaaaacctcctttcttgcattatgtatttagatgcaccctgtattggggtgtcaacaatttcttataattaaaggccagataccatggacagcaattaagttccaagctatagattgtgcctctgaaaaaggcatggaccccaggaacgtgtttttcttctgtagagacaagactctaaaagcatatcaacaatccatatgcaattcatgtgttaatttaaaatgtatgtgctcagtgtttgtagtctagaagctcctttcccttggaggaatgccaagcagtttgcaaaaataaatgctgttagttaaaaaccacataatcacatgggcctactgaataaatatgcatcagtgattatatacttatatttcagtcttgtcaaaagtgaatcactgtttcatttgatgtatttacccagtctttttatccagtttttcttgggcatattctctctgaagacccactgttgcacttctaaatttgacagttaagaaatgagctagttctatacacactgatttttaaaggcgtttctgaataaactaatacttaaaatgtccaaagtcacatctgtacagcattagatttttatatttaatatatatttgactaattaaaagtgaaagttgttacctgaactggatattcatactattttaagggcaagttgcttacatttcaataacaacaaaaaaagaatctgtttcccattgtcctcctactcaactaaaattcatagttggctttaagcccaaaagaattttgaacaatgtgacagaaacaagtaatgtaaaacttattttgttttatttatactttataatagttagatataacagattatggacaacttaatatttcttctttttggctgggcgcggtggctcatgcctgtaatcccagcactttgggaggccgaggcgggcagatcacgaagtcaggagatcgagaccatcctggctaacacagtgaaaccccgtctctactaaaaaaatacaaaaaattagccgggcgttgtggcgggcgcctgtagtcccagctactcgggaggctgaggcaggagaatggcatgaacctgggaggcggagcttgcagtgagccgagatcccgccactgtactccagcctgggcaacagaacgagactccgtctcaaaaagaaagaaaaaaaaaaamcaaaaacaaggtttcttctttttgccacttaaaatatcttatatttctagatttccaggtctatgtggaaatcatcacacttgggccaataaatgggttagttcagatgtgctgagaaaagtaaatagtgtaccctaaatatcttgcatgtacatttatctatttctctgtttaatgccacttaattttgtaagaaatgagaaatgaaaccctatgtatcagtggaaaaatccttcttgcttcagatttcccaactttattctggaggagaaaaaaatctgtatttctcattaacagagatagaaaaaggtgatgtacttacgatggtcacattcatattgggcattggatctatttaagcctagaagtataacagataatcagttccttaagtgtaaatatgttcttaaatgtttggcctttttatctgttattcaaatgtattagtaattctcatattttgcaaacagatccttttgtgtatattataaaatatataccaaatctgtttttccttttgctgtggaagatgtctttatataatattgagacttcccttgcaaatgrgagacgggactctggtcaggtatagtgtgtaggcctagccccatgtattaggaactcataaactcagaaatccaaggattaaacattttatgtctccttcatttatgcaagtcatgctttcattctacatgtagttaaaactacaagtatgagaaaaaatagaactttccattggaattttttccaatcaggtaatgttttagcaacttgaaatcagcacttaatttgattgtattacctatcaaagaaccaataacctttcctttttctgcagtaaagaaaatgaaatatcctttattttccaaatgtatgaagcacaaatgcaatatagttatttaaaatataaaatactttaaaatgaatgtgaagaatgggaaaatatatttttgcatgaaaacagactacttacaaatgtgcttaatatctcaggaaaaaaagaatgaataacygtatataaaattggtaaactataaattggctgtatttccttgccggttttaattttaaggaagcatttacatgaaaagaaaaaaggatcctagtagtctgaatttcctctcaagtatgctagaaaatactttctatgaatttacaattaactgcaataagaagtgggttagcattcaagtaaggtcaataccccaaatgagaaactcttcagttagaacacattagtggttgtaacacagaggcagtagataaatatttgaaatgtgagcatttctaaacttggtaccaaatggaaagggtttcatgaggtgacagtggcttttaaacattcatttgaccgattattctaattttccttgttaaatcattgcaacagttgcatgggggagaatggatattttttgaagaattgcttattccactttcaatttttaaaaatcgaggggattaaaatattactttttaaatatgcataaaagtatcttaactgtaattacattttcagttgctttgttatagtagcatgcatattaaatataaaatgcatttatgaaaatttttgtaaaaaataaaagatttttcatttctcaaagttgcttataattactattttatatatttgcataatataataccctcatgtgagtatatttggtaattatcaatcacagttactgcttatgataaacatagtaccaagctgcattaccaatcagtatactttacatccgtactctacgtcctctgttaaagttccacaaactccaagaaattatggtccatccagagaagagctcctttgctcaagcctctgttggaatttttgctattgtcagatatctcctggatttaaatcatttttatgaatacataacaaataactgtcttcaaattttccatgatggtggcctttaaaatataatttccatgtcttttactcatattcagaataatggatacaatttcttaaaataatgaattctgctgtgtccaagatagacagattctgccttctccatatgtttgctatcatccattcctccctattgttacagctattagtgtagtttgtgccacccttatctcttgtctggaatattacagtgctttcttaactagccttcatgtttccattccagcatcctcaaatttcgccatccacatttcagccagggcaatctttctaaattgaaaatctagattgaaaatgccactttcctgcttaatagtccttcagtgacttcccatagtttccaggataaacttcaaactcgctggttcagcacacagggactagcatctcttctactccctcctctatggagcctcggctccaatcatattcattacttttgtagttccctaaaagcatcatactttcttgtgcctacctgcctttacacatatagtccctttctcctagaatgccctttcctctaattcccctaactccaaccattcatcttttaaaactcagattccagcatccttttctctgagaagcttcccacgtggttgattggttgatggtccttttgccccacccccacgtagactgagttgcttgaagttttatgcccagtgcggctctggctgatagcagatgctaaagaaatgttaaggaaaatccccttggtcctttttcttrtgttgcatagcattaagactgcaatacctgaaggtatatttcctctctcactgtaatttattccattcttgtcatccaagcaaaaataaactggtttgtggttggattcccatagttcacggatagcaccacaaagatgctcagtgggttactccataagaaaacatcattcaaaargatttactttgggctccagtgaatctcaaacccacaaactggctgttttcccaaaagatttattcagaaatctctttgacatttgttttcccatggaagttaatatcttcatgactgttccaagcctagtcaaatccaccatgtgttgaaatgaaatgctgattactgagttttgggtctaggtatggaagcagtgcaatggggaaatggaagaagtttgaacactcatgattaaacacttgcactggtgtttgcagatttggaagtggagtagggggagatagatgactgaatttgagatatctctgccctgtctcatcctttttaggagacacgtttctttccccctttataggttgactctaggtgaagtatcaaagagaccaagtctgtctctagttccttcacttccccttgccaccaaggaattcaagctcctctctttgctccccctacttttctcccagccatgtgttaggaagaatgggagtatgacaagcgcagcagccagatgccaggagaaccatgttccctatgccaatcatctgttttaaatagcttccctacactctggtttcctcagtggcaaaatgagggggcatctagatcatctctaaggacccttttggctaaagaaatcatatcaaagtttatttctggttttgaaacctgatacgttaattcccacaaacctatgggaattacttgatgacatatcagtgaatgtaattcagtatagtgagacagagttctagggaacaggaccaccaaatggcagaccagcttttggtttaacctattttcattttgcaatgtttcttccatttctgggcctaaggcaccccaggctctagacctcccaaatgtcatttaagaagtctgaatttttttcacaacagcccccaaagggagaggggggagcataaaggcctggcttgtaaactagagactgcctgccagcatattatggacacgactaaagaaagaatgttgaaagatgataattgctttatactgcagcaaggctgtgagatctttaactgaaggaccatttctrattcacttctgtatccccaggacctaccacagtgcttaatacagattaaggtgttcagtaaatattgattcaatgactcaaaacccgaggtaaaaccaggtaagaatgcctaccatctgttctttagaaagctagattttgatgattaattatctagtaaattgattatcataaatgtttctgtgagcagattttaaataaaatattcagtgattatattacaaaaatactgtggatatatatgtgcttatattcgcacatacaagactgaggtgttacagaaaaacctttaagcttttcatagttttatctcttcaaactgcattttaaatgttatgaaatatttccactttttagaataaaaagatggttattgttatgtgcataatatgctcatctgatgtcgccagatggttcaacctagggtatggagagaaagggaggtaattccaacatatctctaattgacagagcagaagagtttgctaccgagcagtcaatgggctcactgcctgatgaatgcagaggctaataccatggcactggcttttgggaaaagaaaagctttattgcaagtgggctggcaaggagacaggaggaaatgctcaaatctgtcttcctaagctggggtttggtttggtttttataagcatagggtaaagagatgtgatctgattggatcttgtaatgaggtgatgctgggaggcatgatctgactggatcctgctatgggatgaagccagagctcaacccggttggatcctgccatgccatatctacttcttaattcagtccctcctccttgatctgagcacttggtttcccctgtggctgcatgcttggttcatctaggcatgctcaggttacatgacctcagggttcatggcaactgaaaaacaactcacaattttgttacataaaagttgaaccaaggctgggcaaggtggctcacacctgtagtcccaagaatttaggaggccaaggcaggaagatcacgtgaggccaagagttcaagaccagctgggataacatagcaagaccccgtctctataaaaaaatttacaaatcagctgggcatggtggcatgtgcctgtagtcttagctactcgggagacagaggtgggaggatcacttgagcccagagtttgaggctgcagtgagctatgattgtaccactccactccagccagggtgacaagccagaccctgtcttaaaaaaaaaaaaaaaaaaaaaagaggagaaggggaaggggaaggggaagaaagaagaaagaagaaaggagaaaagaagaagaagaagaagaaacagatcggtctggtgcagcaacaagttgaggcccagggcacaaggaggagagcccctatggaatcttctaccttaaccacaaggatgcccagatgtctagagatggctcctggacacaggctaagggactgtttgtcgtccagaagcagcctcctagagcccgggatcttcagaggcttggttagcctcttaattaccatagcttcccagtcagttgcaggcccaggggactgaagttgattcctcagggagaagctccttgtcactttaaggtgcattcagtcctctttgtgaccttcctgcactgaggccaacccctcacaagactgcctgtgctggtggcctaaaactccattactaaggccttatgcagtgctgatagggagagcttgctcagaggaagtgttgggcccacccaaaggagggaacgcctttactcctgcatgcccagttgaattaagcatgcagccacaggcgaaacctaagtgctcagacggaggaggaggggctgaattaaacctttttctggacgaggaaaaagttttttccaaaaaactctcgtttcgctggagttgaaggaacctgcgccagaaggccagaaaccactgggcccctataggaaggctgggcggctgccgcgctcctccgttttcccagaagcctctgcgcggcctcacagagataaaagcgcgggagcgaggcccggcggctccagttctggggcttttgctttcgctcgattagttgctgtgaggctgctccgcgggcctcgcctggacgctgactccctgtgacttagccctgatcctcaggaaggcaggccatcgagagtccagaggcacccgtggcctgggggtagggtgggatagcaatgtggccgctacgggtctatacccgcaaaaagcgggagggtcagaggctcaatctcaccccgacgccagacctaggctctccagcgaaggcsgaggccccgccaggtacaggctcaaggctcgcccaccgtaagctcagccgagctgcctccgggacgggaccgagggcgggcgggggtgctaggcctcgggcccaggacccccccgaagccggtgggtaggtttcttgccctgaaacgtgccgccctctctcaggttcgaagagaaaaggcaaagtgcacggcttgtcgaagattgcagagaaagcagagcggagcaggcagggaggtagcggctctgggccgttcaggtatgtagcctccagtaacagcccgatcctagcttgccacctcagaaaacttcaagccgaattttctgctagtagccttttattctaacagtcaaggagcaaaacaaatacagtactctgattttgctcttctcagaacatggaccccaaaatttgacttcaggaagatttatttttaaaaaggggaaggcttgccaatttacgtaaaaggaagtgagataaattggtcggtgagctatacgattgtgtcactgcatttgggttttggtgcaagtcaccactctggtccttacttcttcctaaagatgtccctaaagagcctttcagattctaaagagtctgaacagagacgtggagagccaaatccagatggtgcaaactaattgcgttgtctctttgttagccctcgcttaggagttacaggagagaaaagcctgcaagaaaataggtctagtgaagacacccaggatgagaagattgcatcgttgcgtgtatgtatgcttctcttttagtccttggacacacttagtgtagagactatcagtacctgatgtacctccggatgaaagaataaaatgggctttgttctgtagatgttacatagctcaccagtatttttataaacacttacgtgtctttagacagggccttgaatttctgacttgggtagattcatagtcatgcatttttgtttttctctttctcttgacacgtttttggagaaacgtccataattggtgaattttctgtatgacaaatacaaaatgttacttaataactccttttttcatgttttccatttgattttccattaacaactggaaacattcattactaagggtttaatatgttacagagcattctaatgtttattcattagaatattttataacttcttgatgtgctgtatttaatatgaattctgtactatattttaaagttgtacagcactaatttagggaagctcagattttaaaaattgcttgtgactcatctgacattaacattaaacttcatagtcaagttccttttttttttttttttggagacagagtcttgctctgtcacccaggctggagtgcagtggcacagtcctggctcactgactgcagcttctgcctctcgggttcaagcgattctcctgccccaacctcctgagtagatgtgattacaggtgtataccaccacccagctaatttttgtatagagggggtttctccaggttggccaggctggtctcgaactcctgacctcaagtgatctgctcgccacggcctcccatagtgctgagattacaggcttgagccatcacacctggccaagttctatttttttttaacttaatattcctttataacatgtttttgggggaaggcagtttcaacacaagacatttttttaaaaggcttttatccatagtttaacagtgtaaagtagtccttgtagagtatttatactatgaaaaaatagtgttttgaaagtttcttaaaatttttatatatttctgttccttttctcctgtgctttaaaaaaaatgaccagttgtcttattgtatattcccatacattaaatagtcttcaaaaatatgactttcagtgtcttcatagtgctttgtcttgtagatagatacactgtaatttgtattactatttccctgtggttgggaaattgagattgtttccaaggttttgctgttattgatatccatagacattctgttacagaaggtttttgtgtacctcacattgttaccctaagataaatactttgcagtggatcacaggttggatcatgtttcaagtttttttattcatgttgataaatcagcaccatcttacctgaaacttttatatatatgtgtgtgtatatatatgaaatagatagatagatagatgaaaagtagcatgttttttacttttcatttctttgaatgctggggaagtcgatattttttttctcaaattattggccatttgtactgttttgtgaaatgtctattaaatattaaagatagctatacttttgtacatacatatataaccaatatttccatatttgtttacttgcctttaattttatttctagtattttagacttactagtcttttcttttgatttatatatttgcctctatagatggaaaaaaagcccctccccactagggaaccagaaaaatattcacctctatcttctatttgctgtcatcccacagtagttacttgactagcatattgttgattacaagatatgttcatagtattatattttaatatttatttttaggtttaatattaaatatcagattacatctgaacaataaactgaatgaatgtattatatatatgaaacatataaaaagttgatgttttcatttttctaaaataaatctgtacaagattataatatagaaatggtcaatctcataattttgctatagctttaattcttatttcacttaggaatcagttactgatgacctccaggttgatagtagttcatcaaatagtgaactagtatcaggtaagactgtcaaatgtgaactccctcagctttctgtttttcctccaaacataagcatccatctgtatctctccccatcttcctatctcagtggaagaggtatcttttccctactccaaagtgaatccttctgactgtgctatagatctcatccttaaagcctttaagcacatgccagtaaatgtgaaattacttgtgataagtactgtaaaagagattgacttgagtgtgattgagtttacctagagaaattagggaagacttccatgagggaatggtaattgaattaagatctgaaggagagtagaaattaactatgcagagatgagtaaagagaaattcaggcagagggaagctctaacatgggactgagcattatgtattgagtaactgaagaaggccagtatgactgcagtacagagagtaggaggatatgtgagtgtaagacaggattagacaaccagtttgaggccctgcatagccttgtagtccatataaaaaatattgatgtttatatttggagcagcaaaaagtcattgaagtcattttaatagagaatgatatgatcactttagctgcagtgtggaagaaggactggaaagaatcaggagtgcagttaagaggctgttcaagtagtttaggggagaaataatggcgccttctactagggtggtgacattggagatggaaaaaagggtgctgatgtgatgtgatggctattttaggtaatgagacaggatttggcaaatgaagagtgaaggagatggaggtgtcaaagatgactactgtttctggcttgtgtaactggatacaaggtagtgtcattcactgaaagaaaaactggtttgaagaaaagactagaaattcagtttttagtatattaagttatgagtgcatttaagatgactaagtagcaatatcaaccagatagttggatatgaaaggctggagatagaaatttgtgagccatctacatattggtataatcaaagttattttgaaaacaaggatgccacca

SEQ ID NO: 95142 - DNA, 18338 bp, Homo sapiens
tcggtctgaagatgaaacgagggcagaactcaagtcgcagatttgtatcatggataaacactgagtaccaagttagtaccaagaagtaggaaccacactggtgcctcccgctctcctccgcacgtgcacaaaccctcaactgcccctaggagttggtcatctggcttctctggggtaacagccacatcctccataaagggtcaggagccccagcctccagagactccagacagttttctcaaggacgcgaacataccctccccgacggcatcgtacccaccccttcccgggccctgtcaccttgactgcccgtcccatggctctcctcaccgcggccgctacctccagagcagtcgagtagccccgcctctcagcaaccaatcaaagactgaactgtttccagccccctgtagtcgcgttactaatgcgccacaacgaatcactaggcagcatctcccttttagccccgccctcctccaaaggacggaggaggcgtttgctaaacgggcgtttgctaaaggcgtttgctaaacggatgggaactggtaaaatcgcgaggagccgcagagcccaattactggccagaagagaacggaaatcacctggacgccatgttagttaggggcacmgtcacttccggcgcagggatcgtctgctaggcggactaggtttgtatatagtggatggcgtcggcacccgcgttttgttacctcctgtttagggtataggatcgtctgtaaaagaacctttattttaacgtttcccagttgcgactatctctttggaaatgtgcataaataaaarccaagtcctaacagctgcagcgggcattgattggaacactgactcctaaaaattttatgcgtatattctctcatttatttccatagaaggtgaggttaaattactcgctgaagttcgcacatttagtaaatggagatctgggatgcaaatccgctatgcctgaccgtaaagcctagttttaccctttacattttgcctattcagctctctctactccttggttttgctgataaagaggtcagaaatgggtaattaatcagcagcatcataattagaaacaatcataagtatttaagtgcgtttcaacttatgaccttgcaagcatcaagaaaaaactctgtagtcacgttactaacgcgccacaaccttttcctattgttcctattgcataattgttctccttccctacccgtgtagcctttcaggttaacttttaggtaaaattgacttcttattaaaaatgaaagatctggaccaatggatttccaaggcccttttctttctctgtgatctatgttattctaaggaattattgcaagtcattctgagaataacaagataatcgattttttaaaattaagatgcattcgatttgcagaacatttaacgtaatgaagcgattaaaccaagtatactggatattgtcttttatctgagaaacaataaactagatgatcttggaccttgcattgtgttttctgaatgctgacggtgatttaaaagataccccgtccccgctcccccattttcagtgtagactcatagtgcagcttcctgaaaattcataacttattgtgatgatttcttgctagctactgtcctgaattcagttaaccaaagtccctcatctgctgatactttaaaacagttctataatgacagaatcagttcagttctgtggctcctcttttcttaaataaatctgcatgtctcctttaactgttccacatatgaggtgggctcttcactattctagttgttctgggaacatggcctggtttgtcttgtcaccccaaaataatcaaaaggctaaggatccagttaaaaaggtttattcaactgtaaagtgtaagggcagtcatatgggaacatgtagacaccaaagaatgctgatcagtgcttccagcgtaaggaaaattgaagatggtttatataagacaaaatggagatgccaaacagaattacaacattttccaaacaatggataacatccagatttaagatctgattggctagtattgattacactctaaggtggttgcttaatattctatcgtaaaaaagtaacaatcacaagggtctacagctctaatattatgtagtccaggtttgaaacgaagaatagggagtctgattaatgtataacatctcaacacaaaggtcgggaagcaacaatagtcatgcaccagagaagaaaaacagctgtattacatgactcagttttcaaggcttaactttgcccccttggcttaataaatttggaaggttctgaaatttcattgtctttttaaagtttgcatctcaaagtataagtcgcagaactgaacaggaaattccagcatgttcatcatgtaagttcacagagctatgtagtaggcagaataatggcctccagaagataactgttgagattccggaacctctgactatgttatatatgacaagaggctttgaagatgtcattaaattaagtattttgagatgggaagattatcctggattgtgtgctggactcagtgtaatcacaaggatccttataagtgaaagaaggaagcagagtcagggagaagtttgaagatgttctgctgctggctttgaagatggaggaagatggaggaaggggccacaaaccaagcaagcctcctctagaaattggaaacggtgaggaaatgatttcttccctagagcatccagaaggaatgcacccttgccaacacttgattttagctcagtgaaactcaatttggacttctgacttacaaaatgctacctgtttttggctccttccattttcttttccttttttttttttttttttttttttttttttgagaaggagtctcctactgtcgcccaggctggagtgcagtggcatgatctcagctcactgcaagctccgcctccctgatctcagctcactgcaagctccgcctcccgtgttcacgccgttctcctgcctcggcctcctgattatctgggactacaggcgcctgccaccacgcccagcgaattttttatatttttagtaaagacggggtttgaccatgttagccaggatggtctcaatctcctgacctcgtgatccgcctgccttggcctcccaaagtgctgggattacaggcgtgagccaccgcacctggcccaactccttccattttcaaagccaataatggagcttttttttttttttcgagacagagtcttaccctgttgccaaggctgcaatggcatgatctcggctcactgcaacctccgcctcacaggttcaaacgattctcctgcctcagcctcccgagtagctgggattacaggctcctgccaccatgcccaactatttttggtatttttagtagagacagggtttcaccatgttggccaggctggtctcaaacgcctgacctcatgatagcccacctcggcctcccaaagtgctgggattacagtcgtgagtcaccacacccggccgagcattttcaaatctcagactctcacctctgcctctgtggtcacatctccttctcttactctcactcttctgtgtctctctttcacttacaagggctgttgtgattactttgggcccacctagataatgcaggaacctccctattccaagatccttaacttaatcacatctacaaaatcccacttaccatgtaaagtaacatattcacaggctccagggattaggacatgggcatcttctgcctagcacactgagttcgcgtgatgccagtcaataaggttgaaatggaaagaaatgaggtagaagcagcagcaatgggcctgatcacacagggccctataagccaaggtaaggatgttggattttattctgtgatgttatacactagcatattaccagcaggagagtgacattatgatttatattttataaagatcattttgggtgctgtgtggcaaattaactacaatggaagcagataggttatccaactaggagcctttcaaagtactccaggaaagagatgttagtagcttggattagagtagtggagatagaggagataagtgattagatccttggtgatgtgtgttgaaagtacagagagaaggtttaaggatgatttcaaggctttttggctggagtgactgggtgaatggtggtacagcagatacagaatcctgcaaaaggaggttttggtttgtttgttgtggagggagtcaaaataaaattgcagtgcctggtagccatctaagtggaggtggtcaataggctgtaatgtatgtcacagaccagtctggaattaagggaagaggtaggtcaagagacaaatacttgagagtcactactctatagatggtaaagccttcagatggaatgaaagctgaccatgttatttattatccaaaccagcacacatttttttattttgacaatttcagacacataaaagttgcaagaataatacatagaatttgcatatgcctttcagtcagattctccaaatgttaacattttattgtaattgctttatccttttctatttctctaattacctatagacagacactttttctctgaactatttgaaagtaagttgcggacatgatacccatagccttaaatacttcagtgggtttttcctacaaagacattcccttgtatcagtagttcttaaagtatggttcccgggccagcagcaactgtatcacctggaaagttagaaacctaacttgtagggccccaccccagatcaactgattttgacaatttttctgtggttatgaaaggaaattaacatgacttcaaaactattatctaatttataggcattatttagattttacgaattgtcccagtaatgtctttgatagcaaaagtaccaaatggacacttttgagattaaaggcaaccacattcaataattttgccaagacaagggtagtaatgtaatcataaaaggcagctgagctcacatctgtaatcccagcactttgggaggctgaggcgggtggaacacctgaggtcagaagtttgagaacagcctggccagcatggggaaaccctgtctctactaaaaatacaaaaattagccaggtgtggtggtgcgcgcctgtagtcctagctacttgggaggctgaggcatgagaatcactcgaactcgggaggcagaggttgcaatgagccgagattgtgccactgcagtcgagcctgggcgacagagcaagaatctatctaaaaaaaaaaaaggcattgaggaggtatactttttcttaatacgtacacttagaggtctggtatgataactgtaattgtctataggattttataaatggatgtccttagtgaccttgacaagagggaaatggactcaaaaatgaaagataagaaagcagacatggtatgtagaaaacttctttataaaacgagcaaagatacggagggggatgtgggattaaggaaggtttttttttttaaagtgggtcattttattaatacattatgttgattgctgctgggaaaaattctttgcagagcagtctagggaggtttacaaactactgatgcctggggctcatctccaaagattcttatttaatggatctgggctgcagccaggttcacggggatttttaaaagctccccaagtgatcttaatgtgtagtcaagattgagaaccactggtagagagagaaaaaaactctgttgaagagaggacttaaaatctgctgcagcagcaagaccttaaataatctaagtgctaagttgcagccagcaccacttaaattatcaaatcttgtcagttacagtatccaactttccctacaagcatccataggcagacgaagggtttataccagtaactgcattccccaggagacaagaaaggaggatagaaaaacgacttaggaatctccttggagctcaagaccaggaacttccccaagccggaggtccctgaggcgctctagcgcgctggccgcactcgcagcccaggtcgccagtgcgcacgcgcaagattaggtggggcgccagagccggggcacctgcgcaggcttggctgcgccctctcgcgccgcacgctctgcgggttcctcccttcttccgagcctctcctctggccgccgcgcgggagagaggccgagatggcagatgagattgccaaggctcaggtcgctcggcctggtggcgacacgatcttygggaagatcatccgcaaggaaataccagccaaaatcatttttgaggatgaccgggtaggtactgggcaccacctctctcgcctgctgaggkgggtatcgtccgcggatcctcgggtttctcgcggagggagaggaggggtcgcgagtgtagcggcgacgggaggggacctggctgccctggtccagcgggcccccagccagcggacagggcccgggcactccgaggcggcctgccggcgcgtgccggcgctccggttactcgttatctgccccgggcgcggrccaggccgccgggcgccctgagtgccgcaccgcggggcctgggcgcgtgtcggggcgcactggggcccccgcgtggaagcccgccggttccccggctgcctcggaccttgcstgtatcaggaatctcgaaatctcgccagcgctctgcctgacagagagaaacccgatcgcgccctgactcaggcccaatctccgcgatctcccgcgcacagccggcctgccagggcccggcgttcctgggcgctgctcagcaaggcattgtgctcgagggccccaggggcgctgggaggtgcgcgggccgtctgggcctgccggcttcctccgcggggtgcggcttgccaccctcacccctacccctatccctatctccaccccaaggcctaccctgggctagcgaggcgatctcctgagataagaagtgggcccgcgtctgggatttgctttccgttgacctctcccgctgaacattttggacttacaaacagctgaatgattctttttgtattcaacaggaagtaattttatgccaagagactaagactgtagtttttgttgacttcttgtaggtgaaatcccagttgatgtgactttgagatatcttgtgtaaattatttagtggccagttgtatttttgggattggatctcagataaagctgggcagattggctgatttagatagaacaaattttgtaaacagttttgttaaatttaggaaatataaaatctaagaaaaacatttattctactaatgtcggttagattcaaaacgttatcaaaaatttaattaggttcctctaggtaaattaaaaaaaaaaatactttgtctctactcaggggaaattctttggttttagaaaaaatatttctttttaaagttcgcagttgcctttgagaaatggttcttgaaaaatttacatttgaaccaccgaagtccaactgtagaacggcaggaagcattctaaatgaatcagcattttgtagggagtacccagtagaattactcctgagacaaataagtgtggatgggttttattaaaacagctttcacttcagcagtgagcaagagattcgaaaatattcatgtcatatgtgtatttacagacactgttttaaataattagtctaaatgctaaagaatatcatatatatactcttcagctttacacaaaaggataggtatatttcttaaatagttgagtaaagtgagaatagatattaatcaagtatcagacaaatatgtagttacaaaactgattgctatcataaagaaaaaaaaaaaaccaggaaattgcacaactaggactctgacctgggagtaatgggacggggagggcaatcagaggtttttttctgttttttcttttttctcccagaaatcatgtatgtgctgggaatggaatggcggaatgactagcagtttaaattagacggaagttggggtttggagggggagaggatcattgaaaaagctctgagggcagagagctcagaaggccagttccatgtgaagacctgcaggagatctggagaggcaggcaaggattagcatggccaatttttatgcattcattggctcccagtttaaatgtcactgcctcagagttgttcttaaacacttaatctaaatcaggcttttcctgtaatgatcattcatatttttcctttgtaacatgtatgacctttggtgattatacttttaaagttggtcttcccataagacttccatggagtccgggtgcagtagctcacgcctgtaatcccagcactctgggaggccgaggcaggtggatcacctgaggtcaggagttcgagaccagcctggacaacatggtgaaaccccgtctctacaaaaacacaaaaattagctgggcatgatggcacgtgcctgtaatcccagctacttgggaggccgaggcaagagaatcacttgaacccaggaggcggaggttgcagtgagctgagatcatgccattgcactacagcctgggtgacagagtgagattccatctcaaaaaaaaaaagacttccatggaaaggaccacggcaccattcgtaatgtgtacacttctgttttcttagcatctagtgccctccatgtagttactgctcagtaaatacttgttgaaataagttttatcctaccaatatactaaaagtttgatttatttatttatttctcttttccctagtgccttgctttccatgacatttcycctcaagcaccaacacattttctggtgatacccaagaaacatatatcccagatttctgtggcagaagatgatgatgaaagtgtaagtacatttctaacatgatttattttcttgctttttaaattgtgagattaattttgtccttaaagtgctgtcacattttcatcttcctaaggtcattactaaggaaaaaccagaaaaaccattaggacttcaactgcccagctgttttccaaagttactgcatcattttgtatcccaccagcaatgaatgagcgttccagcttctccgtatccttatcaacacttgctattaccttttttttttttttttgagacagagtcttgctctgtcgcccaggctgcagtgcagtggcactcggctcactgcaagctccacctccctggttcacaccattctcctgcctcagcctcccgagtagtgggacaacaggcgcccgccaccaaggctggctaattttttgtatttttagtagagacggctttcaccatgttagtcaggatagtttcgatttcctgacctcgtgatccgcccgcctcggcctcccaaagtgctgggattacacgcgtgagccaccgttcctggcctattatattcttaaagtaagctagagaaaaggttattaagaaaatcataaggaagagaaaatatatttactatttattaagtcgagtgaatcataaaggtcttcatccctgtcatcttcatgttgagtaggctgaggaagacgaggggttggtctagctgtagctgtctcaggggtggcagaggcagaagaaaatttgcatatgagtagacctgcacgggtcaaacccatgttgtgcaagggtcagttgtatttacttggggatacctttttaaagtgagacattatttctgaaacttagaaacttcarggcattaatttttaattcaatatatttgtacaaatcacagagttcaaagattagagcgagtacttaatggtaaaataccgtcttatatgcaataacattaaaccctcagaatacatttttttcttttttttttttttttgagacggagtttcgttcttgttgcccaggctggagtgcaatggcacgatctcggctcaccgcaacctctgcctccygggtacaagcgattcccctgccctcctgagtagctgggattacaggcatgccatcacgcctggcttatttgtatttttagtagagatggggtttctccatgttggtcaggttagtctcgaactcccaacctcacgtgatccacccrcctcagccttccaaagtgctgggattacaggtgtcagccaccacgcccagccccagaatacaaatttttaacatttagtataattagacagtcatggcattttaaggtcagagcttcttactcaaatgcagctcttttctgtaaggacaataaaatgttaatttttactcagttaacattctaaattagtgttttaaggtcatctcttttacttagaagacagttgttggccaggaaacgtttactgaaccagctttaaaaccgtgctaattcataattaaatgttgtgaccaatataggtatctgctgtacaaaattttatatagatgctcatcaacttaagatgggcttacatgctgataaacccatcataagttgaaaatattgtatgtctgttgaaaatgcgtgtaagacacctaacttactgaacattatagcctagcctagtctaacttaagcttgctcggaacacttaacgttaacctacagttgggcaaaatcatctaatacagagcctattctgtaacagagtgttgaatatctcatgtaagagtattttactgcatatcaccagtctggaaaaggatcagaattcgaagtatggtttctcctgaatgcatatcgccacaccattgtaaagttgaaaaatcataatttccccaacttacaatttttgtccattgtccatctgtacaatggaccttactgcatgagtaaggtaagcagagtccactgtcctggggcttaataaggtaatgggaatagaaatgtaagactctctcccttccctcttttcttgccaaaggaattaaaggagttccctttcctgagagctttttagaatgttgaagttaaccctcccaacttttttctctcataatgggaaagcataagcagtgaaatgggagttaaagttcttttctcttgscaaccttctcccctttaacttttattagggaagaaagctggcaacatacaaatagactccatgtgtaaatagagacaaattgactgtagatagaaccaaaaaacaaacaggatgacacagagcragactaggtatttgccacaggatcctgcaagtcccgacaatgcaatagatctggtagtgttcaaaggaaaatccataatggtcataaggaagtcataaagaaagcaagatgtcttgctttattaagaaaacttaaaacagcacttggaatataattaagttttttttttggttgggcatagtgccttgtgcctgtaatcccagcactttggaagttaaggtgggcagattgcccaagcgcaggagttcgagaccagcctggacaacattggagaagccccatctcaacaaaaaaatacaaaaattagccgggtgtggtggcatgtgcttgtagtcccagctccttgggtgggtgaggcaggaggatcacttcaacctgggaggtcgaggctgcagtgagctgagatcgtgccactgcactccagtctgagtgacagagcaagaccccatctcttaaaaaaaaaagtttaattgaacagcagattttatttctaatttgtttcttgaaattagtaatgataaatacctaatcttaatgagtctccagttgtagattatgctctgttgggattaagagtttccaaatatttgctcaaagggktgtgtttcaatgagagttttaagatttgatatttcagcttgacagtttgttatttaatggcaagaagtaataaattgcctgtgcctaagaaactttttttccttttccagcttcttggacacttaatgattgttggcaagaaatgtgctgctgatctgggcctgaataagggttatcgaatggtggtgaatgaaggttcagatggtrgacagtctgtctatcacgttcatctccatgttcttggaggtcggcaaatgcattggcctcctggttaagcacgttttggggataattttctcttctttaggcaatgattaagttaggcaatttccagtatgttaagtaacacacttatttttgcctgtgtatggagagattcaagaaataattttaaaaccgcatacataataaaagacattgttgcatggcttatagtctctctgagtgttgcgtttgatttgttattttaaaaacatatttgttggaatatgtgaaggtgggtttataattttggatgtttcttgctttttcttcccaaggaggactcaacatatgaacatcgcattgttttaatggtgttactagtctttgaagacaaataatgagagtttataaatttagctttaacttcgaaatatctttccaggctaaaataggtccaacttagatttttaagctaattctcacattttctaagaacataggaaattgaccattttgggtttagaaacagtgctttatgttcagcccacattgcccctggactctgggcgtaatttggaagggatgaaagtaggtttgtcacacaatctttgatgaccatgtaaagccatacattggtatttccttgctgtttaaaccccatctgaatattataaagacttgaaaacattttacctagaattcatttttccaattgaaaccccactgttctaaatgtgtatgcacacattaataaacgtatttaagttgtgcacgaatctggctacgtcatatagagtaggaaagggaacttgtcagggtctgggttttcatgtagaccgacaaccaaccttttgtttttagtctcaccatgtaccctggcctttctaaggttctgtttttttaaattttttttttttttgagacagtgtctcgctgttttgcccaggctgcagtgcagtggtgcgatctcagctcaatgcaatctccacctcccaggttcaagtgattctgcctcacccagcctcccgagtagctgggattactggcgtgtgccaccatgcccggctaatttttgtatttttggtagagatggggtttcactatgttggctaggctggtctcgaactcctgagctcaggtgatccgcctgccttggcctcccaaagtgctgagattaacaggtgtgagccaccactcccggcctctaaggttctatttaatacaaggttaatagctttgcttctttgctttcctttgtgtaggcactttccagcttccaaaatttaataatttttttttgtttcttctctcattctcttcatacttacaggttttttccttttttttttttttgtgagatagtcatcctgtcatccaagctggaatacagtggcacgatcttggctcactgcaatttctgcctcccaggttcaagcaattctgccttggcctcccaagtagctgggactacaggcgcacaccaccatgcctagctaatttttgtatttttagtagagatggggtttcaccatgttggccaggctggtctcgaactcctgacctcaggtgatcacccaccttggcctcccaaagttctgggattacaggtgtgattacaggtgtgagccactgtgcccatccttccatttttaatctctaaaaagattgctgtagggttttgacacatttaattgagttgtttttcttaaaattttatttcctgttagtgattttttaaaatagtttttttttttttttttggaggtggggagaggagggaaattggctttttatgtgcaacacataattttttcccaatttgtcatttgtctccttactttgtttatggtgtttaaaatgtttatatggttaatacatccatcttaaatttatttcataagcctttcccaccctaagaggattttaaaatattattctttttttcctagtactttttttttgaggctgagtctcgctcttgttgcccaggctggagtgcaatggtgcagtctcaactcactgtgacctctgcctcccaggttcaagcagttctcctgcctcagcctcctgagtagctgggattacaggcatgtgccaccattttgtatttttagtagagacggggtttctccttgttcgtcaggctggtttcgaactcctgacctcaggtgatccacccgcctcggcctcccaaaatgttgggattacaggcgtgagccactgcgcccggcctttcctagtacttttatgactttttattttatgttgagggaaggtgtagggaggagttttggagggatttgtgccacagtaaagaatgaaataatgagatgcatttgtattatgtataagagggttggctgggcttttatcatgcatattgtctttcccactgatttagttaagctggtgttaataaatcagatagacaaccaccaagttgtcttgctggttctgtctgtgacctctctgcccaaaactgtcttgtggcatatattcaccaaacctcatgtggtagccagtctccaggatagcccacaaggatcttcacttctggtatttgcacccttgtgtttctcatcgaatctgaactggtccgtaataaacagtatggtacaaatgatagtgtgatttctgaggctgcatcacaaaaggcattatgacttacactgtagtctcttggattgctcactgctattgactgaatatttatgtttcccaaaattcgtatgttgaaattctaacctccaatgtgatggtattaggaggtggggtctttgttaggagattaaatgatgaggccagagcttttataagtgggatgagtgcccttatgaaagagactttggagagctcctgcccctttcaccatgtgggaacccaatgagaataaagtccttacaaaccaggaagtgggctcaccagatactgaatctgccagtgccttgatcttagacttcccatcctctagaactgtgagaaataaattgctgttgtttatgagccacccaagtctatagtattctttttttttcccccgaaacagggtttttcttactctgtcacccaggctggagtgcagtgccatgatcatggctccctgcagcctcgacctccctgggctcaggtgatcctcccacctgagtacctggaactacaggttcataccatcacactgggtaatttttgtgttttttgtagagatgggttttcaccatgttgcccaggctgctatggtattctttcctagcagccagaacagactaagttacttgggaaagccagctgctatggccagggaccctcaagcagcccactggaaaggcgttatgttgagaggaactcaggcctgccaacagccagcaatatgtcagctatgcaaataaaccatcttggaagcagaccctccccagccccagttgagccttcaagatgactgcagtcctgattagcatctgactgcaacctcatgagaaagaccccacagtacaaacacctgtcgaatctcccaaattcctgatccacagaaatggagtgataataaagtcaccaagttttggggtaatttgtaacagcaatgctaaccaaaataccctgttgtcttaatttttttttcttttttagcatacagctagactgcatttccctgcatcctttcagctgtgtggggccatatacctattgtctggttaatgaaatgtgtgaggaactgatgtatgtcatttccaagaccctgaaatatctcccatgcactcttctttgctttttcttttctttagttgacaagatgcagaaaggattcaacagaggagattgagatgtttgatggaatgagcttgagtctccaaatgactgcatcggggagtatttgccacactcctgacccacattgaattttatttgttaagccactgagatttcagggtttgggtaataatacttaggagtatttattgtaattaatacaagacctatgattcaggagtgatgaaacttctttatatgaggtggcttgggattttaacaatcatagcagcctatttgattgttctgctcttagaaatagctcagaggttgagattgcctgggtaaagaggggttagaacttggagataacaattgggcttttaagtagagtgtaagccagttcctgtggggaccatagcaccactttttttttttttttgagccagagtctctgctgcccaggctggagtgcagtgatgtgattttggctcactgcaacctctgcctcccaggttcaggtgattcttgtggctcagcttcccaagtagctgaggttacaggcatgcaccaccactcccagctaattttttttttttttttttttcatttttagtagagacagggtttcaccatgttggccaggctagtctcaaactcctgacctcaggtgatctgctcacctcggcctcccaaagtgctgggattacaggtgtgggccatgcacccagccaataccacatcttgattgaactgatctgaggaggctatgtgagaattgactcttatctttaatattaaatgttatattttagaactgaagtgataagttcaggtcatttgaggaacttagtttatcattgaaataatttccttgagtaagccactgagaaaatcagagtgatctttaatctttattttaatatatgtgtattcttgccaggtgtgggctcacgcctgtaacctcaacagtttgggagaccaaggtgggaagatcacttgagcccaggagttcaagaccagcctgggcaacatgactaaacctcgtctctacaaaaaatagaaaaaaaaattagctggtatggtggcgtgcacctgtagttccagctgcttgggaggctgaggtgctgggagactgaggtgggaggactgctttagcctgggaggcagaggttgcactgagccaagatcatgccactgcactccaacctgcgtggtagagcgagaccctgtctaccaaaaaaaaaaaaaaagcgtatttttcatttatgtaggttagaattagcctacataataacaaaaacaaaaaaagcagatttagatgggataataaggcttatttttttctttctagttatagaaccccctaaggtggcaatccagggctcttttttttttttttttttttttttgagacggagtctcgctctgtcgcccaggctggagtgcagtggtgcgatctcggctcactgcaagctccgcctcccgggttcacgccattctcctgcctcagcctcccgagtagctgggactacaggcgcccgccaccacgcccggctaattttttgtatttttagtagagacggggtttcaccgtgttagccaggatggtctcgatctcctgacctcgtgatccgcccgcctcggcctcccaaagtgctgggactacaggcgtgagccaccgcgcccggcccagggctcttttgtcaccttcgtgtatcagcaagaattcaggctcctatctttcttctctaccatcctttatatcctcaaggtcacttcatgatgcatggattgatgcagctccagctctcagattcccccatcaaaaagaaagagagggaagcaaaatggcaaaaagtcatgtcagcattatggcccttttaaaaagagcttttacggaggtccttcaagaccttctgcttaggtattattggtcatcccaagatataagacgggttgggtatcttgctgcccagaattaaactagaaaggaataaatctagagttgatactgacaggtaggtcacagtatatcccccatcactgatagccagtgttcgtgactggaaaagcagccaggcattcttagaccttgccaaggtgctgaaaggactgattaggtagttgcaatttggctatatttactcgtttctccaacactgagtcaagaccaggaggcattttgttgaccatcccctatttctgtgaatagtgggtgcaactgtaattccaagcaaagctccttctttgctgcactcatttctggtgctttatcatactgattacattttttttctatttacattatggcttgcaaaataataagtaaattttcaaaagccttcctcactctttttcatttttttttgagacacggtctcactctgttacccgggctggagtgcaatggcacaatgacctttcactgcagccttgacctcccgggctcaagtaatcctcctacctcagcctcctgagtagcttcacctggctgtttttctattttttatggagatgggattttgctttgttgctcaggctggtctccaactaccggactcaagtgatcctcccccctcagccttccaaagtgctgggattacaggcgtgaaccaccatgcctggtcaaaagctctttagttaaagagaacaaaagttggttaagtccttctctttcaaatatgtattgcaaatatgtcaacaacttattcaaagtctgcatatcagccttttcattcaaccgtaaagcaaactgagagcactggctg

SEQ ID NO: 95143 - DNA, 61330 bp, Homo sapiens
ttgtctttgactccttgattccactctcccctcacagctcctcttcagcagcaaatcctctgacccccagcttcagtgtgtgtatattttcttttctctttttaccgccttcaccagcccacccaagccaccaggcatggactgttgcagaagcctcataaaattgtcctttttttgtattggcttcttgctcagcagccagataagtctttttaaaatataaatcagattattttactaccctcccttccagtgcttctctcacattagaaggaaattcagcctccttgtcatggcctgcagaactattatacagtgtaacccctgtcccctcattcacctaatttcacagcagtcttccccatacccatttcaccccagtgacactggccttgatccctaggcacaccaaatatgagggcctttgcactcaccctttgtccatttccctagatatcctcctcctctccaatgtctgctcaaatgttacctcttcaaagaaacctttcttgctagcctgccaaaatagtagccttctgctcttgctgtcaccctgccttgtatttcttcgtaatgtttaacatggcccagcagtatattctttatttaagtggttagtttgtctctcttatggaatataagctctgtgagggtagagactttgccccggagctacagtggtacctggcacatagcaggatcaaatatatgttgaatggttaaattttcctattatgtggcagagatttaactgtcgtgccaattcacagggctcactatataaatattacagaggtcatgtattggggttgtgtcttctcaaaaaccgttttcctgtgaaggtagatcagtctgtgattattgaggggtagggaggtgtaagaacagctactcagatcagggtccagagttgcttttctagtggtgggacatgtctgtgtgctccttgggatcagtgtaaagtaaaacgacccaggcaaggaatctgcttcaggactttggaacacactgtgaagctaactgatctaaacttgaattacctatttatttatttatttatttatttatcttttgagagagtcttgctctgttgcccagactggagtgcagtagcatgatctcagctcgccgcaacttccgccttctgggtttaaatgattctcttatctcagcctccagagtagctgggattacaggtgcccgccaccactcccagctaatttttgtatttttagtagagatggtgtttcaccatgttggccaggctggtctcaaactcctgacctcaggtgatccacccacctcagcctcccaaagtgctgggattacaggcatgagctactgcgctcagcctggattaccttttaaaatttggcttaccacctgaactaatttgctacagaaaactagagagcttatactgtgctgatgagatatgatgcttcctatgaaggtatgttaacacatagagtgagtgcttgaaagtgtccaatctaacttcaggggtagatttgaaagggcaattttttaaaaagtgtccagtcccccttagtggcttcagtgtttatactgtggagccttgccagacttcttaggatcaaatcacagtttcctgagttcctttctatgggcttggctaggagctcttctcatttgtggacagttttgactaacctgtaattatatcgtgggcttaaaatctgtcatcaagattttaagccagatggcatgttctacctttttttttattagctcagagtgaaaaatttttcagatgaattttcatagattcttctcctaactctatgaaatggtggtatatgaaaaagttcagtggtcagtaattaaaaattgctgaatgatattaagtatgaaacagacttccaattaattagaagattttgcagagttgtttaaccttaaaattcaagcattacttccttttttgaagttgtatttacaagcatttgatgtaatatatttaagtatttcttaattttccacaaggggtttatggtatgaaaaggtcagcatcctactaggaacagggtttagcagagcactgatagtgatttttaaagtgtggtccttttcctaggagtttctagttgggaaatgaaagaaaatgttgatagcaaacactcggaagaagggtcaagtcttgtatatctggacattggtataatactgcttgaaacctgaggacaaatatttgtgtttcacaggatcatgttctaattgagctcacccaggctggattgaaaggctccacagagggaagtgagagctatgaagaagatccctacttggtagttaaccctaactacttgctcgaagattgagatagtgaaagtaactgaccagagctgaggaactgtggcacagcacctcgtggcctggagcctggctggagctctgctagggacagaagtgtttctggaagtgatgcttccaggatttgttttcagaaacaagaattgagttgatggtcctatgtgtcacattcatcacaggtttcataccaacacaggcttcagcacttcctttggtgtgtttcctgtcccagtgaagttggaaccaaataatgtgtagtctctataaccaatacctttgttttcatgtgtaagaaaaggcccattacttttaaggtatgtgctgtcctattgagcaaataactttttttcaattgccagctactgcttttattcatcaaaataaaataacttgttctgaagttgtctattggatttctttctactgtaccctgattattacttccatctacttctgaatgtgagactttccctttttgcttaacctggagtgaagaggtagaactgtggtattatggatgaggtttctatgagaaggagtcattagagaactcatatgaaagctagaggccttagagatgactttccaaggttaattccagttgtttttttttttttttaagtttataaaagtttattatacttttttaaaattactctttagtaatttattttacttctgtgtcctaagggtaatttctcaggattgttttcaaattgcttttttaggggaaataggtcatttgctatattacaagcaatccccaaattttatggtcttccaggaaaagttattaccgtttatgatactaacagttcctgagacttagctatgatcagtatgttcatgaggtggagcagttcctgtgttgcagcttttaacaacagatggcattcattaaatcacaaagtatgttaaaggtcacaaaagcaaaataactgtctgaggctaaggcccacgtgggacagtctaatacccatgagtactcaacttgccttgatgtctgagctttccagtgcaatgtgaatttgagcagccagaaatctattagtagaaagcaagacagattaatataggttaaaacaatgatttaaatatgtttctcccaataattatctctttccctggaatcaacttgtatgaaaccttgtcaaaatgtactccacaagtatgtacaattaagtattttaaaaataaatggcaaacattaaaaacaagagtgaatactcaagtagatttgtcatgggatttttataagaagactggtatcaggtaatgtatctttaaagactaggctgctctgctgacgtagtaaccattttttattcctttactttcctaatagccttgctttcacttaagaaaaaaaaaggctaggcacggtggctcacgcctgtaatcccagcactttgggaggccaaggtgagtagatcacctgaggtcaggagttcgagacaagcctggccaacgtggagaaaacctgtctctactaaaagtacaaaaattagccaggcatggtggtgggcacctgtaatcccagctactcaggaggttgaggcaggagaattgcttgaacccaagaggtggaagttgcagtgagctgagatcatgccactgccctccagcttgggcggcaacaacaacaacaaaaaaagattcccaggcttcaccctctacagtctatggaaagtcatgggagtctattaaaaaaaaacagacactataaaccaaattaaaagatgggaaaatttttctatcacgttttaatatgtgatatccaaactcccattaagaatttttatatcagtaataagataaaactcagaagaaaaatgcccaattaacaagaagagcttcacctcttaaataatcagaaaaagaaaagcacataatatttacgtcaaagtatcaaaaatgtaaaagttttataataggcattagcaaggcagacggatacaggcacacatctaactctatgtaggatttaacttggaagacaatttgcatttcaatcaatcaaaaaccatttttttttttttgagatgatctccctgtgttgcccagactggcctcaagctcctgggcttgagcagtcctacagtctgagcctccaaaagtactggcaaaacaggcgtgattgaccatgcccagcctgtatataaggatattcatttgcagcattgtttgcaacacaaaaatgtaaaaccaaccggtgtttaatatgcaagatgttaatttatggtacattcttgctgtggaaagctatgcatctgttagaggtgggtctatatgttctgatacaggcagaactctaagagctattaagtgaagaaaaggctgaaaatacatatggcataattccatatatgttaaattgttctatattttaaatgttatacacgtttccatttgtatttacgtaataataatgatccctgagctgtactgttgtatacatgctacaagaaagacccatttaatccccacagcctatgatgaattatccacattctacaggtgacaaaatagaggcacaaagttaagtaatttttgtcaggtgagatttaaacccaggcattctgactcctgtataaccattaagatatgcagagaaagaaaactggaaagatacatattgctgaagatacttattataggaagaggaggggggagggtgaaggaatttgcaagtttttcatagatgtttccatattgtttgaatctcttacaaaatatgttcagcatatttttaaagagaaaatttggggcaaaatacttatttttgtattatgtaaacaaattttaaaataatgtgtggctgggtgcgctggctcacacctgtaatcccaacactttaggaggctgaggcaagaggattgcttgagcccaggagttcaagaccagcctgggtgacatggcaaaactccatctctactaaaaatacaaaaaattagccagtcgtggtggcgcacacctatggtcccacctacccaggatgctgagatgggaggatcacttgagcccaggaagtcaaggctgcaggaagctgtgatcgcaccactgcactcccacctgggcaacagagtgagacccggtcaccaaaaaacaaaaaaaaacaaaaaaaattggtaatcgttttcttcagacattttccgggttcctctgcttaacttgtataggaagtctgaggtttttgtgttggtctttaccttttttttttttttttttttttaagatggagtctcattctgttgcccaggctggagtgcagtggcatgatcttggctcctgcaacctccgcctcctgggttcaagtgattctcctgcctcagcctcctgagtagccgggactacaggcgcatgccacgatgcctggctaattttttgtatttttagtagagatggggtttcaccatgttagctaggacggtctcgatctcctgacctcgtgatccgcccacctcggcctcccaaagtgctggaattacaggtgtgagccaccacgcccggccctgatctttacatttttaaatattgcattagtgaaccgtgtactgattttgtgatcatagataacccagttaaatattaagtcttaattatcacttagtattttacaacctcagttgcagttataaagtaagggttccacatacctcctaacagttcctagaaaatggagctgtcttggcatgtagtctttattgccctgctaagtttttcatgctgggggtcagactgggagtctgatagaaatttcatttccaccgctggtcctctaaccaatgacttgctgcacaacctgagtggtctcctgggagaccagagttctaactttgtagcaggggacaaagacatgtatgtttgtcaccagccactgcccactttcctgccagaatacttcagcagtctccatgccagtcagatcacccattataaggtatttctgtcatgggcacagctcctcccagcaggargcacccagaatccagaygagaaaacagtgcagtgctaccggcgactcctcaaggccctcaagactgcacggcttcagcccatggtcatcctgcaccaccagaccctccctgccagcaccctccggagaaccgaagcctttgctgacctcttcgccgactatgccacattcgccttccactccttcggggacctagttgggatctggttcaccttcagtgacttggaggaagtgatcaaggagcttccccaccaggaatcaagagcgtyacaactccagacyctcagtgatgcccacagaaaagcctatgagatttaccacgaaagctatgcttttcagggtgagtacacattgacctgatggtgacccctcggcaaccttcatcacacaccttccccatcctccttagagcagattcgacatttctcccaactcaccttcagcagtcctcttatgtctgtgcatagggagaaattaatattgtaaattgatttcccactggcgataggaaggggtagctaacatggcaaaacactcagcatttcctttgaaaaatatctttgaggctcacgcctgtaatcctagcactttgggaggccgaggtgggcggatcacttgaagtcaggagttsgagaccagcctggccaatatggcaaaaccccgtctctactaaaaatacmaaaattagccagggatggtagcaggcgcctgtgatcccagctactcgggaggcttaggcaggagaattgcttgaacccaggaggcagatgttgcagtgagccgaaatcatgccactgtactacagcctgtgcgacagagcaagacacaatctcaaaaaaaaaaaatatgtatatatatatatatatatatatatacacacatgtatctttgaaataccccttgcccagtcttgagttgtgcaagcactgattgtctttctgtcttcctttccgtctatgtcctgctaccctgacttggaggcaaagtttcgtggtttcctgtccttccccctcggctcccctatacttacatgtcttagttggagcttacattgcagcttgggagacagacaaatacaagatgaaacaattatatatcacaggatgaggagagcacaactgtaactgttcacattcctgcctcctaggggacttgaagttctgatctgtaggcctaggctgaaccaggacatttgtgattataatcaattccctaagtgtatgttaggtacaccaattttgagaatcaattttggattatatatgctttcttgtttttattatataccatatacatacatatttgtatatatagtacctgatatatatatatatatatatatatatatatatatatatatatatatacttctatgttctactttttcattttaacatagtttatgactatattctcattttattaaaaacttgagccaggcatggtggctcatgcctataatcccagcacgttaggaggccaaggcagggggattgcttgaggccaggagttggagaccagcctgggcaacatagagagccactatctctaaaataatataataatttactccagtgctggaatagtattgcttaaaacaaaagaaaaacttgaaagcataactttcaatggtcttttaggttcccattgtataaatggagcataaagtttaaggtattttccttatttttgtatgtttattctaattttcactagttacaagttatgttgcaatgacattcctatctataaactatttcccaccttctgataaattctttctgacagaatcttagaattgaaactactaggtgaaaagatctgcattctttaagattttaaagcatggtactaaattattttccagaaaagttgtaatcatttatacgaacagttataaaattactctctgaccccattctgtcagtttcaaatgctatattttattactaatttgacagctgaaaacagcttattttcatgtcttgttaatttgcatgtatttgattatagagacgttaaacatttttttcttcttctttttttttttttttttttttttttgagatggagtctcactcttttgtccaggctggagtgcagtggtgtgatctcggctcactgcaacctctgcctcccgagttcaagcaattctcctgcctcagccttcccagtagctgggattacaggcacgcaccaccacatctggctaatttttgtatttttagtagagatggggtttcaccgtgttggccaggctggactcaaacttctgatctcaggtgatccgcccgcctcggactcccaaaatgctgggattacaggcgtgagccaccacgcccggccttaaacaaaaaaataaaataaggccaggcgtggtggttcacgcttgtaatcccagcactttgggaggctgaggcaggcgggtcacaaggtcagaagatcgagaccatcctggctaacacggtgaaaccccatctctactaaaaatacaaaaaattagcgaggcgtggtagcacgtgtctgtagtcccagctactcaggaggctgaggcaggagaatcgcttgaacctgggaggcggaggttgcagtgagccgagactgcgccattgcactccagcctgggcgacagagcgagactctgtctcaaaaataaatgaaaaataaactaggacatcatagctgccttattcacaatagccaaaaggtggaagcaacccagatatccactgatggatgaatggataaacgagacgtggcatagacataaaatggaatattactccacatttattaaaaagggaagaaatcatcacatgctacaacatggatgaaccttgaggacattatgctatgtgaaataagccagacacaaaaagacaaacgctgtatgattccatgtataggaggaaactagagcagtcgaattcatggagagaggaaggagaatggcagaggccaggggctggggtaggggagaaatggagagctctttaatgggagtagaatttctgttcagaaaaatgaaaaagttctggagattggttgcacaacaatgtgaatatacttaataatactgaactgtgcacttaaaaatagttaagatggccgggcgcggtggctcacgcctgtaatcccaacactttgggaggccaaggcgggcagatcatgaggtcaggagatcgagaccatcctggctaacccggtgcaactccgtctctaccaaaaatgcaaaaaattagccgggcgtggtggcgggcccctgtagtcccagctactcgggaggctgaggcaggagaatggcgtgaacgcgggaggcggagctttcagtgagccgagatggcacgactgcactccagcctgggcgacggagcgagactccgtctcaaaaaaaaaaaaaaaaaaaaaaagaagtttaggaaggagttctctccttgccaactctccaactgctctgcatttcatagtcctgattttcacaaaacactctctaaaggaacattatttttttaagccaccttgtcttctaaaatctttcagctagagtaaagtcatttggatgatttcttcaggtccataggaaatgaatcccccagtggtttccacagtcagagcctcctgccctcvctcacctgctgttygtgtctctggttggtttcaggcggaaaactctctrttgtcctgcgagctgaagatatcccggagctcctgctagaaccacccatatctgcgcttgcccaggtgacagcagcccaaaaatatacctgtaacatctgaggagagtttgattttaattttttaaaaacaagagaagttttggtctattggtttgacatttctgtaaatgcctcagaatgagtggtrtatgttctccaggttcataattaccttaaaaacaaaatcttgaagctgcagctcctgcttggtcaagtgtcagcttccctgcaggaagaagccacttgcctctgctggctctgatttttgagtccaaaatagcttataggataagagatgagattatggcaaaacaggtactagggtaaaggggtttttcaaaaatgtgcacctggccaaacacggtggctcacttctgtaatcccagcactttgggaggcggagatgggagggttgtttgagccaggagtttgagaccagcctgggcaacatggcaaaactccttctttgctaaaaatacaaaaattagcaaggcatggtgatgcatgcctgtagttccagctgctcgggaggatgaggtgggaggattgcttgagccctggaggtcaaggctgcagtgaactgtgatcatgtcactgcactccagcctgggtgacacagcaagaccctgtcttgaaaaaaaaaaattaaaaatgtacgtatatcctctatcactttttattttttatttttatttatttatttttttacagacagggtcttgtggccttgctctgtcacccaggccagagtgcagtggcatgatcacagctcactgcagcctctacttccaactcctggccttgagcaatcctcccacctcagcctcccaaagtgtcaggattacaggcatgagccaccacacccagccaactatcactttttaactataatttatattttttattttattttttttttgagatggagtttcattcttgttgcccaggctggagtgcagtggcacgatctcggctcactgcaacctctacaccctggattcaagcgattctcctgcctcagcctcccaagtagctgggattacaggtgtgcaccaccacgcccggctaattttgtatttttagtagagatgggctttcaccatgttggtcaggcttgtctcaaactcctgacctcaggtaatccacctgcctcggcctcccaaagtgctggaattacaggcttgrgccaccgcgccagcctttaactataatttttaaaagaaaaattaaaataatctgggaagtgaacagctttgggcccccttgggcagctgggcagtctggaagccatgggaaccaccgccggtctccgtagttctgcagcatygccctggtgctgtagagatgttgtgctgctcattggcgtctgtgcgttgatgggggccccaggagtcagggtctggtcttcagattttccatttcaaacaygatggaaccaagactgataaggttctggagggacaactcccaggctgattgcacggccagaatggcacctaaattagtttacagagggcgataactgctatcagttatgaacgcaggagaccaaagtgctgatcagaaaaatgcttgtcgagaaatagcctttgtactggtctatctgccccagtccatgctgtgcaatgcttctgggtcatctcccaaaagcacagttctgaccagttacctgctgggaagccacacttccgagtgggacgaatcccacaggaccctccagtgcatgaacgtgtgggcgtctctctctgtctctctctggcctcacctcctattttgtccatgtgagtgctatgcttgcttcctaccctcctgcatcccctactggacgtccttcctgtcttcctgccttcctcaaatctccttccagcaaaattttctccattgttaatgtacacgtaactgtgctctccagctgaggcctcgctcagtaacactccctcactcaccctgatgcactctgtccccacccggacccttagccattgctttagaccagtggttcccaagcttgagtgggcatcagaaccacctagagagctaggagagagcacggagaccaagacttaatgtggtgggacccacctgggcctgcacaggcatccgaagtccccaggtgagtctaatccccagcaaggcatgagaaccactggtgtgggcttcttacagcacttctaaatttctgtcttctcctcgtgtgattggtgcatttgctaaccctccctattaaaggtgtaaacctctgtggatattatttatctctaaatgtgaatccctacccaccatccccacacagtgtgactttcagaggtaggaactcagtgacgatgtgttgtgcagaactgacagacataaggaagagctgcgagagtgggcagggaatgctggagtgatacctgccagtgtggtctttagtgaacactgatgacaacttgactgagaaagaaacagggagccagtagtgaaccacttattaacccatttatgcctgaggctgcaattttttgaacttttgcaatcagaccttagcgaagaccttgagcagtaggatataagtaacttccacaggcttagcattcccataatggaacactaggcattcacagagcacttggttctgaccaggtgacagtaaccattagtccttgtcttgaagaagcagatgatcagtgggagggataagacaggtaatgatctaatcaggccaagggtagacaggtacggccagccaggctcgtggaggggagcgcagcactgggggtgttggcatggtcctgtgtagactctgtgaatctgaagttctttgagcacatgcaggccagagacagggcagaggggacatcctcatcagaagtgtggatgggggtgtcgacgaccaggaccatgagggttgtctctgctaaagaggaagtccccagtgcgtactccacaggccctagctcttggcctggctagggataactgggggtggacttcaaacggtggcctgaaatttaaaccaaaaccaaacacccggtaggattcacagggatgactgtggagccatgcgtggctgaaggctccaccacccccatcctggccaaatgtgagggtctatggaggaagcaccaggggcagcactggcctctaactgcctcccatttctggcatacacactccttcacgcattcatttagccatcaacactgcgtgctttctgtgtgctgagcacagaggcgcatggatgagcacataggtgatgcattcccaacaacatacaggcacaggcaccccccgccccctacacacacacacacacacacacacacacacactttctcattccatctccatcttttcctttggaaaatcctgctttggaatatttggtttagtgataaggggagaaacaaaaaagcgtacttctgagaggctgttagtcttgacagtgcttaggttctaatgaccctatttaactactattttcaggacacggtsgatttcctctctcttgatttgtcttatgaatgccaaaatgaggcaagtctgcggcagaagctgagtaaattgcaggtaatttgagcccttttccacattaatgatgaatgcagcgaaggtttcagagagcagattagacatttaatgctttggctactgcataaactgaacttccatcaacagcagagaccggctgagttgtgtctggggagatttccattgcaagcatccctagagaacatcggatgttaggcagtctttcctagaagggatacaaggkttagcttgttaaggtgaatatttacatagatcctctgcttgcttgtgtagaaatctgccgagaattgagattctggggttcattctgagttttaaaaaggcarctcatcaatgggggtgatggttccataacgataagcgtccacttaacaccactgaactatacatttaatggttatgatggtaatttttttttttgagatggagtcttcctcggttgcccaggctggggtgcagtggcgtgatcttggctcactgcagcctccacctcccgggttcaagcgattctcctgcctcagcctctccagtagctgagatgacaggaacacacaaacacgcctggctaatttttgtatttttggtagaggcaaggtttcaccatgttggtcacgttggtctcaaactcctgacctaaagtgatccgcccaccttggcctcccaaagtgttgggattacaggcgtgagccaccacacctggcctgtaaatttcttctttatgtctattttaccacatttttaaaaaaacaaacatttcacacccaggtctactaaatcagatcccagctgtctggaccttccagtaagctcagtactccctcctgtacccagtactgcttttctcaagtctaatgatgcgggctcattagagaaagtgtgttaggagcctcctatccaactaccaggtttctctcttaggcttggtcactgctgtgtgacttacttgcttcattccctggagtcccaactattctcctgtgacaaggtctatctgatgrtgcccacgttttctcctgcaccttccgagtgctggcagtattcctataaccctggagagctgccttcctgtgggcctttccaaggatgtctggccactggtatgcacccacattggaccccctgcctcttcaggtttgggcacaaaaccactccccgctgctttcagcctgtgcctcccatgagggaggcagagcagccccctacactcacctgtggttttgaatcccaccatctccgtcaccaaggaggatggtttacctgaggaattatccctttaaaggccaagtttggctaggcacagtggctcatgcctgtaatcccagcactttgggaggccgaggtgggtggatcatgagatcaagagattaagaccatcctggccaacatggcaaaaacccatctctactaaaaatacaaaaattagatgggtgtggtggcacgcacctgtagtctcagctacttgggaggtggaggcaggagaatcacttgaacctgggaggcggaggttgcagcgagccaagatttcgccactgcactccagcctggtgacagagcgagactccatctcaaaaataaaaataaaaataaaaggccaagctcaggaatgtcaaactgagcttcagctacatggaccctccattttacctgaggcagagtgcttgaaatggacaaattagcaccagtcctatcccaatgtctgtgtgtttctagctgtctgtgtagtagacactgctgcttttgttatctacaaataataagatgatctaatttaggggtccccagcccccaggcggagcaccagtactggtccatggcctgttaggaacctggctgcacagcaggaggtgagtggcaggcgagcaagcattaccacctgagttccacctcctgtcagatcagcgaccatattagataggagcacaaaccctattgtgaactgcgcatgcgagggatccaggttgcgtgctccttatgagaatcaaatgcctgataatctgaggtggaacaatttcatccccaaatcatccccatcatcccccctacctcccccaagtctgtggaaaaattgtcttccacgaaaccggtccctggtgccaagaatgttggggaccactgatctaatcaaaggtgacagatgcagccacaaagacatctgagtaacagctattttagtgcttgcttatcccagacacctgggaggcacttcattctcacatcatctcaacctctcaaaacacaccctaaggtttaaacaatttaaccaaggtggtgagctccagggttgggatttgaactagggctttctcattctaagacaccacactgtcttttcaaaagaaaaataagtctcacatctgtaatcccagcactttgggaggttgaggcaggcggatcacttgaggccaggagttcaagaccagcctgcccaacatggcgaaaccccgtctctactaaaaatacaaaaattaaccaagtatagtggcacgaacctgtaatcccagctccttgggaggctgaggcacaacaatcgcttgaacccgggaggtggaggttgcartgagccgagatggcgccactgcactccagcccaggggacagagagagacttgtctcaaaaaaaaataaagaaaaagaaaaagaagtccaagggtttggaacatgataatgagggtggtattttttaaatcacatatgatcagtttcagttgtttttgtgaatgcctcacctgaacctaaacttgcttgctgcccagggcctgtgcttgcgggctggctgacaaggtttctgggccttacgtaacactctagggtcttcgaggtctgcttgtgcctgtgatgactaaagctgccttttgtcctcctcatggaattaaaccagagcttgttgctaggctaatgggttcagacaaagctgccattttaaaaccatctctgttgtgcggaggtggcgtgcctctgacaggcagcagaggcactgcatggctggtacttgaggatgtgattttcagtctcttccctttttccatcacaacattttttttttaagatggagtctcgctctgtcacccaggctggagtgccccgtggcatgatctcggctcactgcaacctgcacctctggggttcaagcgattctcctgcctcagcctcccaagtagctgggactacaggtgcccgccaccatgcctagctttttttttttttttttgtatttgtagcagatacagtgtttcaccatgttggctaggctggtctcgaactcctggcctcaagtgatccaccacccccctcgacctcctaaagtgctgagattacaggcatgagccactgcacctggctaccacattttcaagacacttctaccagtgtctgggtaaagcactgaaacttcagtctgtagctggccagccaaatagtaaaactctccctggacaaacttagcagccatttataaatgttctgcaatggttatctattccttttacttccttgggtagggttggcccctcagaggcagcctcaaagattcggaaatgacagctgacaacccctgagctggagagcacactgttccttcctgggattgtggtctcatgcctggtagcatttcccatgcacagttaccacacccaggacagggagaacagctgagcctgccctgagaacaggggctgagttgtgtccacaggagcctgaatcgtgctgcccaccttcccagtgtcccctccctccctgtcctggaaccccaccctccccttgaaggggcctcttcctgtgggctgcgagggaagagggcgaaagcagggcagggaggagcaggcacctgcccccattcccaccctctccccggagcacctgcacagccctctctgagcctcaggggccctcagcggccactccccaacggcacacagctgtctgagggcctgagaacagcctcaagcccagaaatgaagagctgcggcacactccagggttctcggttctgyaggaggcacacgaggaggtcccccatccacttatcagaaaaagctgtgctcccagggagttctccgcttggcagaagacaggctgggggcctccgaggctcctctagctctccagccctgggacatcaccggctgcctcatggcatatccgtctttcaggaaggagaaaacccttgcttccctaagcacgccaccctgggtcatttgtccccactgcattgacccagcacagggagggatgaggactgtgtggagtcacagctccactaactgcgcagtcatgggcaacccgctcggcctctcgagcttctgactccccatctgtaaagaaagtcacaggtggctatgagaaagtaaagactatgcctggctccttttaaagyggttactattggtatcttttggtagcttttagttgctcagaggaggaaaaagttactgtgagtaaaatgaccaaactccaagccccgcaaaaaaggtaatttaaagtgaagtcaracagcatgtcagccctgagacgttttccttgatactgaaatggctagaaataagaagaggaaattacatttgcttccattttaatgataacagctaatataacttttctttttctttttttttttttttttgagatggagcctggctcttgttgcccagactgaagtgcagcggttcactgcaacctctgcctcttgagttcgagcgattctcctgtctcagcctcccaagtagctgatattacaggcgtgcaccaccaagcccagctaatttttgtatttttgataaagacagggtttcaccatgttgatcaggctggtctcaaactcctgacctcaggtgatccgcccgcctcaacttcccaaagtgctgggattataggcgtgagccaccacacccgctgggctgctgtaactttttgttttggaaaatttctaacatccaaaagtaaaaagaatgatgaacccctacgaagccatctccagctgcaagagctattattggctcatagctaatcttctttcacctaacctataacttctatctcccaaactagatttttaattaaaaaaaattttttttagagacaggatcttgctctgtcacccaggctggagtgcagtggtgcaatcatagctcactgcagccttaaactcctgggctcaagcgatcctcctggctcagcctcccaagtagctggaactacaggcatgcaccaccacacccagctaaccaaactggattattttgaagcaaatcccagacatccatagatggtggcctcttaactaagcttcttaagtagcacaggctctggatgtgagcagtggccttgttcctgatccyaacaccgtgcctggctctaagaggtgccctrtaagcctgtgatgaaagaagaggtgaaggtgggggttggtggggagggtagactatgttattgaaaattgtagatctttctccttcagagtctagagttgactcctttaattaactgagatacttagaggtsatttccaaagccagagtaagtgccacagcttctcatcttgaaactctgtccctgttatcaagatgctttccaggaggcttcagttcacttgctggtccttctctttttcagaccattgagccaaaagtgaaagttttcatcttcaacctaaaactcccagactgcccctccaccatgaagaacccagccagtctgctcttcagcctttttgaaggtgagtgggccattgctgaagaggttttgagtgacatctggtgcactggtgtgctaggtagcagtcttgaaagtccggggttccaatgggaggaggagcatgggaggaagactagtmtaaaagcccaccccagactgggttagtgtactatgccttcctactgatggtcccttgcaaccatcccccattgacccaagaaagaggagaggttcgacacaaggatgcctcttatggacataaagatagttaggcctcagctgtgagttgtaagcatggaaaatcatctttgcctccttttattacctctccctccaaggtctctcatctctgctcctcttggcagggctttcctctgcccgtctctctccagccagccctctccacttacccttgttccatgtccccattatctcagtttgcacatggccctggtgggtacctgaccaagatgctaagaactttcaagtgtaggactcacagctcaagggccatcttcctagtgtctcttagttcaaattcttgaaagtgaatctgattgttggccatggatcaggaggctgcttctggtccaatcaagtcaggggaaaggtggggtctatgatagcattgaggctggcagtcactggagactctgcaagaagggaggaaggggcagagaggaatgtgcctgagggccctgatattcactcttgtctgtctgtcactcttgtccataggccagagtatgggagaagtcagtagtgttctttctaccactgtgtcttagtctgtcttgtgttgctataatagaatactctagactgcgtaatttatagagaaaaaaggtttatttagctcatggttctggggactgggaagttcaagatcaggcagccacatctggtcagcttctggtgagggcctcatgctgcatcctaacctggcagagaagtggaaggggaaggaagtgcctgcaaacagataaaacaccagaagcagcctcactttataacaaccactgtatggtaactaatccagtcccactagaatgggaactcactcactccctggagactgcactaatccctgaaggcggatccctcatgacccaaatgcctcttaaaagtccataacctctcaataatgttacactggcaattaaatttcaacatgagtttttgtagggacaaaccacatccaaaccrtagcacacctggaccccatcccagcaatgggttggctccacagggcccctgaagtttatccatagataccatttaataatgcttatctgaactcacctttgatggcataacaatttctgttcttagatcccacctctctctaagtggttaaaattgtaccttttctgtttatgcgtattttaccacaattttaaaaatattccacccctttctgatctttgagttcttctaaatcaattgttcccaaagttgtggtccccagaccagcagcatcaacattagcatcacctgggagctcattagaaatgcatattcttgagccctacttgagacctactgcatcagacactcttggggtgggaccagcaacctgtgttttaacaagctctacagatgattttgattcaccttgaagtttgagaaccacttttaagtaataagtaagtagaattcacttctaagcttttaaagtcgttagcccatggtattttccaaaggggcttggaaccactgcttggagtttgggtgtgtcgtatgagcgaggaaaactgttgatttcagacttgcatgttcttagttggcatttacatagagttaattcaatttcttctcttacagccataaataaagaccaagtgctcaccattgggtttgatattaatgagtttctgagttgttcatcaagttccaagaaaaggtaatgtcaggttgcctattgaactatcaataactgatatttgtagaatactctgtttcttttacatgtataatcttataggactgttgtcatcaactcttgggccaccaagttgtttattgccattcaattgatgagaaacaaagactcagaaagaaagtagggagtctcttactgagtgggactcacgaggttctgctttctcatctgtcagttcgcccaactgtgcgcaactagcatgatggctcacacctgtaatcccagcactctggtaggcaaaggtgggaagattgcttgagtccaggagttcaagactgggctgggcaacatggtgaaactctgtctctacaaaaaattacaaaaatacaaaaattagccaggcatagtggtgcatgcctatggtcccagctacttgggagactgaggtcagaggatcgcttgagcccaggaggcagaaggtgctgtgagccgagattgtgccactgcaccagctaggatttgaactcctgccttctagtttaagatcttgctggagacagtgtgagcttgtggaagagtggccaggttaaagatagatctgaccatcccactgaagttacatgatgagtaagagaaatgggttctctgtgcccatttcctcaatatgaagggtgaaacatcctccctggaaggagacagcatagacaggaaagccagctgttgctgcaagccagatgcctaactygacaacattctagggacagaggtttgaatctatggtggggttgtaaataatatcttactgagtgactcaagtgccaaagtttgcaaatgatatgctttaaaaaattagagcagattgccgggcacggtggctcacgcctgtaatcccagaactttgggaggccgaggcgggtggatcacgaggtcaggagatcgagaccatcctggctaacacagtgaaaccccgtctctactaaaaatacaaaaaaattagccgggcatggtggcgggcgcctgtattcccagctactcgggaggctgaggcaggagaatggtgtgaaccctggaggcggagcttgcagtgagctgagatcgcgccattgcactccagcctgggtgatggagcgagactccatctccaaaaaaaaaaaaaattagagcaggttttgaggttgtgcccataattacattgctttcatgcacgcatatcccaatacgctcttgagtgaatgagaaaagaatggcatggtagccagcactgggaattgcccagaacctcagcgctcctggagggatgttacatgcatgaagttcatgcaccatcccttagggtgggacaaaagctggagacaataattgacttccagaccttcaactagagttctctttgtcactcacctctgatatttccagkgcagccctgttcagggtcattcagtgccaacacctctttgtacctttcctcttccagtacttgactgtcctgagccatatcctccttctattgttccatcctctcaatccacttcaaatcagcagttcagatcaacagacccgcagcagcagcygtacctcaggctttgtgtggcagtgtagacttgcaatagacagacatgggttaccactgcttcctgaccacacttggagtcagccaagaaggactggctgtggcttcacaaaagaaaactcaagaagccgtaataaaatgggttccctgaaaagccagtgattacaagtgacaccagctcggagattctctcagcrcttggtggtgctttgcctgaaggggagggccaacacaggcttacattaaacggacagccaggggcccctactcaggaggatgtggttggagaacccgctgaatgcaggggcggtgggtggggagtgrttcagaaatgactaacgtagttttctccttcagaattctagaccttataggggagacagagcggcccctgaacaactctcacatgagaatgtggcaggagacacacagcactgcaccctaaaaaagggagaacttaggagccctgggtgtggagcctgaggtgccgtcatgtgctaaatccctctccatggccggcaaacccagggttcccagctccaagcctgtacagcaagttctgtttcatcccagggcagtttatttgtttccttaaaactcttcatgcaatccaggaggacagtcagggccaggagggctgggtaagagcgaggttcggagcagcggacgctgtgtttatgggcaccgtggatacgcagaggctgagcaccgaggggacgcgacacatccccagctgcgatccacagtcgcatatgttttgggatcatctacgaaggaaaggatcatttccctttccccctaatctagcaaatgtcagggagttgatgctgagtgaaacagaaggctcttaggttcggaagacgcctcctgctgggtgacccggccccaggcttcgctttttgagaggaagatccctgtgcagtgttcctgtcacttctcccagttctgcgctgtgggccagcctggtataggtgccatcggctctccacacgatggctgtgtgacagggagatgctcttgtactccacgtccttttccccaggcatgtgccacactcctcaaggccgacctctgctggctgtaatttgcagcatgcatgctttcctgcctgcatgacatgactcaatttagaagttggcaatcacaattgaaaaaaaagaaagaaaaaagaggaaaggagagtgggagggaggaaaatggactagaataaaatagaaaaatcagaccacattttgtataaatgcagcatgcacttttatgtgatgttttatttcatatgcatatacatatgtacatgcatatacatgcacataaacatgtatgtgtatgaggttaaaagcacagaatctgctccaccacctgcaagctgtgtgcaaggagaagttactcataatcaccaggaatccaggctcctttgttgttgctttgtcacctttaacaaggtttctacctcatggttcaggrtggatgcttgagctcctgccattatgtcagaaatccaagcagcatgaagaaaggaagcagtagccaggactgatattcaactggtccacatcagtgtacttctgtaccagctgataaatagctgctggctccctgaaatcaggaagttttccatttctttttctttttttagacggagtttcactcttgttgcccaggctggagtgcaatggcgtgatctcagctcaccacaacctctgcctcccgggttcaagtgattctcctgcttcagcctcctgagtagctgggattacaggcccccaccaccacgcctggctaattttgtatttttagtagagacggggtttccccatgttggtcagtctggtctcgaacttctgacctcgtgatccacctgcctcggcctcccaragtgctgggattacaggcatgagccaccacacccagcccccgtttcttttagtctcagtttcctcctgtgtaggatgaggataaatcattgtagtacccatctcataaatttgttgggaaaattaaatgagataatacacatccattcttattacagtggccagcgcagaatcaaggctcaataaattggagtcattgttattattagctatgttttacaaataatgaattataagaagaataaagtatggtactaacactgaagacaatattcaaggkcaatctaatacagagaacagtagcattgttcctgttttaaccatgaaagagcaagaatcactcacctcagaaggggtaataataataattttcccatctgccagttacttcctgcccatggctttgcagatatgacttttgactcagtgtttctggaatcttttctgattaaacacagtagtcatccgtagggggcatttgtaactgccagcgtcattcattattatgtccctttttgtcccttcaatcctgcagcatgtcttgttctctgactggcagcctggcccttcagcctgaccagcagcaggaccacgagaccacggactcctctcctgcctctgcctatcagagartctgggaagcatttgccaatcagtccagggcggaaagggatgccttcctgcaggatactttccctgaaggcttcctctggggtgcctccacaggagcctttaacgtggaaggaggctgggccgagggtgggagaggggtgagcatctgggatccacgcaggcccctgaacaccactgagggccaagcgacgctggaggtggccagcgacagttaccacaaggtagcctctgacrtcgccctgctttgcggcctccgggctcaggtgtacaagttctccatctcctggtcccggatcttccccatggggcacgggagcagccccagcctcccaggmgttgcctactacaacaagctgattgacaggctacaggatgcgggcatcgagcccatggccacgctgttccactgggacctgcctcaggccctgcaggatcatggtggatggcagaatgagagcgtggtggatgccttcctggactatgcggccttctgcttctccacatttggggaccgtgtgaagctgtgggtgacyttccatgagccgtgggtgatgagctacgcaggstatggcaccggccagcaccctcccggcatctctgacccaggagtggcctcttttaaggtacttcccaaccctgcagctcctactaattggaggagaaaggacattggctggaagaaagtcattttctctgttttcttccatcagcaagcctttactttttgttctttctttaaaggaaatcggggagggaaggaaccataaattgttaattaaattgttaatcacctggccaggtgcagtggctcatgccagtaatctcttcactgtgggaggccaaggcaggcagatttcttgagtccaggagttcgagaccagactgggcaacatggcgaaatcttgtctctgcaaaaaaaatacaaaaattagctgggcatagtgttgcacgcctgtgatcccacctacccaggagactgaggtgggaggatcgcttgagcctggtatgcagaggctgcagtgagccaagattttgccactgcactccagcctggtcaacagagcaagaccctgtctcaaaaaaaaaaaaaattgttaatcaccttattttgtccagaccctctactggtacttttaaaatataatagttattacatactcagaatagcactgatggatgagtgaggctcagacaggataaacaatgtggtcatgatgacattgctagtgagtagccaggtggaagtcaggatttgagtccgagtcttcttgactccaaatcaagttcctcatgtcagtgacaagtgacagaaagctcaacccaaagtgacttaagcaaggagagaatttacacattcaggaggttgaaaattcttcatttagcctgatcagggtggaatttgatcagagcacaagcgatgccaccaggacccagttcctctcctgttcccctcgttggctttattcttgggctactttgcagccagatggcagcagccctgtttctgttatttcatgaccagtagggaaaaaagctcggctcttttctgtccttcccaacagaagtgtccctgtgtctcatggtctctcagtgggtcgcatacccaccctgaactcattgctgggtcctggccaggaggctgtgacaactgactggtgtgggccaaggacccatgctttactcctcaatacgctcactgagagctgaggaggcagagagggaagaggcaaggaggcattggctttccagacgccagtcagggcatcgtttcaacaagaaggggatgtatacacttggcacaaaattttaaatggctataggtcttttccattatttccctttttcttcggaatctcccagaaaacccaccagctttctttggcagcgttcttcaggatggacatgttagtctgccttttccctgtcactgtttgggttccattcttaaagatgagtatttccggccgggcatggtggctcacgcctgtaatcccagcactttgggaggccaaggcaggcagatcacctgggaggtcaggagttcaagaccagcctggccaacatggtgaaatcctgtctctactaaaatacaaaaattagccagatatgttggtgggcgcctgtaatcccatctacttrggaggctgaggcaagagaatcacttcatcctgggaggcggaggttgtagtgagccgagattatgccactgcactccagcctgggcagcctgggtgacaaagcgagactttcatctcaaaaataataataataataataatactatttcctgtgtcccgtgctaggtgttaaagaggggtcacagccatgccctggacatgttataaccttttggggaagatgacactaacacacgtagcaaaattacagaactcttcaaaaagaccattactagggtgagctggaacatcatgaataaataactcaatgaaatgtcaaacattgtagcacgtaagtcagagtttccattcagctcttgagcagcaagtgactgcacatatggagccattccaccacccaccttctgaaaatggaaggtttgaaatcttctgtttcactccttgttgtaaaacttatctaaaccttttcttcttaggcttttcttcccctttgaactgtggctcttgagatatctttacagagactttgatgagaaagtccccttcactcttctccttcaattcttccctttatttattagttcaatgttagaatgccattgtcttagtgagcttgagctgcaataacaaaacaccatagactggtggtttaaacaacagatatttatttcccagcattctggagctggggaagtccaagatcaagggaccagcatgtttgggttctggtgagggctctcttcctggcctgcaggcagccaccttcttgctgtcctcatataggggtggttggaagaactcactggtatcttttcttataaggacactaataccaccaccatgagagtcccaccctcacgacctcctctaaatctaatcacccctcaaaggccctatctccaaataccatcacattggggattagggcttcaacatatgaattttgatgggggaactaattcagttcatagcaactattaaggaaaaaatttaaagaaaaaaatgtcttgggccaggcgcggtggctcacacctgtaatctcagcactttgggaggccgaggcgggcggatcacgagatcaggggttcgagaccagcctggccaacatagtgaaaccctgtctctactaaaaatacaaaaattagccaggcatggtggcgggcacctgtagtcccagctactctggaggatgaggcaggaaaatcgcttgaacctaggaggtagaggttgtggtgagccgagattgcgccactgcactccagcctggtgacagagcgagactccatctcaaaaaaaaaaaaaaggtattttattattttagagtatttccttccagtcttggcttctttgcatttatgatgttgtcacagggcacctcagattgttgctcactgtttacttgatatcatgtcattagcacttttccctattattaagcagttgtgatgactgtttttgatggttgtctaatattccactgagctcccttcctgacactggctaatttagaagaaagacatccttgcttttgggaaaggagcacagtttgccattcgagtttagaactcaactaaagacgaatatttgggatgtgagaagcagccaggcgttttagtgattatggcatattttgacatgaaattcttcagaggtaagtgtcatcctcttcagatgataaaaaggaaaaaggaaagcaagctaagatttagcaagctcactcctgctctctgagtttctgctcaatgctttatatacacgtatttaatcatcccagatggatccataattacccacttcttgccaacaagtaagctgaagttgagagaataaattgtccaagttaacaagttagtaacagagtcaagatttaaatctaggcttgttatatttcagacaccctccttttgcccctacttcccacaaaaagctgttgctgtttgtaagagcatgagttaagtctacaaagaaactcctagtttggtttttcttccgagattccattaaatagaaagaagaacaaataagcaagaaagagccctcctctcccttgtgtgctaattaaaataatcctccccatggactaatttctcaaaaagcacttattaaggacagaggcagaatagcagtgtgggtaacagtaacaggcttggaatcagactgccaggggcttgttctcactttactcctgactcttggccttgtgaagttactacacagctctggatcttgttttcaccatctctatagtggtgataataattgtacctgccatatgaggttgtggtgaggattacatgagagaattcattaagtagtaggtgcccaatatatgttagttgttattgttaatgtggttgttgatgctgttattttgttgacaattttgaagaattgctgttgacttgttgactttgttgatgatattggtgttgacttgttgacattgttgacttgatattgttgaccttttcacattggtgttcacttgttgatgccgttcatgttggtattgatgttgttgacatcaacatcgttgatattattgacttgttgacattggtttggatttcttgacattgttgacttgttgacattgttagtatcagtcttaacttgttgtttatgttgttaacttgttaactttrttattgacttgttaacatcattgatgttagtgtcaacattgttatttgttgatgacttgatgttaacattagtgctgatgttgtcaatattgacaatgtcaatgttgttgttgtctttattgacttgttgacattgwtgttgacttgttattggttcattagtcctgttgttgtcattgttattattactaatcactgtatttccttcttactttttcacaaggtggctcacttggtcctcaaggctcatgccagaacttggcaccactacaacagccatcatcgcccacagcagcaggggcacgtgggcattgtgctgaactcagactgggcagaacccctgtctccagagaggcctgaggacctgagagcctctgagcgcttcttgcacttcatgctgggctggtttgcacaccccgtctttgtggatggagactacccagccaccctgaggacccagatccaacagatgaacagacagtgctcccatcctgtggctcaactccccgagttcacagaggcagagaagcagctcctgaaaggctctgctgattttctgggtctgtcgcattacacctcccgcctcatcagcaacgccccacaaaacacctgcatccctagctatgataccattggaggcttctcccaacacgtgaaccatgtgtggccccagacctcatcctcttggattcgtgtggtgccctgggggataaggaggctgttgcagtttgtatccctggaatacacaagaggaaaagttccaatataccttgccgggaatggcatgcccataggggaaagtgaaaatctctttgatgattccttaagagtagactacttcaatcaatatatcaatgaggtgctcaagggtaagaacaatggatgtgccagtgattggaagktgggtggtacttctccaagtcttcaaagtttcgtttaataagacaaagaaagtctcctagagaaatggagccaaagaaagcataatagtggggagtccttcacgtcagctccctaactctctttcccaaggttcattcatgtcattcacgtctttgctcctgtggtttttttgttttattttgttttgtttttgagacagggtcttgctgtgttgcccgctggagagctggagtgcggtggcataaacatcgctcactgcagcctcaaagtcctaagctcaagccaacctcccacctcagcctcttgagtagctgggaccacagtgcaaaccactatgcgtggcttattttttttttttttagacatggggtctcttcacattgcccaggctggtctcaaactcctgggctcaaacagtcttctcacttcaatcctcccaaagtgttgggactacaggcatgagccaccatgcctgacccagtgtccttattgcctagaatacctccctctacattctgcccatctgagtcctatgcagtcatcaagcctcattatctttttttttttttttttttagaatcagggtcttgctttgtcacatagactggaatagagtggcatgttcatagctcacttcagcctcaaactcctaggctctagtgatcctccggactccaacccattaactcttccctcattgctccagccacactggtcttcatttcctttaattggctataaaatctacattctatgtcattgattttgatccaattgatccacatctacggtctcattcttacctgacatactatttcatatgtctttttattccaattggaaaggtatggcaaatagatttcatctcacaggtcagtcctcagttaacccaggatgttcttatcttgagctcattaacttaattacatctgcaaagatcctttttccaaataaggttatattcactggcaccacgggttagaatttagacatatctttcgggggtcaccattcaatgcactgtatcagggaatatatgttttaggctttatttatttatttattttaattttaatttttttagacagggtcttgctctgaggagtacactgacctgatctgagctcactgcagccttgacctcctgggctcaagcgattctcccacctcagcctcccaagtggctgggactacaggtgcacaccaccacaccaggctaattttcttttcttttttctttttttttttttgagacggagtctggctctgtcgccgaggctggagtgcagtggcgcgatctcagctcactgcaagctccgcctcctgggttcacaccattctcctgcctcagcctcctgagtagctgggactacaggctcccgtcaccacgcccggctaatttttttgtatttttagtagagacaggttttcaccatgttagccaggatgatctcaatctcctgacctcatgatccgcctgcctcagcctcccaaagtactgggattacaggcgtgagccaccacgcctggccacattttttttttttttcaatagagacagagtctggccatgttgcccaggctgctttatttcttttttaaaatatgaaatatgttgtcacttaatgtcaatattactaaacataaacaaggaaaagcaaaagcatattgttaaaagattgatttatgtattttatataaaaccaagacaccctggtggtaacacatgggacacatcccctccactatttatttgaagatggggatgctcctttggtttgagatttatggccacaaaagtggcctgatgttttgtgaggatcttgtggattttccttttatccattctgaggaggaaaaaggatgaacatttggggggtaacccaagtcacccccaaaactttcatgtcaaaaggaacactttttaaaagcaacattagtaacagagactatacttctaatttttcaataaaaactattttattgaaaaacagtcctcgctggtccgaggtaataacttatctcagttgactgttcacaaccagttacagatcaaacagcttctaatacccttctcccccttctcactactgcactgactagtctttaaaagataaataaataaaataatggtgcactagctcactcctgtagtcagtcccagctacttgggaggatcacttgagtccaggagtttgagaccagcctgggcaatacagtgagaccccatctcaattaaataaatccataaataaataaatctaatttttatttttcttcacagctatcaaggaagactctgtggatgttcgttcctacattgctcgttccctcattgatggcttcgaaggcccttctggttacagccagcggtttggcctgcaccacgtcaacttcagcgacagcagcaagtcaaggactcccaggaaatctgcctactttttcactagcatcatagaaaagaacggtttcctcaccaagggggcaaaaagactgctaccacctaatacagtaaacctcccctccaaagtcagagccttcacttttccatctgaggtgccctccaaggctaaagtcgtttgggaaaagttctccagccaacccaagttcgaaagagatttgttctaccacgggacgtttcgggatgactttctgtggggcgtgtcctcttccgcttatcagattgaaggcgcgtgggatgccgatggcaaaggccccagcatctgggataactttacccacacaccagggagcaatgtgaaagacaatgccactggagacatcgcctgtgacagctatcaccagctggatgccgatctgaatatgctccgagctttgaaggtgaaggcctaccgcttctctatctcctggtctcggattttcccaactgggagaaacagctctatcaacagtcatggggttgattattacaacaggctgatcaatggcttggtggcaagcaacatctttcccatggtgacattgttccattgggacctgccccaggccctccaggatatcggaggctgggagaatcctgccttgattgacttgtttgacagctacgcagacttttgtttccagacctttggtgatagagtcaagttttggatgacttttaatgagcccatgtacctggcatggctaggttatggctcaggggaatttcccccaggggtgaaggacccaggctgggcaccatataggatagcccacgccgtcatcaaagcccatgccagagtctatcacacgtacgatgagaaatacaggcaggagcagaagggggtcatctcgctgagcctcagtacacactgggcagagcccaagtcaccaggggtccccagagatgtggaagccgctgaccgaatgctgcagttctccctgggctggtttgctcaccccatttttagaaacggagactatcctgacaccatgaagtggaaagtggggaacaggagtgaactgcagcacttagccacctcccgcctgccaagcttcactgaggaagagaagaggttcatcagggcgacggccgacgtcttctgcctcaacacgtactactccagaatcgtgcagcacaaaacacccaggctaaacccaccctcctacgaagacgaccaggagatggctgaggaggaggacccttcgtggccttccacggcaatgaacagagctgcgccctgggggacgcgaaggctgctgaactggatcaaggaagagtatggtgacatccccatttacatcaccgaaaacggagtggggctgaccaatccgaacacggaggatactgataggatattttaccacaaaacctacatcaatgaggctttgaaaggtgtgtgagggttcagttccccttaaagaaatcttccaacattccctgggtcatatgcctgaaatgttttgccgggatgatttatgaaccatcaatagatctctctcttaggtcccaactccataattctttatctgtttgggggttatatgttccttgagaagctgggggaaaaaaggctatggttgtctctgcagaggaaaaatacaaacactacacacacagggtccctagcagaatattcatattgtcatgggtccattcattcattactgagcaagttctattttaggtgctgggaatacagcaatgaacaaaacacaaatttctgccttcgtagagcttatcccatgcaccccagaacaagaaagttgtgttaattcaaacttccttttttttttttgagatggagtcttgctctgttacccaggctggagtgcagtggccaccgtgcccggctaatttttttgtatttttggtagagatggggtttcaccatgttggccaggctggtttcaaactcctgacctcaagtgatccacctgcctttgcctcccaaagtgttaggattacaggcatgagccactgtgcccagcctaaaaatcaactttttgtttcattgattttttttttttgagacagtctcactctgttgcccaggctggagtgcaatggtgtgatctcggctcactgcaacctccatctcccgagttcaagcaattctattgcctcagcctccccagtagctaggactacagatgcattgggcttaacttcctaagtgggctgaagatcttgaatttggggcatgtttctttaccccaagagaagaatttgatttggagatgatcagtcattaatgcttgctgtggggtcataggtactggcagaaaagtaagatcaacagatgatctgttggtctctcagggtgtatgtcacttttaggaccacaaccttgaattgaggagctggcagtgggttggstgcatggaggtcctgactcctggtgtcaagctctcctctgctccctttgggatgttcccagcctacaggctcgatggtatagaccttcgagggtatgtcgcctggtctctgatggacaactttgagtggctaaatggctacacggtcaagtttggactgtaccatgttgatttcaacaacacgaacaggcctcgcacagcaagagcctccgccaggtactacacagaggtcattaccaacaacggcatgccactggccagggaggatgagtttctgtacggacggtttcctgagggcttcatctggagtgcagcttctgctgcatatcaggtgaggagttcaggatggtgggacaccagtgactgcacacctgccctgtgccaggctctgggctcagtgctgggaagggcagatgcatgaacaggagattccagcagacccatggaggggcagcatggggtctgggaggtcctcttccagacagcctggcttcttcacacccccaaatttacccagaccagcatggtgaggctcgctgtcctgagatgggtgcttgcagggccagatggagcagggggagcctgggcagaagtacttgggcaaagacacacaaatacagtcacgcattgctcacaacagggatttactctgagagatgtgatgttaggtgagttcatagttgtgtgaacatcacacagagtgcacttacacacacctagatagtgtagcttactacacacctaggctacatggtatagcctagtgctcctaggctacaaacctgtacagcctgttactgtactgaatgctgtaggcagttgtaacacagtggtatttgtgtatctaaatgtatctaaatgtagaaaggcacagtgaaaatatggcataaaagctggacagggtactcaccatgaatggagcctgctggactgggagttgctttgggtgagtcagtgggtgaggggtgagtgaatgggaaggcctaggcattactgtacactactgtggactttatgaacactgcacacttaagctacactaagtttattttttaaatgtttttctttcttcaataacacattaaccttagcttactgtaacatttttactttattaactttttaattctttaaacttttttactcttttgtgataatgcttagcttaaaacaagcacattggtccaggtgtggtggctcatgcctgcaatcccagtgctatgggaggatcgctcgagacgaggagttcaaaaccagcctgggcaagacatggcaaaaccctatctctataaaaaaatcaaaaaaattagccaagtgtggtggtgtgctcctgtagtcccagctactcgggaggctgaggcaggaggatcactcagcctccccattagctgggattacatgcatatgccaccacacccaatgaattttttatttttaatttttttgtagagatgggggtcttgctatgttgctagggctagtctgaactcctggcctcaagtgatcctcctccctcagcctcccaaagtgctggaattacaggtctgagccacagcacccggcctgcatgtgctatacttttatactgctggccatacggtagatttattgacatgagcactgccacaagcatgaataatgcagtgctctacaacgttatgatggctgcaaagcactaggcaataggaatgtttcagctccattataatcttatgggaccaccatcatatatcaggtccgtcattgaccaaaacactgttctacagcccatgactatgacgagtccctgttggacccctttattccccagctagatccttccaagcaggcagtttgctcacattggctctcagcatgggcctgagcttattctgatgtcctaaaaacatcacaccactactgtattcatgccaaaatgaggcttactcatacagaaaataggatggttttattttgtgcaagaaaaatggaaaaggcaagagtgacttgcctggcagttagtggtggttcctgctttccatcttctgtctgcgtctgtctctgtgcaagagtgggcctgccacatgcgtagagaaagccaggggagttccgagactgagcgggggccagagcaggctcccagaggaggtaaccacacttggctaatttttttgattttttttatagagatggggttttgccatgttgcccaggctggttttgaactcctgggctcgagcgatcctcccatagcgctggggttgccggcgtgagccaccacacatggaccaatgtgcttgttttaagctaagcgttatcacaaaagagtaaacgtcctgacttgagactcacccagtgaaagaaaggaggctgtgagtgcttgactgaatgacttaataagaccatgtcttgtcatcttgagattgaaggtgcgtggagagcagatggcaaaggactcagcatttgggacacgttttctcacacaccactgagggttgagaacgatgccattggagacgtggcctgtgacagttatcacaagattgctgaggatctggtcaccctgcagaacctgggygtgtcccactaccgtttttccatctcctggtctcgcatcctccctgatggaaccaccaggtacatcaatgaagcgggcctgaactactacgtgaggctcatcgatacactgctggccgccagcatccagccccaggtatggtgggtcctggcaaggccttgggaaagtccacatgcaggaaccagcagggctsggggagcacatttatcatgtaaacaaaatgctggtttcaaatttagcttttgttgttattgttgtttttgagacgtagtctcgctctgtcacccaggctggagtgcagtggcggatctcgtttctcagcctccagagtagctgggcttataggcacgcatcaccatgcccagctaatttttgtatttttagtagagacggggtttcactgtgttggccaggctggtctcaaactcctggcctcaagtgatccacccgcctcggcctcccaaagtgctgagattataggtatgagccaccgtgctcgacctcaaatttaactttttaattgtcagtgaattcatatgatgcagaatttgaaaagcataaaagagtttccttcccaaccttgacctcagccatctagttctccctgaaagcaatttacccttttcccaaaagaaaaagaaaaaaatctttgagcctttttgtctcataagtcactctcaggatttgcagcagacgttgatgctggcacatctaacctagggcttcccatggaaagyatgactgatgcaacagctgatctggcttcttcccaggtgaccatttaccactgggacctaccacagacgctccaagatgtaggaggctgggagaatgagaccatcgtgcagcggtttaaggagtatgcagatgtgctcttccagaggctgggagacaaggtgaagttttggatcacgytgaatgagccctttgtcattgcttaccagggctatggctacggaacagcagctccaggtaagtcccagccctggctcataggctctttgaatcatggcattcttagcacatcaagagttgaaatccagatggcacaggacgaggcaaccaagaaagccccatggcagaaaccctgyctcttgctcagggctgtagaggtttccctcctggcattgcattgttaaacatgaatttcacatctcaattcctcaaggtgggttcatttctttgctctgtgactctgatcggcctcaggtgggaagctctctgagatcagagatgtgggcaaattgatgtggggaaggacagtttgtcaggctgtacaggtctacagtctatttccacaattcccaaaccccaaagtttctgacaattggtttggctgacctgagctcatttaatagtagtgaaacctgactcaaaccaacaggaggctgctcatggtctttatcgcactgagcaaacattcctaagttctgctgcagagatatcagtgtgcttgactatggagagctagctgtctgcggcccatggggctgataggtacttttctcaaaggaaacatttaattccaaaacacatctgaccctaaaagattttttttcttttaactttggttgacatgcaataattgtacatatgtatggagtacaaaatatattttgatacatgtatacaatgtgtgatgatgaaatcagaataattagtatattcatcacctcaaacattcatcatttctttgtgttgggaaaattcsgagtcctcttttctagctttttgcaaatatacactaaattcttttgtatcattattttttattcattttttatttttttgagacagagtctagctctgttggccacgctggagtgcagtggtatgataccagctcactgcaacctccacctcctgggctcaagcaattctcctgcctcagcctcccaagtagctgggattacaggcatgtgtcaccatgcccagctaatttttgtatttttagtagaaatggggtttcatcatgttggccaggctggtctcgaactcgtgacctcargtaatccgcccgcctcagcctcccaaagtgctgggattacagatgtgagccactgcacccagcctaaattattgttaactacattcactctacagtgccacacatcactagaacttcatcttcttatctagcttaactttgtatccattaaccaacctctccctgtcctccctccctactacccttcccatcctctaataatcacaattctattctctgctgctaggagctcatctttttagctcccacatgtgagtaagaacatgcagtatttgcctttctgtgcctgacttatttcactttacataatgacctccagttccagcgatgttgtcacgaatgacaagattcatccttctttatggctgtatagtattccatcatatatagatgccacattttctttatccattcatctgttgatggacacttaggttgattccatatcttggccattgtaacagtgatgcaataaacacagaggtcaaggtattgatttggtattctgacttactttcctttggataaatacccaaaagtaagattgcgggatcccttagggttttgaataagaaattgtggacctatttttgtgccttgagaaccatccagtttcccttttatctagttctgagttaataagaataaatttgtgttcattcatgtgattcctcagaacactgtgtaacagctggaaagagccaccaggagatgtgcctcaaatcgttatcagaggcatctccattggtcctagttcgcccctttggtttacactccttcaacacatgagaggcgcctctcttgcagcattcactatcagggtatctccgtgtcagctggttgcattagctacattctccaaccctaatgatcacaatgggtccccaaggagctccagattatcaactcctgtcaattcatttgagcccaggagttcaaggctgccgtgagccatgctcatggcaccactgcactccagcctggatgacagtgcatgaccctgtctcaaaaataatcataggccgagtatggtatctcacgcctgtaatcccagcactttgggaggccaagacaggtggatcacctgaggtcaggagttcaagaccagcctgatcaatatggtgaaactccacctctactaaaaatacaaaaattaaccagatgtggtggcatgcgcctgcagtcccagctactcaggaggctgagacaggagaattgtttgaacccctcggctcactgcagtctccacctcctggattcgagtgattctcctgcctcagcctcctgagtagctgggattacaggcgcctgccaccacagctggctaattttttgtatttttagtagagacaggtttcaccatattgggcaagttggtctcaaactcctgacctcaggtgatccacctgcctcagcctcccaaagtgctgggattatgggtgtgagccaccctgcctggcctgggttgtcttttaagttttaaaaaatcatttgtacatatagtcctttctgaatataacattggtttgaagctaactcaatagaaagaaattccatctctttagtctctctagtttgactatagtagctaacagagctgggctgcaatgtcacacttcacctttaggtgccaccatctgatttgatttgctccagcctaagcatttcttaaattgggggctttagattctgcgataggtatctctattatgggtattttgcctgagacgtacgagccactcttctggaggaggggaacagaagccaacatttatcaagtggccttccctcttccagacacagtgctgctgtgggcgggtttcatacactgtttcatttccctctcacaagcactctctgctgcccatttcaccaaggaggaaactgaaaggctgaattactcacccaaagttacacagccaggtaataagagggagagccagggtttgaattccagttttcctagtgtcagaatctacaccccttctcccaaacacagaggggacatctgcaggcagggactaacaatctcagtcacatccattctatccattctctgttgacatccatgtgtatgtttccaggagtctccaataggcctggcactgccccctacattgttggccacaatctaataaaggctcatgctgaggcctggcatctgtacaacgatgtgtaccgcgccagtcaaggtggcrtgatttccatcaccatcagcagtgactgggctgaacccagagatccctctaaccaggaggatgtggaggcagccaggagatatgttcaggtctgtttttcctctgggcrcttgttcttactcttgtccatctttccttccagcctaatggaaacagattgtgaatcaaagatttagggtgtggtggctcatgtctataatcccagcactttggaagtctgaggcaggaggatttcttgaggctaggagtttgagactagcctgggcaacatagaaagaccttgtctgtgaagaaaaaaaaattattagggcatggtgacacacacctatagtcccagctgctcaggaggctaaggtgggagcttgagtccaggaggtcaaggttgcagtgagccatgatttcggcaccattaaactccaggtgacagagggagaccacccccaacccccaaaaagaagaattattaggatctaagcctagttttgctattgcctgattttgtgagcttgggaaaatcatctaactttttcgtaccttagtttcctcaacttcaaactggagatgtcctgcccacctcaaaagtttgctgtgatgaaagtgataaagtctgtggggttaagttgtctttaagtttttaaaaatcatttgtacaggtaattctttctgtaacattggtttgaagttaactcctagagagaaatttccatttcttcagtctctctggtttgactatagtagctaacagagctgggctgcagtgtcacacgtcacctttaggtgtcaccatctaatttgatttgctccagcctaggcatttcttaaattgggggctttagattctgtgaaactcattagtgcccctaatttgccaactcaatgagtttaagaacagcatctttcagtcatggaatttcacccaaggaagtagagacattactaggaagccractgggcaaggtggctcacgcctgtaatcccagcactttgggaggctaaggcaggctgataacctgaggtcaggagttctagaccagcctggccaacatggtgagaccccatctctactaaaaatataaaaattaccgaggtgtggtggcacatgcctgtagttccaactactctggaggctaaggcaggagaacccagaagctgagatcaccattgcactacagcctgagcaatggagagagactccatctccaaaaaaaaaaaaaaaggaagcaggtgccagcatggcctacctttatttccacctgaacccctgactgacaagaggagagaaggaaaagaatgatcctcgttcacggcacagctcctctggctcctcctagaaagggatagaaggtgctctctcctacattttgcatcaggaaggaaaggcaagggtttctctctggattggttcccactttgggctccgtggaagagtctgccaactgtggcactataactctctcgggrgaaacaccatgggccttggtttgccaaactcttcacaagagaacttgacaaagatagtcaaattaataaatgcaacgaagggcttaattttctggtctgctagccagctggggaaacagttttgaaacaaaattaatgtatccctcatttcagactcacagaactggtgatttagaacaacatttccttttttcctgaaatcaaaacttcaaacgtcaggaaacgttaggctgtcatatcattagattgagccacttactggtgaactgtgatactgcagccatggactatgacagatgcatctcttattagaatcagcttccaygaaaatatctagtgtgttaccttggagtgggtgcatttaagcctctttaccagggcatgtgtgttccatgcctcatctctgaccatgagtggaagctgccctcaccccacattcccagcagcagccagtgggtgaggagaggatttggagagactacagaaggctctcaaacccccagcatcatagtgtttgggtgccacgtatccccgcacatgataaggatggcctaggcctcattagagaaaataggtcaaacggttccccactctggggctgtgaaagcccattaagagttatrctttgcccggaaagtcaggaaagccttgcatttcagccctccccagaaagttctgtttgctccttgggcactttgatgaggaagtgcagccgctcagtggtgagaaagagaacccggagcctggaggcttgtgggttctcccttctcctctgcaggacccatccaagggcagccaggaagcatttgttgagcaccagggccagtgcccaggtcagttactgtcacctcaagctacaactatgaagaggtggccctgtcctcagtgcaacagcaactgagcaagcacagacccagctgggagacctgtggacactgaagctgcaacaggcaggagccacagggaagagagcttaacctgggggtccaggaaaaggagggaggttgtgaggccaggcacttctgagcggggacgatgctgtctcttgctgtgcccacctgtaacgcctgggctgtctcccccaccctacccgcagttcatgggaggctggtttgcacatcctattttcaagaatggagattacartgaggtgatgaagacgcggatccgtgacaggagcttggctgcaggcctcaacaagtctcggtaagggcctggtgcccgcagtggtgagggcatgggcgtcggggtcacagaggcatgtctcgggcaagttaccmtgactgagcttctttgcttgctgggaagttacatgtgatcrtatatgtaaagcttagcccagcacctggcactgctatatgcttgacagaggggtttgctattatggttattatattgtggaacagccaggaaatctgttccaaggctatccacctctgagcaaccccactatgccactccacagacaaatcccagctcatcctatcctatttcatcaccgcacgtgtgaatgtgggtggcagtggctgacagtcaggcgtgtgctttgcatcacttggccagcaggtggcgatggtctgcaccaaagcgtccttccttacccgcccgccccttcttgtcaaggaaggagtagcaacattagcagccaacgtttacccatcttctgttggtatctttatttctatttaaatacgagtaaagtgaggcgcaaagattagggcaagatcacccagctattaagagatagagctgagatttgcagccaagctgtcggcccccagggcgcatgctgggggcttgagaatcatgcaggtggggtgagaggtgtggtgtgaggaagcgcaggaagcggcagtcactgcccacgggaacatgcccaccgctccaaggctggcgggaatcaagtgtgaattcycaacatagtctttgagtcctgcccctagacgcccccatatagtccagctgaggattaaaaatccagctcccaggccgggtgcggtggctgacgcctgtaatcccagcactttgggaggccaaggtgggcggatcacttgaagtcatgagttcaagaccaggctggccaacatggcgaaaccctgtctctactaaaaatacaaaaattagctgggtgcggtggcgggggcctgtaatcccagctacttgggaggctgaggccagagaattgcttgagctcgggaggcagaggttgcagtgagccgagatcatgccactgcactccagcctggacgatggagcaagactctttgtctcaaaaaaaaaaaaaaaaaaaaaatccagctcccacctcacaatgcacaccctggcctagttagggtaagttccccagagcaggctgtgcctaaaggtctgatctgcgaactgtgatctccagcaaaaccgatgagcgcccggcccatctgcacaactttgccgagcacctaccatttgcccgagccagggccagggggaggggtccatggaaggagaggattccattcggctcctcaagctgctgacagatcagctggaaagacagttctccatcccattccccaggctcttcagtacaaagaaaactcagaagatgagatcagggtaggctgggtagacccaggagatttcatggacaaggcaggacatcagctgagctgggccttgacaggggatagaatgtgggggattgcaggtcattctttccacggggcagagttgtgaagacaggcctagaggtaagaatgagtgggggtgccagagctgagagtggggagaccagcccagcagcagtgaaggggctgaggccacatggtggagggcctggaagccaagcacagggccttggctttggtgccacaggccattgctggcttctgagcagaagcrtcagggacaggaggaggctgtgctttggttttctcccatcatctcagaaaccccagggaaggaaggttcttgatccctcaggttaatggtagcagaaaggtcaagatgaaagtgtcagaggcctcagcagggcatctctgggccacacctaaaccagaagccccaggtctccctgtgggcatgcgcatgcattcaggatcacctgtacatgctgcacacaagtgtattagtcaggttctacaggagaggcttttcactcagagtgcctggaaaatgctccatctayaggttaagaagccaaagttcccaggctcacaagtaatctcagcactttgggaggctgaggcaggaggattgcttgagaccaggagttcaagaccagcctgggcaatatartgagactttgtctttacaaaaaatttaaaaattatctaggcatggtgacgcacacctatattcccaactacttgggaggctgaggtgagaggattgcttgagcccaggagactgaggttgcagtgagctatgattgcaccactgcactccagcctcagggggcgtgcagtgtcctcaggaggacagggcgagaccctgtctgggaaaaaaaaaaggaagaaagaaaacaaagttcagtgaaatcgtgagaactgagaaattcaaactcaaatactcaatttgcaaattatttcccctgctactttgaagatcttgaagctattattattattattattatwattatwattattagagttggagaaaagaggcatgcctaaacaaaccccaagaggagcagagaaacttggaaagggcagaaaacggaaatacaaattacacaagatacagggccgggtgtggtggctcatgcctgtaatcccaacactttaggaggctgaggtggggggatcacttgaggtcaggagttcaagaccagcctggccaacatggtgaaaccccatctctaccaaaaatataaaaaatcagccaggagttgtggcaggcgcttgtagtcccagctacttgggaggctgaggcaggagaatcacttgaacccaggaggcggaggttgcagtgagctgagatcgcgccactgcactccagcctaggtgacagagccagactcagccacaaaaaaaaaaattatacaagatctaactttacaaacataggggaagagtctcagatatgtacctcaggcatgctcttgattttgaaatctgtcatagatgctaaatatcagaatttgcatatgttgtttgaaggaaattaaaaactgtttatgcatgtgtgtgtgtgtgtgtgtgtgtgcgcgcgcgcgcgcgtgggtgcgtgtgtgtgtggtccttcaggtttcagaggctcttgtagagacctagggaagccaggtttatggtctggckggaggagcygcaggtgcttcctgcaccgcctgaaggacctcttctccttccctgccagtttcccctactcactgccaagtgcctggggttcggagagctcccccgccccagccctrtgacgttctcttctcaaagcatggctctccctgaagcccygccctcaatggcttcttccacccaggctgccagaatttacagagagtgagaagaggaggatcaacggcacctatgacttttttgggttcaatcactacaccactgtcctcgcctacaacctcaactatgccactgccatctcttcttttgatgcagacaggtaagtccaccaacagggagccyggagccatctctggaaaaggcagaaaggtgcccttggctgtgctctctgaggcctgcccagcctcaaaacagggcctccaacgccgaatgtgccggggtttgcaagatgctcgccaccccacagatcccaaggaaatctccagcaagcaagagggagagaaggccggggtctccagggcacctcccattagggcacatgtgcttggctttttgtttttttatttcatttttaaaatttatttattttgcgttctttttcacaggctgcttaactctaaaaatgcttggttgttaaaaaggattttcaagaaaaaaattgtttaggttttatcaaaattcgctttaatattaataaatattacaataatacaagagtaaaattttattttctctttttaaacaatgcttttatgaagtagagatagtaaaagattttggttcaccttttaagtaacagtttttatttttattttatttattttttttgagacagagtctcactctgtcaccaggctggagtgcagtggcacaatcttggctcactgcaacctccaccacccgggttccagtgattcccctgcctcagcctccaagtagctgggattacaggcgcgtacctccacgcctggctaattttttttttttttttttgtatwttagcagagacggggtttcatcatgttggccagaatggtctcggctaattttgtgtttttagtagagacagggtttctccatgttggtcaggctggtctctatctcctgacctcagatgatccccttgccttggcctcccaaagtgctgggattacaggtgtgagccactgcgcccagccgattgtctttttctttatgatatctatttatctagagactttttcatccatatcctgtattgttttttaaatttctctaagttaattttcacctttctctagtacctccttgagtagtttaataatcaaccttctgaattctttatctggcaattcagagatttcttcttggtttggatccatagctggagagttagtgcgaccttttgggggtcttatagaaccttgttttgtcatattaccagaattaacatttctggttccttctcattcaggtagactgtttcagtggaaagatctagaactcaagggctgcccctcagatccttttgtcccacagggtgatcccttgatgtggtgctcaccccctttccctaaggatggggcttcctgagagccagactgcagtgattgccattgcccttctgggtctatccacccagcagaattactgggatctgaactggtgctgaggaatgtctgcaaagagtcctgtgatgtgatctgtcttcaggtctcccagccatggataccagcacctgctccagtggaggtggcaggggacttaagtggattctgtgagggtccttggttgtagttttctttcgtgcactggttttctcaaacgctggttatgcgagcagtgaagttgtcatgtggacagactcaggacctctggttagccaggatgttgcaggcagtggaattagttgttgttttctctttctttggagcagggttcttctgttatgagttgctataatggcgtgagttggttggtctccagccaggaggtggcactttcaagagaggaggtggcacttttgaggtgctttccccttccactgccaccagctgcggtagtagaagggggattacaaggttgccctacgttggccagggtatttgggtttctcaggttatgggcggggccatagagctcccaagagtttatgtcttttgtcttcagctaccagcaaaggtagagaaagaccatcaggttggggcagcattaggcatatctgagctcagactctcctcgggtgaggcttgctgtggccactgtgggggaatagggggctggttctcaggccagtggagttctgttcccaggggtattatggcttcctctgctgtgtcatacaggttgctagggaagttgggaaagctggcagtcacaagcctcacctagctcccatgcagccagcaaggccagtctcactcctgctgtgccctgccaacagtgcrcagggcagagatctcaccccaggccacaagccttctctctgagaaagcaaacagggctttcaggccttgcccctccccacctgcccacactgttggctgtggcttctgtgcttttatctgcacttcttgtttgcccccaagattctgctcaggaaaattcatgcttctagttgaaattaataagttgagctagaagcttccttaatcctgcccctccctaattccactggcttccttctacaaggacccctgtaggataaagtcaggaatggcttccctgggctcaagctggggacagggagtggctacagggctcttcccactgcttcttctacttttacatttcacttggctccctaaatccacttgcgctctaggtaaggttaaatccttctcctatgatctggatgttcaggtccccagagaggatgtgtgttcagaggcagactttccccttctcacactttgggaactcacagttttgcagctgtctcatggagtttgcagtagcattctgcttctttcaaaggtctgtgaattcttttggtttttctggtatgttccagcagtagttcttggagcaacagttaacaatgtgagtctccacacactgttctgtccatccaagtgggagctgtacctaagtcctgtctcttatctgccattttcagaaaatctcattttgttccttttccatcaagcatctttccacaccagtagctctgactgtgtccaggttctttctttgaaaaccagcccctccactcccactgtatcctgaaacccccagagtcaggctcaccaagggggctgaggagactccagaacacccctctactccttctgattctccctccctcttatgagccctggggctgtccctgggaagacctccactagtgcttatgaaatggcccacattcaattcagctgagtcagataaatccaggtgctgataaaaccaacattttttttttccctgaaagatctgagtgtaggaagtgtctaaattcttggttcttatttgacatatgtgactacaggtgatcaggcttctgtggcctcccccagcaggcacccctgtggcaggagctgtccacctcctcgtccatcactgaagagagaggccaggctcttggacacttgaaggaggtgccagcctgtctgctgcctgtcttcacacaaagcagggcccctacaaatattcgtgcctgtggcctcacccgtggtctgcaagtggcattgactagacatgggtgacttgggggagcccattctctgaagacacagcactggcgtccattggaagcctggagctggggacccatagcctttcatagctggtgtaaggagccatctattcagagtagtggagggctgggctccatgagcaagaccattctctgcacaggcagagaaattgaaggacggagagctgagtggcttgtccaatgctatacaagcacagagtgcaggcagctagaaccagcgaaaggaggagaatttgaggcaatttgattcttctgggtttagtatgattcttaaggctagacaaaacctaaggcttttcctggtctaagtcctgttttgtgtttcgtgtaaagggcctcttgagatttacaaaacaagacctcatctttagtttttgaacttgtagaggagttgcttccatcgcagatcgctcgtggccagactctggctccttctggctgaagatgacgccttttggcttcaggaggatcctgaactggttaaaggaggaatacaatgaccctccaatttatgtcacagagaatggagtgtcccagcgggaagaaacagacctcaatgacactgcaaggatctactaccttcggacttacatcaatgaggccctcaaaggtacgacgggcccgcccttccmcagcgtgcaccttyccctgttggaaacatctgctatytgcaggagtgtgatacagcgtccttgggccacagtaagaagagaacgataagscttcttgctcctgtgggggttaagctttgctttagggccgcactctgagtttttttccttcctatgtctaagctcagcaagcaagcccagtggcctgatgccaccaaaccctagttcctggcctgagtcacttgctccccttgatcctccctgatgtcggaacagcagtgccctcctgagaatggtctgggtagggcccaggaggagtaggctgtgtggttgcctgtagggtctcttagtctccgagcaaaagtttgaggctcttggctcagccctaacaacttgagatgggaccatgaggataagagaatggaacaaatgctgagtaaaagagcaagcaatgcaccagcaaaggaaatgattagaaaaatcctacccagctgaaatatattctatctaagggctattttctacagggagaagcattaacattctaaggcactgaccaagatcatggatagaagtgtaggtgacccagggaaattagtccacccatgttcccgactcccattcagggctgagcctttctaaagatgctggtggctctacatctccatccacagaggacccgctaacagtcactgcatgcaaagaaaggggcagctttctcacagagctaaagccaaagcttayygccatctgtgaaggcggtggggagagcagtaggcagacctggcttccgaaggcctggcaggaagctgccttatgagataggaaacttatgcctagtcctctgtgtttgagcagctgtgcaggacaaggtggaccttcgaggatacacagtttggagtgcgatggacaattttgagtgggccacaggcttttcagagagatttggtctgcattttgtgaactacagtgacccttctctgccaaggatccccaaagcatcagcgaagttctacgcctctgtggtccgatgcaatggcttccctgaccccgctacagggcctcacgcttgtctccaccagccaggtgagatgtggctctgggagggaataaagcctaagggtgaagggcaggtggaagggcctctctcagtctgttttcttctagtttattaccctcctctctgctgccccatctccttcattcattcaacaaatgtttattttctttgaatgctccagacatttcctggggtggaacaaaggacacttagggtcaatgttacacctagaaaccagagccctgacctgggaataagcaggtctagactcttcttccagccctaccactaacttgctgtgcactcatagataagaaaccaggcacatgcttcagggcagttataaggatcaaataaagggaccatgaaagtacaatgcctgcaccatgtgggtgccccgtatttgttaaatgtaagagtataaatcactacacaaatgtaaatgacaattatccagtttcaattatacaggctgagaatccttcatctgaaaattcaaaatccaaaatactccaaaatctgaaactttttragcatgactggcatgacaacacaaatggaaaattcaacacctgaccccatgtgacaggtcgcagtcaaaacacagttaaagctttgtttcatgcacacaattatttaacatattgtatagaattaccttcacaccacgtggataagttgcatataaaacatatatgaatttcatatttagacctgggtcccatccccaaaatatctcattatgtatatgcaaatattccaaaatcttaaaaaatcccaaatctgaaacacttctgatcccaagcaagcatgtcagataagggatattcaaccgtattctaattgctgatagagatgtttaaaaaatacaactgcttaacttcactcagaggctcctgacacacagtgaaaggggatgggtacctccacctcggcatcccgtcaatggctgtgcggatttggggtaccgtgcagcctctgctggggtctcagagatctgagaactcaaatcagcrccagagcaccaaycaccctgtgtcacactctcctagatgcyggacccaccatcagccccgtgagacaggaggaggtgcagttcctggggctaatgctcggcaccacagaagcacagacagctttgtacgttctcttttctcttgtgcttcttggagtctgtggcttggcatttctgtcatacaagtactgcaagcgctctaagcaagggaaaacacaacgaagccaacaggaattgagcccggtgtcttcattctgatgagttaccacctcaagttctatgaagcaggcctagtttcttcatctatstttaccggccaccaaacaccttagggtcttagactctgctgatactggacttctccataaagtcctgctgcaccgttagagatgactttaatcttgaatgatttcgacttgctgagtaaaatggaaatatctccatcttgctccagtatcagagttcatttgggcatttgagaagcaagtagctcttgcggaaacgtgtagatactggtctagtgggtctgtgaaccacttaattgaacttaacagggctgttttaagtttcagagttgttaagggttgttaagggagcaaaaaccgtaaaaatccttcctataagaagaaatcaactccattgcatagactgcaatatcatctcctgcccttctgcaagctctccctagcttcacatcttgtgttttccagaaaataaaaacagcagactgtcctttctcctatggttgcccctccttgagaaagtaggttcaagagaagttatgaagtcacacaagccatctggagctccgattaagctttctcaccagaccaagtctttctgttgacattatattccttggggcaaataccacaacatgcagaaagtggccttttcccacccctcgaacacccccactgccactttttatgccatccccagctctcccatctgaccttggttcatttagtctgtttccttcctcctttcccaatttgtggtagttctaaacggcacataggacaactatccatattcctttgtgtcttcccaaatgctactccttccacctaggatgccctttcttctgaaaatgcctttaagtctcagctgaaataatgtacttcctcctctgaatggcttccctgaaatccccaggcagattctccttcgtctgctttgcttgtaaatatcccctattacaacttgaccatccagtttctatactggaattgcgtatttctctatcatcagcttcttaaggccaaggaccatgtctcattgtctctggcaagcacaacttggagagagcaatgaaaagcacaaatgctcctttcgtgtgttcacccattcacatagcatttccagggcagtggtgggagcagagatatgttctttacaatcccctcaaatgtgctgagagacaatctcagtgtgaaacacctaaacacttgattggcccatatattacatctagatagctgggaaaatgttttgtaaaaacagagtaattttgggctggtcttaaaaggatgatcacacttgaaatttgcttcttgtaagcattcctttccctatcaaaacattccaacgccatgagtcccaacctggcagtcaggagcttgtggtgcacaagcatttttctccatcaatcgactggaaaagtttgtcagatgggggtgggggtggttctaaaattgatattaaagacatttgttggccgggcacggtggcgcacacctgtaatcccagcactttgggaggctgaggtgggcagatcacgaggtcaggagatcgagaccatcctggctaacatggtgaaaccccatctctactaaaaatacaaaaaattagccaggcgtggtggcgggtgcctgtagtcccagctactcaggaggctgaggcaggagaatggtgtgaacctgggaggcggagcttgcagtgagctgagatcacaccactgcactccagcctgggcgactgagtgagactgtctcaaaaaaaaaaaaaaaaaagacattctttggggagaaactcagtatcataaggtgccaattatacctaaataatctcaaaactcaacatcacttttttgggacaacactaacaaaataatataaagaagtttcatatatgaaataaacttgtaagaagagccaggataaatctgggggaagaagattaaaacacattataaagctagcttagtttggtatagcagagagcaaacagatcaataaaggaagagaaagcctagacacagaagcatctgcacatggaacagatgcccacctcgcaggcagtgcgcctactcggggcagagggcccatgaaggcagtgagggaacaggctcctggggatgttagccacgggcatgggaaggagccaggtcctttccttggataccagatttaaacatacaaaaaggaaaccataagaatcctaggatataaaaaaattaatttttgaagtgggaaaggtatttataagcaagactcaagacctggaggtcataaaggaaaacacagataatactgtggaaaaaattaccaaatatactcaacaaaagggagggagaagccaggcgcggtggctcacgcctgtaatcccaacactttgggaggccgaggcaggcggatcacgaggtcaggagatcaagaccatcctggctaacacggtgaaaccctgtctctgctaaacaaaatacaaaaattagccagctgtggtggtgggcacctgtagtcccagctactcgggaggctgaggcaggagaatggtgtgaacccaggaggcagagcttgtagtgagccgagattgcaccactgcactccagcctgggcaagcgggagactccgtctcaaaaaaaaaaaaaaaaaaaaaaaaaaaaaagagaaaatattcactgcatatgctagcaaatggctgtaatgtacacagtagtcttataaatcagtaagaaaaatatgaaaacaaaaattggcaaggaatacacggagctctcacgataagccaaactgatcaataacatcaagatgctcacttcattcatgataaatacaatgcatacgagattgtatcatttttcatccatcattttgacaaagctaagaaagtatgataatacagtgttggcaagggtgtgggaaaatggacattctcatgactgttggtaggggttcaaattcacacagcttgtagaggaggcaatgcaacagcatctttcacaatccaaactgcaaacactcttctttcacttagcaagttatacaaacatattctacaggtatattttcacagtaagactatacctcccactgaaggttgcttacgatggcaatgtttgtaatagaaaaacaaaattgtgtaataaccactgactgccaccagagcatggacagtaagctgaatgcagtacattcatcaagcagaatgctatgcaaccattaaaaatgaggtagctcagtgtcgacaggaaaagatctcaagactatgtaagcaaaaaagcaagatgcaaggtagaatatataatatgatcccatttatttaaaaaataaagattacatatttgcttatatacgcatacaaattttctgaaaattacataagaaattgttaatagattacctctggagaatagtactggggtaagaggtgagggggcagaattctcattttacagccttatatactgttgtgaatttttttttttaccatgtactttttaaaaatacaaaattgaggagggaacctcctactccaaaattacgaagcattcttttatgtacatttctctaagagttatatttgatatttttcaaggcaaactgacttgaggtactcgatgtttttaaatgtatttctaataattattagtagggtcacacctatttgacagcttttttaaaaagtcacatattgctgtatttttaaagatgacaaacctttatttaaatgagatgcttgctggagattttctttttcaaactcactttttaagttatggaaataatatcactgctgaaagtttggaaaacatatataagggtgccaaaaataccactaaaatcacataaaccaatcttaccattattaatggtgtgatttctttctttacatatctattaatacctagtactatctatgtagaaaatgtgtttgcaaagctgagatcacactgtacctatagctctggatcctgctgctttttcccccaacacttaacagatgctcagtaaacatgttaaaccaagttgttaattagtattgtaccatttctcctcatcaaaaattacttctatagaaggcatttagttggtttccagttcttgagtaaaataaataacacttaatgagtatgtctttacctaaacattgtctgcatttatgatttagaagaagctactggatcaaacggtatgaaatattttaagtttctgataaatgtttttcagaagaattatactggttttcactcctaccaacagcgcagcctgtgttgctgtttccttgccaacactgtcaccattttaaaaagtcactgttatttcacaggtaaaaaatagaaagtttgctctgagaaaatttcttcctcccattacaaaataaagtcacagtctttccgtatgtccactctagagtgctatcttccaatctaaaacagaggaactgttttcaaacatcattagtttagcggtctccactaacaaagacatacggataaagtaacatgtaagtcagattaagaatctcaactttttaagaaaaaccaaatgactaaaggcatatttttattctatactttttgtcctataggtactctaggtccttgtgtaattattgaggacaaaacgtcagttaaaggtgagagggaaaactaggttgcagactagcagctgttttgcatctcacaagaacaaaggccttaacaaaccgtatactttatgcaaacaaagtgatgcctcactgacttaggagacaagtcacatgccatcagtgtgtcagaaaatttctttcttcagtgatagttaaggtaacctcgccagctactttccagagacagctccagggcaatactggggaaaaaaaaaatcagagacataggacctcaatagagccctgtgcaacaaaaagatgctagataacaaaactcaaagcaaaactaagatcattccaatttaggggaaagtttttttattcagtgtttaagattaaaaactacaagattttgcttgcagctgatgagtaaaaagagaagttaaacataaattctcatctgagtggctagttaaaatgctctgacaccgagtcaagttactcagtgacataccagttactttgggcttaagagtcttggagcaaagtagctctaaacaaaacgtgtcatctgaagcatagggctaatgggcatatgaaatactaaataagaagctgatggaggcaggctgtggcagatttttggttcttttagggttctagcagtggttgccatataagcaaggacctagcagagagttatttcctgtctttacttttctgagttaaacaccttcaacccacacccactaagcaggaataaagagacattttatagaccagttggaaaatataaagcagtcccacttctccagtagaattttagttgaattaaatcataagagaaacaatgattattgcacatattatacttgtcacactacatctgttgagtggaatttccattccaagtgttgttttcatcttcaccatcatcttgagtccttaatctataaattttcccctcctttttaaagtcgtctccacgtttttccagcactctttttctcactggttccctgatacgaaaaagagggagcaaggggaagatgtcataaaataaaaacaatagtaatacaagctgtttccaacttccatcagtacaggcaactaagttttacttttaatgccatctaaagtaaggaaagtccatgggagaccattatatctactaacacagtactagactttagcagtctttggtagtttagcttcatctgatctctaagtcaagccagccagccaaatcatatattccatttccattgtgtttcttagtgacttaataagcattagaggagtgtgaccatttgccaactaatctttcctttgttatttatgcaagccgacattatctactaaaacatttgtaacttagcaccctagagactatccaaagctccagtcagcttgacagaaagggtcaattttaaatccttcgcaaaatcttcaagaatgacttatttataaacaattaagaatgaagaggacttcctattctgaaaatacaaaggtataaggataaaatttaagccaacagacttttataactctagaggggagagaaaaaaggaaaaataatggtggaacacaaagcttcaccctctctttgacacaccttttattccatcctttgctctaatctaagacctttctcttatttgaaaaaagtgttgttttttgttcttttttgagacagggtgtcccctctgttgcccaggctagagtgcagtggcacgatcacggttcactacagcctcaaaactctggagctcacacaatcctcctgccccagcttcccaggcagctgaaactataggcacatgctatcacacacagctcactaaaagttttttttgtagagatggagcctcactatgttgcccaggctggtctcaaacttctggcctcaagtgatccttgcgc

SEQ ID NO: 95144 - DNA, 22657 bp, Homo sapiens
ggaaccagatgagaaaaagatgaaggctgaggcagaagagcagcctggtgaaagatgagaggaagcacagggtgggagagggggaacaggccggggctggggagcagagtgtgagaagacagcaggctgggtgctgttgcaaaatctgcccatgtattcattttcacatttcagaaaagcccctgtgacacccccatctcagacttctgcctccagcttttgcttttgttccccctcatcacaaggtcgtcccctcccaaggcccccaccctggtctgggtatctctgagtcacaagcacaaggctctccattcctctcgcctgtgttccctctctgattttcacaaggccccagctgtcctggaaaagcagaaaccagggactctagtcactgagagactggcactattctgtcccagcacccacatcaccagtccagctccctcctctacctccctgctcccagaagctccagcccagcagggcagccagagatgtcacagagatggctggtttcaagaaactcaggactcaatggtctggggcctggtgccctatcttctgggagctgggagaagcctctttcatccactttgttcttcaactccctcccctgacacctagtctccccacaggtggcttcccaggacccaggaccacatacgagccccatcttgtgggagtgggggtgggcaggctagggtctcctgtttaggaggaattataaccaggacttcaactgccagagccgtcctatcaggttacagctcagaaaccccaaccctcatccctacaaagagggaaaaggagaggaaaatgggagaagaccaaaacctgtgggcagtatttccatggagtttctggagaccaaccactgagacttacttcaagccagggcaagcagtgaagtgatcagcagctggaatcatgttcccactttggcagccccacccccgtgccacagtcccaccagcccacagttgttaggtccaaagtcccccagtcctatgggcctcttctgtgtttccttggctcctgcaggaggcaatgtctctgggaacacactcggggatctaccaagtcacatatctggccccccagaacctccacaggtttcttctcacagcaaggagaaacttgaagcagaaacaggagcattcaccagccatggtcacaggtagtactggctaactgccctgaaagtactcattcccatgaagcaggccacagggtaaggtctgcagggatggaccaggagaactgcttcttgttccctccttcaccgttctggaagggtggaaagtgcagggatcatcttgcagaccactgcgtatctactcaagtgacttctgcccaaccttccaatcacaacatagagaataatccagaaacctggattcccagacctgagttcagagatgatacagaaggcagaaaggaaagatgtgacatttatttcatccctactacatacatttatctttacatgcattatttcatttattctcacagtaaactctaggagatagttactagcaaggggcaaatatcaaatttgaatacaggtataagactgggtgtggtggctcacacttgtaatcctagcactttgggaggccaagaagggcagatcgcttgagtccaggagtttgagactagcctaggcaacatggcgaaacctcacctttacagaaaacacacacacgcacaaaaattagccaggcgtggtggcatctgcctgtagtcccagccacttggggggctgaggtaggaggactgttggagcccaggaggtcgaggctgcagtgagccatgattgcaccactgcactccagcctgggtgacagagggagactgtctcaaaaaaaaaaaaaaaaaaagaatacaagtttagctgattcaaaagtttgagctcaagctcaaacaaacaaaaatcacaaatacactccattatataaaactgccggctggggccgggcgcagtagctcatgcctgtaatcccagcactttgggaggccgagtgggtggatcactaggtcaggctaacacggcgaaaccctgtctctactaaaaatacaaaaaaaaaaagccaaaaaaattagccaggtgtggtggcaggtgcctgtagtcccagctactcgagaggctgaggcaggagaatggcgtgaacctgggaggtgaagcttgcagtgagccgagactgtgccactgcactccagcctgggcgacagtgggagactctgtcacaaaaacaaaacaaaacaaacaaaaaaaacagccgggtgggtgcggtggctcacacctgtaatcccagcactttgggaggccaaaatgggcagatcacctgaggtcgggagttcgagaccagcctgaccaacatggagaagctgtctctactaaaaatacaaaattagccaggcgtggtggcacatgcctgtaatcccagctactcgggaggctgaggcaggagaatcgcttgaacccgggaggcggaggttgctgtgagccgagataacgccattgcactccagcctgggcaacaagagcaaaactccatctcaaaaacaacaacaacaacaacaacaacaacaaaacaaaacaaaaactgcctcttcagatggaaaaaaaatggctaacatacctggatttaggtttgcttctgccaacacagaatatggtagtggttcctgtcctcaccttcagagattctgatttatttgatctgggataggcccacatatccatctatctacatgtgttttttttttttcttttttttttttgcacctgtagttacgaaccaaagtgtaagaaccacagaatcatctggcagaaaatgcaaaagctgaaggcaaaggggtgaagaaactagggctcagcttcaggctctactatctacttgcgctgtaatccccacccttcctggaatagtttctccctataaaaactgaaatagtatctgcttcatcaatccctcctacgtgggatacttgcatgcacaaagaatatagacatatttgagcaagtgggaagaaaagcaaaagctgaatttgagagatagctgaaatttggtgagccaaagatttacactctgaaagtacaatggtctggctagtttgcaaggagtaagaggcccattaaaacaaaacactcaactgcctcccactaccactaatatgcagcattttgccaattacccaagccctctttattttatttttttttttgagacagagtctcgctctgttgcccaggctggagtgaagtggcacaatctcggctcacggcagcctctgtatcctgggttcaagtgattctcctgtctcagcctccccggtagctgggattacaggcacacgccaccacgactggctaatttttgtatttttagtagagatggggtttcaccatggtggccaggctggtcttgaactgctgacctcaggtgatccacccgcctcgtcctcccaaagtgctgggattacaggtgtgagccatgtccggcctaggtcccgtttagtccaactaatttgaaaaggtttcctttgacagatacctctttattgaaaggatttcgggatcaccaattacagtttagtaatgcagtttgagtagcctgcaagaagcagcccattatagactatttaactgaaaatcacaaaacctgactttttttttttgagacggagtcttgctctgtcgcccaggctggggtgcagtggcacgatctccgctcactgcaagctccgcctgctgggttcacgacattctcctgcctcagcctcctgagtagctgggactaccggcacctgccaccacacccggctaactttttgtatttttagtagagatggggtttcaccatgttagccaggatggtcttgatctcctgacctcgtgatccacccgcctcggcctcccaaagtgccgggattacaggcgtgagcacgcacccggccaaaacttgacttttaatccattctcaaactgtgcccatgcccaaactgtgaatttgggcaagtcacttcctctctttaggtttgtttcctaagctgtaaagtaagaggactaggttaaatcaggtattcagagatgctgatttatgaaacctgtaataaatggtctttgtgaaccatttgggattatatgcaaaattccatgtgtgtgtttatatgtgtgaacatttttctggaggagaggtgcaaaattttcatgtgattcataaaggggcttgtgattaaataagaaggttaagaactgtttggctacccaggctttggctcttactctatttgcttcttggcctcctccatgacaactctggaagcaaagtttaaatcctgaagtatatataaataattgaatctggagtcctaggacaaaataaagacagataatcctgatctttttttttcttttcttctttttgagacacagtcttgctctgtcatctagactggagtgcagttgcaccatcatggctcactgcagcctcaacctcctgggctgaaggtgatcctcccacctcagcctcccgaggagctaggaccacaggtgtgtgccaccacacccagctaatttttaaacttttttttgtagagaggagatcttcctaagctgctcaggctggtctccaactcctgggctcaagcaatcttcccaccctggcctcccaaagtgctgggattagaaacgtgagccaccacaccaagcctaatcaggtttttgttgttgttgttttgagacagtctcactctgtcgcgcaggctggagtgcagtggcgtgatctcagctcactgcaacctccgctttccgagttcaagcgattctcctgcctcagcctccagagtagctgggattacaggagcacgccactgcacccggctaatttttttttttttgtatttttagtagagacggggtttcgccacgttggccaggctggtctcgaactcctgacctcaggtgatctgcctgcttcggcctctcaaagtgctggtattacaggtgagccacggcgcccaggccaagcctgatcagttttgtttcccaaagatctgaggagatttgcttccagtaggcagatctgaatcaaagcatccccaggacctatgatctgacctgcaaccgtcacaggagtcacaaagtcctgaggccaaactggctgcacctgaatcctaatggtcaatgccaagagggccattgattctgtggaaaccccacctactcccactttatgatatgcgcctgtcccttacctcaaaatacctccccactggtctgaaattcctcccccagggattcagtgctttgggtttgtaaagtctgaacatcctgtgcaacccaactcctttgggaagaggcatgacatgacgtcttgactctaattaactaaaacttggaagtggaggggagggaggacagggaaaggactggaagggaaagtgagagggctactgaagctttgtgcagggcaggaacggtaggccagactggggcaacctcaaggacacacggagtccaaagggttgtttacatactgtgtcctgcaccccaagcaaaacatctcctggagaacagggccagggctcaatctccccacaaaggcaggggcgtggagagaagcgacctctactttcccatccctcgcctcaattctgcacccgatctagctatggggtcaagcctggaggggacgctggttctccagacatggtcccgcccactgcaagtgccaccttggtaagggatttctccgagcagaggcaaacgcgaatttgtggccttcttaatcaagatgaggtcttcgagccctgtctgccgcgccaggtcgcgttaccttcttatgctcctccgccacagccagaccacgaccctcctgcacgcaatcccaccgagactgcgccttttccccgcaccccagcaggtccctaagtaagatggcggcgaacgcacttccggcgtgtgtccttacgggtgcgtccgggcggctgcttgcaggtgccacccagcgggttccagcttgtttgctgcatagattacaacggtgatggcgggcaagcggtccggctggagccgggcggctctcctccagctccttctcggcgtgaacctggtggtgatgccgcccacccrggcccggagtctgcgcttcgttaccttggtaatgagagatgggctcaccaaagacttccctgaagctaaaagggcaaaggccagctggtggaggtcgaggatctcgggaaggaacagctggtttaggaggggacgactggcctgggtagttgggaggctggattcaggattgacctggagccctggcttatgggagtcaggatgaccgaatacgtcggggtgagtctgccttgagacagggaagtggttgaatggttaagactcatccctaaagaagcctttggttatcttttttccccagttgtccccaccacatacrttgctttcacttctcttttcccttcctacctgtaccttggctttgcctatggtctccagtagcattgcttagctaagttagaatctctggaatctggaagaagtgactgactcctagctggggtcttttgcagccagtaggyttcccagagggaatgagacttccttccctaacatggggcaaaaggtaggctctgggtccctatcaaggggatgcttctgacctataggcaaaccattttattctctcagctgtaccgccatggagaccgttcaccagtgaagacatatcccaaggacccctatcaggaagaagaatggccccaggggtttggtcagttaaccaaggtgggtcagaagccagcctttcctcaggatgagctgcagaatgagcgacgtctagagcagtctacaaaacttggggtcctactaaactgccttttcccatatgggtgctgrctttgaccagatttcataaccttaatctctgtgcccatgatattgctgtgcatgactggccacttaatgaaagacttctgggatcagattaattgactccagcaaagcgtgaacctggaaagcaacagrgcctaaaccccatggggcttgaagccaccccttccctctagaccctcttaacccttgggtttgcccacaggaggggatgctacagcactgggaactgggccaggccctgcggcagcgctatcacggcttcctaaacacctcttatcaccggcaagaggtaaggttgggagctccagaggcaaggggaacraggtatgctgccctcatcttttgccctcagggagcctaaggctgaggctgggcactttggcctccttcttgtatttttggtcacaactacaggaaaagacatctgagagctgtctggaacaaagccctaggagctgagttgcccctgcttggctgggatgaggcaaatttgattaagcatccaaattcggacttaagggcgggcctggcaaagtggtttctgactgtgaaatcacaggctttccatccaagacattgagtacctattaaaggccaaggactgtgctagcactttgcattcagttgtgcaccatacagatatgatctctgtcttcatggagcttagaatgttgtgggggtatctaatgataaaccagacagggccaagatgaaagacagcggggaagacatgcgtagagagggcttgtcttttcttgatcaagatgaggtttttgagccctgtctgctgcgccaggtcgtgctatattcctagggcacatcagggaggactggtgagtgtgcctgctccttgagtcttcgccccaccccaggaatgggggaagctgttcctctgattaccactgtcagcctcagccgtatcaagaatccmtagacattgttattgttctcttaaggcccagctctgtcctgagcttgtccttccccagtttcctcctcccttttcatgagccactatctctgaataagctcttcaaaaaaaawttttttttttgagacagagtcttgctgtgttgctcaggctggagtgcagtgacatggtcttggctcactgcaacctccacctcctaggttcaagcgattctcctgtctcagcctcccaagtagctgrgattacaggtgtgtgccaccatgcctggctaatttttgtatttttagtagagacaggatttcatcatgttggccaggctggtcttgaactcctgacctcagctgatccgcctgcctcggcctcctaaagtgctgggattacaggcatgagccaccgtgcccggcccaaaatatatacatatattttaaaggggtctcactctgtcacccaaactgtagcacatgcctcagtcatagctcactgcagcctcaaactcctgggctcaagtgatcctcctgcctcagcatcccaagtagctgggactacaagtgcccgccacacttgggtaattaaaaaatttttttttgtagagacagggtctcactatgttgcccaggctggtctcgagctcctggcctcaagcgatcctcctgcattggcctcccaaagtgctaggattataggtgtgagccaccaggcccagccctttatcttatttttttctccctggtctctaagggtcgtcactggagccagtttctgccccaaggaccctgatctagacagggagagaggtgttgttatgaaaccagacagaccagagagccttactgattgactcagcacttttgactggaaggggcatttcaactaaggccattcccacaagagttcttcacagagtggtgacaacccccagtggagtgtttgggggatggggaaggccagaggccagaggagggtgagggccagatgtatggtaggtttagtttgctgggtgaccatcaggaacaggttctcctctggggctccactttggggtgaccaaaacttcccaccacacacacacacatacatacaaggctccacttcagggtgaccaaaacttccccaacacacacacacacacacacacacacamgacttgtgttgctatcgctgcaggtttatgtgcgaagcacagactttgaccggactctcatgagtgctgaggccaacctggctggactcttccctcccaacgggatgcagcgcttcaacccgaacatctcgtggcagcctattcctgtgcacactgtgcccatcactgaggacagggtaagagtggccagcccttccctggggtggtgaggggacagctctggccgtaggcctgctgatgccaggctccttttcccgctgcctgtttccccgcttcgctctacagctgctgaagttcccgttgggcccatgtccccgttatgagcagctrcagaacgagacccggcagacaccagagtatcagaatgagagttctcggaatgcagtgagtgggggcagaggtgcagctcaccacgctgtcttttccccagagcaggactgagaccctgatccatttttcatagcaatttctggacatggtggccaacgagacagggcttacagacctgacactggagaccgtctggaatgtctatgacacactcttctgtgaggtgagcccactagggtgcccactgtgatcattcttttccctctcagcmggcccaggtcaccaggacggtagaacacagtgcctgataccgtcacgcccctggggaggtccagggaggctgtgcttgtgaaacacgggaacttccctcatgggtgacagagatcctcagagtgggaaatggtttattaattgtcagcagtccctgctgctctccacccagagctcctttctgctgagtctcactttttgtgcctgagcttcctttcctgtgccctgaagcatccacaccgcctgccatgtctactggttccagcccmtctgcctctctcccctctccctccctcacacacacaggcaccttcccactagggaagagagctgccccstggagaggctggcctaggcctggggcgctaacctgcctgctgcgatacacagcaaacgcacgggctgcgcctgccgccctgggcctcaccccaaaccatgcagcgtctcagccggctaaaggacttcagcttccgcttcctcttcggaatctaccagcaggcggagaaggcccggcttcaggggggtgagtgacaaggacagcgtgtcactctactcctcaggaccctaaggcgttaaaaatctgctgtgggggcttctcacacacttccctctctactgaaacactccctgctctttcaaaaccaaatccccctcctcatgccgctagtcaccaaatttccccacctctcttccttttctgccattcatattctttttaaaaaaattgttattttttttcggggggatggagtttccctcttgtcacccaggctggagtgcaatggctcgatcttggctcactacaacctctgcctcctgagttcaagcaattctcctgcctcagtcttctgagtagctgggattgcaggcacatgccatcatgcctggctaacttttgtatttttagtaggaacggggtttcaccatgttcgccaggctggactcaaactcctgacctcagccaccatgcccagctaatttttgtatttttagtagaaacagggtttcaccatgttggccaagctggtcttgaactcctgacctcaggtgatccacccaccttggcctcccaaagtgctgggattacaggcatgagccgccatacccagcctatttattttgagacagagtcttgctctgtcacccaggctatagtagagtggcacgatctcggctcattgcagcctccacctcccaggttcaagcgattctcccgcctcagcctcctaagtagctgggactacaagtgcctgccaccacgcccarctaatttttatatttttagtagagatggggtttcactatgttggccaggctggtctcaaactcctgacctctggtgatctgcccgcctcagccttccaaagtgctgggattacacacatgagccaccacgcccagccctgccattcatgttcttaagtttcgcccacatcagaagaccctccctctcctaaatgaatagctgccccaagagaaccactgggggccattttgagaaggctgagagtaacacacatgccagcttccttatttgagcacctaagggcatgcctgctgtcacacctttttgacatctcacttttcagagcatatggtagttacccgggcatgcacccacccgctgtgtactctgaagcaatcttaagtttacatttgtttcaaactgaagtgcttctgtaaacacaggcaggtttctacatccgtgttgaaatataggcagatatcttgttttgtcttgcttccttctgtacatttgacagttcttagagaggaggggtgccacagagttcttacatggtccctatgacactaaagagttctccgtgtaggtgatgaggcccaggcctggcagagggtgaaaggagcacagataggtctaattagaaggcagaggtggctgtagccagcaacaccggggacttttctccttcaggagtcctgctggctcagataaggaagaacctgaccctaatggcgaccacctcccagctccccaagctgctggtttactctgcggtgagtgcctgcgctccctagcgtgctgtgtcaggcaaggagctggatttcttctctgttcggttcctgcgggtgtggggaacaatgctgacgggcagcccctctcccccrcagcacgacactaccctggttgccctgcaaatggcactggatgtctacaatggtgaacaagccccctacgcctcctgccacatatttgaactgtaccaggaagattytgggtgagtggagctagcagtgtcctctggagggrrgccctcrggaggtggctcggggcagcccaaggaccccatgatgggcaggctgagcagctcccatgttgcctcctgtcgaccctcaggaatttctcagtggagatgtactttcggaacgagagtgacaaggccccctggccgctcagcctgcctggctgccctcaccgctgcccactgcaggacttccttcgcctcacagagcccgtcgtgcccaaggattggcagcaggagtgccagctggcaagcggtcctgcagacacaggtgagctgtcaccggcctccttgctagtcatgccctagaccagcctgcagttcacatccacgcatctcaagagctgtcgcacttccagccatttgactgcatttgctaggagttccctccccgaccccagactgctttataccttctccccacttctcaccctcgggtgatgtctcacttgtatcaccgagaaaataagagccaagagagaattggctcgttctcccacyaccaggttacttcctgggggaagccaccgcttagggtggcctctccacccgcacttgggttctctcctcatctctgcaaggagctctgacgcctctgcttctctactggatcacttccctcccaaaagcccatccatgacctctgagagccacctcttccccagccaccagcctcttccctctcagaatggaatccttgaaagagctgcctagaatctggctctgcttcctcaccacttgttctcttagactcacattagacagtcttgtgtcaccttccactaccctgaagccatacttgtctggtgaccagtcacctcctaccaaagccagtgactaattcttagcttctctcacctctcagcagcattacataattggtcaccccttcctgaaacactttcttggcttctgactttcaggcgtcccttcctcactaaagaacggatgacccaggactcatccctggagctttccccatctgtgcacactcccaagtgatctcatgcagcctcatgactttatgcccatctccatgcccacttctgtccttacgccctgactcacagattcacaacctcttctctgagctagagactcatatccagctgccaacttgagatctctacatgcatgttaagtaaggcatctcaaagttgcaatgtctaaaaccagatgcttttccttccacagctgctcttcttccaggcttccttgtttcagtcaatgccacgagtcacctagtggcacagtataacccttggggtcattctgcataccgtttctcatacccctcatccagcccactgccagatcagctcaacctttcaaatattaatatgtgctcttgcctccgcagtccaatctaccgtcagctcttgcctgaccgaatgaaaagcttcctagttctttctggttctattcttgtccctaccagtctttcaacacagcagagttaacttyttttatttttttgagatggagttttgctcttgttgcccaggctggagtgcagtggcgcaatctcggctcactgcaacctccgcctcccgggtgtaagtgattctcctgcctcagcctcccgagtagctgggattacaggcatgcatcaccatgcccagctgattttgtattttcagtagagatgaggtttctccatgttggtcaggctggtctcaaactcccaacctcaggtgatccgccygccttagtctcccaaattgctgggattacaggcatgagccaccgcggccgactgagttaacttttaaaaaatgtaaaccagttcatactactgtcctctcagaattttctagtggcttcccatcacatatagaataaaatccaagttcttcaccatggccttctaggccctactccatctggtctcctgccccatctcctacatgccccttgcttactctactctggtgagactgactcttgatgatactagcatgtgccaggcttatccccacatctgggccttttgcccttcgtctcctctgccctgtgatactcttctcagattgttgtatgtcattcattgactccaggtctctgttaaacttctcactttctcaatgatgccttccctgctgacctactttgctttgtctctctgtatcacattcgtcactgacctgtcactcctaattttttttttttttttgagacggtgtctcatcctgtcacccaggctggagtgcagtggcgtgatctcggctcactgcaacctctgtctcccaggttcaagcaattctcctgcctcagcctcccgagtagttgggattacaggtgcacaccaccatgcccagctaattttttgtatttttagtagagacggcatttcaccacgttggccaggctggtctcaaactcttgacctcaggtgatccacccacctcggcctcccaaagtgctgggattacaggtgtgagccactgcgcacggccaactttatttagtagagatgggttttcaccatgatggccaggctggtctccaactcctgacctcaggtgatctgcccacctcaaccttccaaagtgttgggattataggcgtgagccactgtgaccagcccatttgcttatttattacatcccctctcctagaatgtaaactccatgagagcagggactctgtcttggccacctctgtgtatctcctatatgtcagaacagtagctggcatatgatggaacgctgacatgacctttctcttgcctcccccatgcccagaggtgattgtggccttggctgtatgtggctccatcctcttcctcctcatagtgctgctcctcaccgtcctcttccggatgcaggcccagcctcctggctaccgccacgtcgcagatggggaggaccacgcctgacaaccactcagcccccttccctccacctcctaggggaggtgggctgggccctcgctcctgactgttgctgctccccagcccatggacaggagatcctgggttgggcctccctctgatgaccccagccagatgagcgagtggggctcagcgtggcccatggtgcctgtcactcagcattcccatgcctgatgtttaccaagtgctgtgttggacactggctttctccaaacaggatttgcctcctccacgctccctacacacctgagatgtaaactggcagtcagtgttcactcaggacctaggattagaaaatggcagagttggtgctggatccaccttgcacttctatcaagccctgttctttttcctccagcctgaagtcttcggcaaatagctcagagggacayggtcttgcctctcagtgcttattttagtgggaaaaacagctaataccaggggtacaaacattggctcccaaggaactggatcacccaacagccagccagccacatttccctgtgtctggctagagccaccattagactcagacagaatgcttcaggaatcgttgtcaccccttcaactggagcaggacrgaaggttgtctgtacttgggagggagtrgggagtggtgggaagggagttgcttgtcacacgaatcaggaaactgctctccctcagctgggctggggtctccagggacctgagctacatgcaggttgtgagctggaaaagaaagttytagactgtggcccagaatagggctggggcagctcccagagaatgaatagtgctgtttcctattggactgatagtgctgtttcctgtgctttttcttcatttctgagacgcaagaagctctctgaccaggtcacttctggaagatccacgcagaagctcagtcggtatggttttattggccatatcaaaagtgagcacaaatcaaataactgcttgatccctctgctaccacccactgagaggagaaaagtcatttagttccaagataaccttggttccaggctagatacagaggggcccttgggacagctgtgtcaccaactctggagcagtctctggaggcaagtccagagcattaacataaaagtgtcccagtcccacagtgccccaggtcccagcacccctgctccaaccctaaccttggatacttttggccctttaacaaatcrccacctctgcttgcaggacttgatcccatgtgtgggctccaaggccttgtctggcccacaccttctttagtgtctctcacttccgtgtcctggcttcctcctggctccagatgagaatgtggtaacctaggaagagtgagaccagtctgacttacacyttctgttaccaatctctcagagcctggggctggcccgcaaacctacratttggtaaagaaatactaggaaggccgggcgcggtggctcaagtctgtaatcccagcactttgggaggctgaggtgggcggatcacgaggtcaggagaccgagaccatcctggctaacacggtgaaacsctgtctctactaaaaatacaaaaaattagctgggcgtggtagcgggcacctgtagtcctagctactcgagaggttgaggcaggagaatggcgtgaacccaggaggcggagcttgcattgagccaagatcacgccactgcactccagcccggggggacagagcgagactccgtctcaaaaaaaaaaaagaaatactaggaaactggacagtagccaggcattgcatgaccaagacaaagccagaggaatggagggccttggctatagagaccactgtctcccagccatcttcttcgtgggccactgccctggggtgaatgtggcagggcggggctgaggctggcccgcactgaaccttgggaagtaggatcggacttggcaagtcagagacattctcctcctactcacccattgcagaggccagcgtgtcccccatgggattgaattcattaagctgcagagacaagagtgtcagcatgaggagagggtgaaggtattagcagagacacctgatttctggtcacttttggtcaataaggtaggttgaatccctgcttcctcccatcattatttgaggacccaagcctcaccgaactgatgccagaagattctgggtcatagagctgacacatcatcttccctgagtttccatcgaacacgtcgatcgtcctcaattcataaggggtacaacttttgaaattaggatctgggtatcggcccacaacaatgaggttgtagcgaggatgccaggctgcctaggagatggagaggccggccatgagggtaaacacagaacatgatcaagggggacatcaaaaacaaatatgaacaaagaggaacatcaaaagtattctttgggctgagtgcagtggctcacacctgtaatctcaacactttgggaggctgaggcaggcggatcacgaggtcaggagatcgagaccatcctggctaacatggtgaaaccccgtccctactaaaaataccaaaaaaaaaattagctgggcgtggtggtacatgcctgtagtcccagctacttgggaggctgaggcaggggaatcacttgaacccgggaggcggaggttgcagtgagtgaagatcatgtcactgcactccagcctaggtgacagagcaagactctcaaaaaaaaaaaaaaaaaagtagtatttgccagtaacaagccaacctaataatggagataagtcttacagaaaactacaagaatggttttaggttgtgtgtgcctctgccattgcacatttttaatccctagctggcctccctggcccttagggcaccttcaggccttctccctcatttgcatttcctaagatcataccaactggtaaacgttttaacatcagcctgacccagatactgacctaagaggcctacaacaaagcagaaaaagcctctggtgaccaaaccctaacaggacttgagttctggaggagccccactgtcatcctgtctccatcaacacgaataactaagagctgagtgtaaaattgctaatggctaaaaaagagaaggaaacccacattccccagatcaccccactaaaaacaaatctggcagttattaaaatggcagaattggatgggattttcctaaacttctcaaggaagttttgaaggaagaaagacatggttagcaggaaggaagaaatagtacatgcgaaggcttagaaataagtcacaaatcacacacaggaagctgtaatgacttacgacacctggctagatacaaactgggacatgcagacagatggattatcgggaacactgatggattaacaggaacaccaactggggaaggattcttgacattatttattaagagcttggatgtgattgaggtacgtgggggccactcaatattcaatcatcatttattgaatacttaccagtacttaccaggtgctgggcatggggccaagtgctttaagtatactgactcatcttcacaacaaccctatcagttagagactagtattccctttttgcagatgaggaaacagatccaaaatataagtaatttgcccaaggattctaacccggggggtctggctgctggaaactggcgctccccaccactattctgaactgaccagagaagtataggcataaaacctgaagatctgaagaggatctgtagttttggaaaagaatgcagaactagcagagctcagtctgcatgggggcttaggcaaaaaggcatcaaaggacttgaaagctattagtgttggggactaatgatagagaagctattaacaagagcctgagaaaaggtgggaaaataaaagacttatttttattattagaagcactgaaacctgcaagacaaactaagaaggcaaagttgccaggcgcagtggctcatgcctgtaatcctagcactttgggaggccaaggttgggggatggcttcaacctaggagttcaagaccagcttgggcaacatggcaaaaccccatctctataaaaaataaaaaaattagctgggtatggtggcgcatacctgtagtccaatctacttccgaggctaaggcggaaggattgcttgaacccaggaggttgaggctgcagtgagctatgtttgtgccactgcactccagcctgggtgacagagcaagaccgtttcaagaaaaaaaaaaaaaaaaaaaaaaaaggatcagcctgggtaacacaagaataccctgtctctacaaaaaaaaaaaaagtgaggcaggaggatcgcttgagcctgggagatcaaggctgtaatgaaccatgcttgccccactgtactcccacctgggtgacagagcgagaccctgccttaaaaaaaataataaaaaaataaaaaatgaaggtttgtgggtcaactgtacacaggtaactgaagctgagaagacagaacagagggtcaggatcttagaaaattctcacagtgagatcagagctgggctgaaaaaactcagaaaaatatcttatcagcgagacagaaaactcaaccatatgggatggcagaagtgggataaaaggaagagagagagccaatgggtaagagatgctctgtgctcgggccaggagcgatctggggtggcaggcttaccacatcagcccttccccactgtgggcagacctgctccggcctcatgatcacagcctccttctgcgagctccttcccaccgccactcaccttgatgggtgtgaggtgctggaagtgacggtgagggtgcgggatcaggcccagggggcagtcccactgggaagcagagtaaactcggatctcgctcttctggtccgtggtcaggagccgggctccatcgggactgaaacaagctggcaaagtgaaaagcccctgagctgaaggaaccacaagccctctgtggtcctggccttgcaggccttctcctgcaggggtactctccctcccactcctctctagacaggagcggaaaggaagaggtgaatctgggctgtgaacaacaacaaaaaaattctggaaactcagcagctgatggggacagccacagccacaaaggttcccagacatcagcttggcagacgctatcaggggtaaaggtttgacgtagtggcttccacactgagggaaaaccccagcagtggtcagacaggcagggtctgcaggagagatgaggtctgggatatcacacctgcgttgacaggatgcctgtgcggcagcgagtagaggaagctggctttccctctaacctggcgcaggtcccaaattttcactgtttgatctacggaggctgtggccaggaaccaatcacagcatgggttcagggccacatgcgtcactttctttttgtgcattctgagattccaaagctgcagagaagagctcggttcaggtggggacacagaaccgaggtgggggtgagggagggaaaggcaggacctcggagaacgcacctctttgccgtccatgttcagcaggatcacgttccccacgttgtctcctgtgaccaccattcggctactagcagacacatccaggctacaaaaccagatgctggagggagagactgtgttgtaagattcttggggacagagatagtcctatttactcactgttgccgctccggtgactaacccacagcgggcattcaataaatatttgttgaatgaatgaataactgtcttgccgtggattcctagtgaggaacattcagactgctctaccgtccagacagaggggatgggataatggggctcagaaatctgtctggttacggctgggcccaggatccccagctcctaaaagtccctgaagcagacaaagcttataccataaagcaagccctgaggcacgcctgccccccacaccccgggttctgagcaagcctcctttactgctctctcctttcactcttcaccctttaggccaaaggagacacaagccaaagagggattgcctggccctgttcctcagagctggctagaaaagcacttctgcccccttctgaacactgggggaaaaaacacaaccaggagctcttctggtccctcaaaccactggactgggaggctgactaggggggtgcttcagggatcctgctattcagccagaagagctcagctcacagtttttctctcaaactctcaaatccatgctacactgccttttgccatcccctatgaatatcttcaagcaggaagatttcttgcggaagagtagcctggagccttgtctatccaattgcctgctgatttgcgtgcgcatgcactcctcatccctgcgggacagcccaggatccaatccaatgctagttacaccccagcaccctcacttaattcctcagggagcagtcagagtcacggctctagctggaaatcaaagtgacgagtattctgtaatttttttttttttttttgagatagattttcgctcttgttgcccaggatggagtgcaatggcgccatctcggctcactgcaacctctgcctcctgggttcaagcgattctcttgcttcagcctcccaagtagctgggaattacaggggcctaccaccacgcccagctaattttttgtattgttagtagagatgggggtttcaccatgttggccaggctggtctcgaactcctgacctcaggtgatccacccaccttggcctcccaaagtgctgggatttcaagcatgagccactgcacccggccgcattctgtaatttctccagccactttctcttgggaagtccagagcactttatggaaaagattccatccatataagcttccacccaggaacaggtcaggtcattacaccacagtgagtgcagggcattcagtctcaagttctgagctgttgctccattctctaggtggctttctgggtccacgccatgctggcttatctagtgagggtcaaggtccagtctaatacaggtatgacttacagaagagctgaggctccagaacaccttcccaaagcagtaacccacctggaccaaagtgagggcagccaaggagcagtttgagaaagagaaagaagggcggaaagtggctgacatctttcctttcttccctgggccaggttgggttaaggaaatgggatctggatgctcttgccggaactacacctaagcttagaagccctttcccctgctagttaaactactcacttgatggtgtctgagctggcaaaaactcgtagaatgttgcctttaaagtcttgcagcctagttgttccctccattgaggaggcgtaaaactggttggtattgagagggttaaacttcagcccagtgatgctccctccagctccaatctaacacgaggaaggaaaaagccagtgagtgatgatgggcctggccgtgaggaaccaggcctgggcacacatgctgcgccgtcacagaagcacccctcgagcagcgcttggggccaggtcagcttagacactaggacgctctctacagggccttcacttctttttcttttcctttgaaatagggtctttctctgtcacttaggctgaagtgcagtggcacaaacacggctcactgcagcctcaatctcctgggctcaagcgatcctcccacctcagcctcccaagtgcgtgccaccatgcccagctaatttttgtattttttttttttaagatggggttttgtcacgttgcccaagctggtcttgaactcctaagctcaagcgatccccctgccacggcttcccaaagtgctaagattacaggcatgagccgctttgtctggccccttcatttctttcttttttttatttttatttttatttttatgtttttgagatggagtcctgctctgtcacgacctcggctcactgcaacctctgccttccaggttcaagcgattctcctgcctcagcctcccaagcagctgggattacaggtgcccaccaccacgcatggctaaattgtatatttt

SEQ ID NO: 95145 - DNA, 75631 bp, Homo sapiens
agcaagctatttttaacatttcaacttgctagtcactctttcatgtttatgtaacattctacatgctcatcttctgcctgggaaatacttatcaatatccttactcactcattgggattcaagtcatatattacctcctctgtgatgccttcctagaatctcctacacagttgttcctctgtgtgcccacaatactttctattgacttttcctatagcagttatattttattgtgtttatcttttttgcctttttttttttgagactgaatcttgctctattgtccaggctggagtgcaccagcactatcttggctcactgcaacctccgtctcccggattcaggtgattcttgtgccttagcctccagagtagctgggattacaggtgcctgccactacacccggctaatttttgtatttttagtagagacaaggtttcactatgttggccaggctggtcttgaactcttgacctcaagtgatccacccgccttggtctcccagagtgctgggattacaggagtgagccaccacacctggccttttttgccatcttgacaaatgctgtccaacaggaagataatacaagccacatataatttatttttattgttttttagaaagagtcttgctctgttccccaggttggaatgcagtggtgtgatcatagctcagtgtaactaacctcaaactcctgggctcaagtgatcctcctgcctcagcctccctagtagctaggattataggcatacgctaccattcctggctaacggccacatataattttaacttttctagtagccacataaaaaaaaaaagtaaaaaaaagaaacagatgaaagtaattttaattatatatctataaataactggctgctctaagaaataccagaacagaatgattgaatggctttgtttatggagaaactgtaatctgtgcactgttctctactttggataactggagattagcaaatgagtcaaatgttttatttccttagagtcatacctttgtagacactgacaagcttttttacacataggtgtggttggctgtgtgaagttctcccagtttagggcctttgtttgcaaatatatccaggaggaggccttaccttagaagcccaagggtgtgctggtagtgactttagggactttaggtactattctcaagaagcaccacccaaagaacagggcaagtcagagtctggggcttacatcttggacatgctatgaccttagataaaagatgtcgaattagtcattctcatttctgggcatctgtggcagctctgttctgactcatgtgcaaagggagtaaatccctaagaaagaaagaaaaagaaaagaagacaggaaaaagaagaataatttccagagttctatacagttactattgctcccaaatgagctccaaatcatggcaatgctacccacaaaagacagacagaacaatgaccatctaatgagatgtggaaataaattggccaacaagatgccttcttttcacaatgatgcttgggaaattgacaacagatggtatctaaaacatgttacaaatactgtgcctcttctttccaagacctgggagctgggtaataccagggcacttttatcaatcaacaacgtctagaggagatagtcgagaaccagaaagtcaatagtcaagacacaaagaataatttagaagatcgagggacatagcagctccatttttgttccacttagattaaacttgtggaatatctgagggtcagagcattcccctccagatgaaaaccaaacttatttcacagacctctgaaacacccagaacagatactggggaaatgaagccacaggaacctgtgtgtacttgcctagacaggcaatcaatgtactggtggaaatgttaaaaccttaataggatttttttgtttttgtttttactaacaggctttaaaaatatttttaaagcagacctattctggaagtcatgattgggtgcagggcaaggcagataccataaaatgaactacagagaatactgctctcattaaaatttagttcacttgggaaaagttgcctgtaactctttctatgctgagagtgaacatctctggtgcattctagacagttatgatgggttttccacagcaactacaaagaaagttgtattctcattagttttatcaaaacaaatatttttaatgtgctacagttacttttaaatagtttatactttctattgtcatgcaatctgtaaagtaaagcatggtgaaaagaaggattaatttggtgaattccatgatgggtgtgtatataagatgctgggccaggcgtgctggctcacgcctgtaatcccagcactttgggaggccaaggcgggtggatcatgaggtcagaagttcgagaccagcttggccaacatggtgacaccctgtctctactaaaaatacaaaaattagccaggcatggtggcaggtgcctctaattctagctactcgggaggctgaggcaggagaatcacttgaacccaggaaggcagaggttacagtgagccgagattgcatcactgcactccagcctgagggacagaacaagactccgtctcaaaaaaaaaaaaaaaggctgaaggctgggcacggtggctcacacctgtaatcccagcactttgggaggccaaggcgggcagatcagagggtcaagagattgagaccaccctggccaacatggtgaaaccccatcttcactaaaagtacaaaaaaaaattagctgggtgtggtggtgcgcacctgtagtcccagctactcgggaggctgaggcaggagaatggcgtgaaccggagaggcagagcttgcagggagccgagattgcaccactgcactccagcttgggcgacagtacgagactccttctcaaaaaaaagactctgtactacttattgtgagggatacaaagatgtataatgacaagacataatgacttggtctggttttggaagaggcaaatgaagcataagtagaaagataatggggcttgccatcaaatctatctagattttaatcctacttctgccacctaacagctatgtgtctttagacaagttacttgcctcactgagcctcaagtttgtcttctacagaatttagatgaatagatgaatacttgcatagggctgctgtgaggataaagtgaagacttcatcagaactatactgaataagacatttccacaaaaaaagtgttagaaaatgacacatgccagaagaaaactgtttcctcagagcagtatttgcataaaaatgcttgaacttgttttttgtttctaaaaatgttatgaaattctgagagtcataatagccacgttatggccaatatgccaaccacgttaagggtagcatattcgttttggtctttattcctatatattttctcaatgatatatagtatctccctttaggctagaaactataatggtacatttttggcttggtgtaatttaccttcatttaaaagatattgtttctatagcatggatcaaaaagatgtagagttgtttcatgtttgaataaaattataatgcagttgataccaatatatggcgcccaattttcagggatcttgctgaataaagatgggaaaggcagatgaatgaatgattgatgtcattacatttttctagtttaaactctggtgcaaaatctttcactgccttttattactcactttttgtagatttattaattctctgaattcatttaagaatgatagtatattatggaagattcgagtcatacaacatgccttacccatgaaattgtaccatcttggagagtgatccattgttttttaaagtcttcctccagaaagcactctgtccatttgtgggggtctgccggaggcacacatttcatacacattgacttgaatcaaatgagatccctttgtgctctcaagtgtacggctatttttgagaatcatttattaagtgattacttaataattacatcatattttcctcagaactaagcattactttgcttttgtacttatatcaatttttaaaattaagacatatgcacaaacaacaaaaagtttatgaagtattttctggaaatagtgtctatttcctatagtgatattaccctatcagtatactgataaaccttagcagtggttaacttagctacacatgttctaacatgctcctgaatcccccatgctgggttacatcctctttctaggtattccctcatcctgtattacactggcattgtttatgtctgtctctccattaaaccctatgttctgtggaatactgtcatatccaagtttatatgcctagtgtagtgacaagcactttaaataaaggcatttacctgatttaaacaacttaatgactaaattaataaatatgaatactgtaatctttgttttgttgcttgtgttcttttacagattagaatttggtccatagttcttacgtttgttttgggagaatattttgacccacttctaagaagtgtttcacctgatcctggctatttatgactatggctattggactggatgggttccaggcatacactgtcttgcctaaagtagcggaatgcgacatccctgagggtaagcaagtgtgttagctttgtgttctgtgccctcctccagaaatgacagtacttgctgcaagactgtgagctcatcgaggcagaagccatggcattcaaattagtttcctgagccagaacttaacatctgccacaaagtaggcagttcagtgagcttttgtagtttccaactggatgcagcactatgactgcttttagctactaacagggccaggcactgaaacaagctctaaatccccacagaaaaatcactctgagccatccatccctaaataccaacctgtgcatgctattcaccgtgccaagagcgttcactcatttttgcttctcacaaatctttttttttcttcctatggcttgcatgttttgaatgacagctaaatcctaatgcggactgtttatacaatggagtcccacggagcccaaagattgtggtaatattattacagaattctcatgatccttttattattttttaaaaatgagccgtatgaatgtggtaatactattaagtgtccggctcgatgaattcctccatgtgtacacagcccggaacgaccaccaggatcaagacgcaatgtttccagctttccataggttccctcgtgccccacccctcagaagtaaacgttattctaactcctatcactaccggtaagttttgtagggaattattttggaggaagtggaaggtggaatgaatgggcccacagtcccctgggrctgggcgagacccgtggaggctccaggggtccgtagagctcttcgctctcaccgacccgggccacacccgccaagctggtagttctccgaacggatccctcacgcccagcaatggccggagggcccccgggccccaccataatagcgctaagcacgccacaatggcagccccgctgtctcccgcgcgggcctcgctgcgtgctcccaaccttgggagttggcgcccctcccgcgcgacggacagccgggcgtggccctgggcgcgacccgacaggacgccagcagccggcgggggcgctccaggactcgagatgtggggcgcgggcccattggctgagcattcccccgcgagcctcccggccgcagggcccacctcccggccctctctccgcgcccccattggccgttcgcgttccgcgggcgtccgctcccgccccactcccgcccggagggaaaccgggttgggggtgagaggctaaagcagggaggaggatgactggtcctgcggataagggtgtgcgcgagagccaatcaaaagcggatgtcgaaaagaggcgccgctccagccagtcacgtcgcgaggtgcggtcggggccggctgacgcgactgcgggcctcagccaatgggcgtgccactgcccgtccgctcttcagcagccggtcgcgggcggtggaaaagcgagtgaagagagcgcgacggcggcggcggcggcggcgcagctattgctggacggccagtgggagagcgaggcctgagcctctgcgtctaggtgagaagggggtgcgccagcgggagcggccgggctgcgggctcctcctcgcctggctcgggaagtggttgcgggagctcgggctgcaggcctggccgaggcgggggcgccgaccagccgtcccgcccccgcccccgcccgggtacgcccagaagtgagggcgcccgcctcaccccgggtggtctctgcccctctttgccccgccgccgcccttcacagggccgggaccgcgtgggggacgtacggtggggcctggtttgcagccgcggagcccggggagccgcctggggtgggaggccgctagaggtggcgaaggtggggcggggtggttagccgagcagcgggctccgcgtgctcgcgggagggtagcggcaaagggaggcctagtgattgcaggattccgggtctggggaggaagaaagtggtgggaaataggtgatgctyagaaaagggtgctgagggagaaggcgcggggccggggagtgtggttggcctattagaagtaaggattgatagggcctgggtggagatcagctgggagtgaaggggggacgggcttgggttttgaaggtgaaggtctctggagaactggggacacgtggatctggagtaagaggcacctactgaaaccggaaggtggctgagaaggttttatgtgaggtgtggacgggaggctattggactagaaggcattagttggtctgttaggacaaagtatacaagcagcaaacgcggtagatttatgtgtggtaggtgaaggctgtgaatcttttatgagtagttgagcaagaacagttgtctgattctgcggtgtcggagagtggagggtctcaggtagtgtcttggtcaggtttgaaggttaatttactgctagtggagggccaaatactcaaaagagtttttaattctcactactggggctgatcctcctcctacactccacccctcctgccatccctgtgacagttcatctcgttttgcctcagcagcacaagaactcactccctccgaagtaatggcatacatattgtttgcttttgactagatggcagtcaggaatcccttaattctttatgttaaaaaaaaagtgttggtttaaagacaacatcagaagatactctcagaaaatctgccctccaggggagtttctcagctgtcatgttgggcatgtgtaatatagcataaaaatgatgcaagatctcttacagtaatacaagtgagaattaacgtataagtacaatcctgatgtatttttttcaaattaatttaaaaagtaaacagagacagggtttgctgtcgcccaggctggagtgcagtggcgagatcatagctcgttccagcctcaaactcctcggcccaagagatctttccaccgtggcctctcaaaggcttgggattacaggggtgagccaccccacccaggccctgttattccatacattttccataaaattattttataatttttgttttgttttgtttttattttataaatttgtgtgtgtgtgtctcgctttgttgcccaggctggagtgcagtgacgcgatcttggctcgctgcaacctccacctcccaggttcaagtgatcagctcttgcctcagcctctcgagtagttgggactacagagacatgccccaccgcaccggctaatttttgtatttttagtagaggcggggtttcaccatattggccaggctggtctcgaacccctgacttcaagagatccatccgcctcggcctcccaaagtgctgggattacaggcgttagctgccgcgccggccaaaattattccataaatttatccataaaaattccacataaattttctggagtttgattatgtattaggcttgttgggaaatttattacccttgtgaagaattttgtagctaagtagcttgagggtttttttttttttttcactcaggaaagacatggtatgtatgcatcactgctattctatttgaagcttttggaatttttatttatggggtgtggatagaggctggaggcagagactgaggtcagagaagaggtagtagaaaagaaggtggcccactaccatatttccagtgtatttaaatgggagatagagtttctgtttgaggataggacaaaaggtttgtgaagagttatagagtcaaggacagaagccaaagagagcatttgctgtgtaacatgtttgcttgttaaccagatcagcaaagcattttaactaatggaccattatttatgatctagaaacaattttgtgaaagcgatttcttagtgatgctgtttactgtgatcacatttgcccttagtataacaatacctaagtgctgaggcgacttgcagtagagaagtaatctgagtggcgtggagtgaatcagggaaggtttcctgaaagaggtgagttttgagccatcatgtgaactagaagttgggatgtgggttattacaagacatgaggatgacattccagtagtttgtacttggtataagcaactgtggacaagagtgacaaattaaaaatggtttttaaggatgattgaagattcgaatgaagatttaggggtttggaaatcaaccaaggctatgttgcagcttagctgataaataattttttatgttggttaggagagaaaattaacagttgataatggattggagataggtagtaaaggaaagagcataaaatatttgatagttataggagaatgaagtgaaagtaaggttattgagaggtaggtttaacagtcaaccatatatcataagttggaaacatttttgagtcctgtgctagagtatattgataataatagcaaaatttattgggtgctactttgtggcagacactgttttgaaccttccaaatattatctcatcttctgattatctgtattttatagatgagggagataagactcagagagatataacttgcccaaggtcacacagctaggaggggacaggtcaggattggcagaatcagtcagtaaatgttaattgagcatctgcttgatgccaggcactgtagtaagtgctgggtgttcaatattgacaagaaaattcaagtcagacctcatctattttctagagattgtcagtttatgtaagaagagccagtgaagaaagaaaaagattagttggagagatttctgtagatactgaggaatacactgtttagagaaacctgggatagagttttaaagaggtggtggttagcaacaaagtatatagctgagagactcagaacgattgagaagaaaccattgagttaagtaagtaaaaaagtaatgtgaatttagtcacaagaaagctggaatgaagatattaatgtttgggctggtagttaattgtgtttagtggcaggtactctatacaaatttaaatattttcacagttatggtcagattcataggaaagatgatggtatgaccccttgtaatgttttaatctttggctggaagatcatggatgctttaaaatgcttgcactttttagttttttcaaatttaaaaaaatgagcaggcagaccgcctgagctcaagagttcaagagcagcctgggcaacatggcaaaaccccttttctatccaaaaaaaaaaaaaaaattagttgggcaaggtggtgtgcacacctgtaatcccagctacttggggggctgagatgggagcctgggaggttgaggctgcagtgaaccttgatcatgccgctgtactccagcctaagtgacaaagtgagaccctgtctcaaaaaaaaaaaaaaaagtgagcattatttttataattagtggggacaagcattcaactgaaatgagctaatactcaggaaaatgtgggtaggctagtctgaacttggggtaggagagaaatagtcttatttcagtycctacttggtaagagccaccttggtaggtgtgttcctatcttggaaatgactggattgtcactgatggaaactgaaactgtatgtactgaaaggtggtatttgcttaacctgaaggatcaagttactaacccaccctgaatggtggagatacagtctttgttttcctgaacacttgttttcttagagtttaatacatgaatttaaggtttaaaaaaacccaacaaaccactgatagaattgtgtcattttaactgcttcttttggctttatatccttcttcctacacattggttctatagttcctctcattaatgggtttgcaacaggcttagagtttcagttcagtaagacaaaatggaagtgctggatttagrtatagctgatcaacttaaacacttataaattcaccattgttttcggttcccaatttgaagagtggagacagaagtcaagaaaataagcttttcttattcaaagaatgattcccaaaccaataggatttgccctaggatcagtacagacttattacagtctcctaaacagagaggaaagagttscgtaaattcatctagcttttagtttaatttcacttagcccatagggattctgagaggaaacgatattaatgtgattcctatttcatctaggcactgtagcataatccttcaacaaattaccacatttgattctcatataattctctaaaatgtgaataccatattacagatgaggagagtgagactcagagaagttagtaactttccaaggttggagagctaagtgacagagctgggattcaaacctttctttgtctaactccaaaactccatgcttgtgaaactaatagcacggaggactgatttataccttcaactgaaaaaaaatgccacaagccttaggtatttgttaccttagaagatgagactcttgctctgagtgtttgtgctctgtgacactgcctctaaataaatgacagtgattttttagtgtctaataggataccttatattttcttgctttagagatgtatgttttcatattttagaattttttgaagatgtatattgtctatatttacttcaaaatgtttgtgaaatggttactatgtcttaaatgtatctcaaaattgatgaagcatggcatatgcctgtagttttcacacataagtatcttaccaatttgttgtgcactttttcttcccagccttccccatcttatcctattatttttttaaatatgatttaataaataattgaaatatatactaccaataaaataactcattctctttcattagttaacattacagtgtacagaaaagcattatgatgtagaaaattcaaattgggccgggtgcggtggctcacgcctgtaatcccagcactttgggaggccgaggtgggcggatcatgaggtcaggagttcgataccagcctggccaatatggtgaaaaccccatctagtaaaactacaaaaattagccgggcgtggtggcgcccacctgtagtcccagctactcgggaggctgaggcaaaagaattgcttgaacccgggaggcagaggttgcagtgagccaagatagcgccactgcactccagcctggacaacagagcaagactccgtctcaaaaaaaaaaaaaaaagaaaaaaagaaaattcaaattgaactgtgaatcagcagatctgagctttaattttggttttgttagctacttgatgtgtaacttgctaggcaagtcacttcccctctatgggctttagtttcctcatctgtaaaatggagggggaggagaaattttaagcccgtcttccttgaataggttgtatgccttctttctaattaaaaacatagatgccctagatgcctttcttaaaaactgtattactgcattttacaatattttcttttaatcttccttctttcccttcttaatttagtagagaggataaattatttttggtatcctacatttaccaggacagcatatcttaggaagcagggacccagaaaataatgaatgagtgaatatatgttttatttgagctaatgaaaaattttttaaataaagtaccgtcaaaaagatgttgaagtttcattgaaaagtagttctacctaaagaatgaaacgtgtttagtaaagttcaattggtctgttctgtattggatagatgtacaaagaagaacactcttgaacttgtctttaagaagccctcttactagtaggagaggcaagcttytaaactttgtattatggaaaattgmcagcaataatacacacatcaccaactttaagagttactaacttgtggtcagtcttgcttcatccatacctccatccacttccttytttattttgaagcaaatccctagacttttttttttttttttaaccagttgttaccatgcagtgtgataagtataataatagacatgttaatccaagtgaggtgcaaatttgttcatataaatatattttgagacttgagcattatactgttctgggcacgagaaattagatatagtaagctactgtagggcagggataatataattgaagagactgtacatatgtgaaacagaatgtagcaacactggatcatgtgccaaaattggtggtagagactcttaagtgggaactgacattattttagaatgaaagtagaacttaaacaagtggcgatagagagaaagaacattcagggataaggtgagggtratcacatggataaagcgtgcggttaggaaatctaattttggcgctatagaataagttatatctaaatctgtatctctctatctttatcttttagactactacaacatgtaattggcatactgtagatgttatatcagaacttgaacaaagccggttgctgtagcagaaattaggacacactactttgtgaatatatcactgttcgtggttaattttttggcacgttctgttaaaaagccttctaaatatcttaataccacatgtattaatggatccattcttgttagaatgtttgtgggtttgtgccatcagctttggtgtgcagttgtgtgtgtgtgtttaacttaaatgttaactatttgacaattttaagattattttgaaatatctagtttagatcattcttgtcttacatgaaattttttccagaaatgttggcataattcatgagaaatccttgaatttagggaattgttaccattatagcttattttgaagtattctgagaataaaatcttaaagtatattccctaatgcagaaattgcttgtcaaaggtcatgaacttctctgagcatctcctcaaagtgttgtgctatctcatcagaaaaatgtacgttcaaatatccttggggggtctgtggattctgtcttaataatttattctttaatgtgtaggcagaaagcatactgctaaaattcaactcaattatctttctgtgtgttctgcttgccttttacaaacaagtgtttttaattattaagagtgataaaatgataaagcttattattgcaaatgcctaattaaaaaattagacattcttaattgaattcttggggaaaaacaagctgtagccagtttaataaataggaattatttcactaaagattttggaataagcatgtggtactttatttatggctcctgtccatcctggattaacaggaagtagaatatatgacatatgaatgaataaatgcataaatacctttttttcccccagaagtaaaaactttgacttactgtgtccttaggcagttaagatctgtggaggaaaggatctgctaaagtattttgaggttcacatctgtgttgaaacaaccagaagtaatgcaggagcttagaaactgtttttggctgacaaaggattgattctcagtggagccctgagatacaagtgctcatagttcacttagtttgaggaatggccctaaatgagtttcttagaaataggtggttttaaaaacttgtggattgtaattaaaatgtaattatgataatgattatgagcataagcagaattctcaggagataggaacaggtgaattagctggtaatgggacatttgaccccacagagctgtgcacagactgttcgaagttcagtgaatattaggtgaattgctttaaagtgatacccttgtgacctgttggagttaataatttttcaagtacctaatctactagtaggaaacaacttattccaatacatagtagtaaaaatacagactgtgaaagccagaagagattttaacaatcagtgatctggcctctccttcaataaatttaaagagtgatcagagaggttgacttgcctaaggtctgttggttatggcaatcccaacagcgttgtttctcattayctgatttttggtaagtctattgtgcttatttattttgtttgtcttttcattctggatctcagtatttggagaaggaagtatattaactttagcatggtaactagattattggtaaattggctaagaattccctgaaatgttataccataatgtttttactttgccatcatatactccttccatctttaacataataacccatagttacaagatttattagggtaggcgtgttttaggagcttaattccrttccacagttggaaacagatattaagaatccacagttcttaaaacattttcctcatgcttttttatacctttctaggatgatctttgcctaacagcatttagttgcaagctgtgtctatgaacttggcaaagttttaaaaataaactaggaaaagatttttgagaagagagtttgttatgggatttagtcatttaaatacattcctaaaagctgttttttccccactcaaaactagacactggaaggatcattgacatccaggttcaaagaagttactgcttacatgactgatcccgattctgagttcttttgccacatttggttcatgtggaaaggctggctggggctaagacttgcccgtacattagcgacatcatagccagagtgaggacccttagaacagtgcctgtcaagcttttttagtcctagccttttggctgagtcattctttagctcaataatttctactttctaatggaataataacacttgtcaaggtataagcattttttgggaagagctatatggatggttcctaattgaatcacaaaaaatatgcttgtcataaagtctagactaattagaaaactgcaggcctcaaatcctagtgatggaattgtatcaatatattctctacagttataataaaataaccaaaaactaaattgataacgatgagccaaacctaatggtaatttaattaaaaggcaagaataatgacaattgaaaacgaagaccaactaaagacaacacagtttcactgatggcaagtgcccctcttgaaagttacggacttctacgttttgagtatgcatatgtggtaggagcttgcagcattgccagttgcagcaactggatatactagtggaatacaaattgaagtttttggtacattctagtaaagtcttcatttttgcaactcttggtaactagcttaatagtttattcataagtagctttatggattaaaggaaggtcatgttttctttttttttgagactgagtctcgctgtgtcgcccaggagggagtgcagtggtgcgatctccgctcactgcaagctccgcctcctgggttcatgccattctcctgcctcagcctcctgagtagctgggactacagatgcctgccaccatgcccagctaattttttgtatttttagtagagacggggtttcaccgtgttagccaggacggtctcgatctcctgaccttgtgatccacccgcctcggcctcccaaagtgctggggttacaggcatggccacgaaggtcatgctttctaaatcatttatagtccatcaggaggcttggccctttcttggaaaatcattacttttgaaggctggtttagtaatccttgagcttctcatgagcattatttccctagctgtgttgggacatttatgaagagcagggcttagatagaatttagtgggtyttttttttgttttttacctcaggacatttgtaatctttgatatgctaatatacatctttaatctggttgggataaagcatatagtttcctagcaccatttaccacaaatgctgccttggaggactgagtcctgtttttaggttcaggcttgagaacaagattcagaaggcagccataagaaagtgacacaagaaaaatagaaaatacagcatatatatgaagcatacataatttacctttgttaatcttgggcgaagcggtatgtagtatatatgtagtgttcagggtaaatatggtatgttttcctataacatcggttttacttcagtaatttgaaatattttatataaatcttcaggtatattgtgaagtcaaattttataaattttttttagcaaaaaagatattgcaattctgttataaaagtttgaaaagctctgtctttggtagtacagttaaaatattagtatatctttgtatattgaaatactgtgtttcacttctctgagtctgaaagtgttaggattaaaatttcatgtcttaatatgaaaacattattattaaggtaaaaagtgatcaagcacaatagtttacctaaaaaaagagtcatgtatgacttacgggaattactttatttaaaaaaactgttttcttcccctagaaggaaattgaatacatgtttttgcaagcagcagactgttttttccccctccaatttctctaacttaactaattgttagaactatttacttttttgttattttgggtgcttcttcctgtttattattcagtgttatcaagctgtgtgttaacaagaacacagcccaccttctgtaggctttatagtagagaagttaccctactggttctggccttaaggacagaaacagaaacaaaggaaaatgtatattattgaaaaatttgttttctgatcagcagataattttagtgctacaaaactgacatttcctctctcatagagtagaatttgactttttaaaggtgtctttatgtttgatttttacatcactcagaggaattctgaatcttatttttctcagtgtgtaacatttcccaggatagtaagatcctagaagcattttaactcttgtcaaagtgccatgcttatggaacagcatcattatatgaaacagttgtatagtggcctaagaactaatgaacgtctttagattccttactaccgagaagtgccttgkggggaagtattggggaaaataggatatagacagttaaatattggtaaatcagtgcttgtgtaggcaaacaaagtggccattatatctacttcaatgggtacttaccacagggttggacactagcatcttttattgaaaaaagaaatgttaaccaggatgctacagctgatctttatttgtggaaaatgctcaataagccttaatttttgaaaaaggaaaaaggaacccactgttattaggagcttgactacactaaataatttgtacactttgggtttgcattttggctctttttttgttgcttatagatttctttcaggtgaggttttcttttttgagataggttctcaccctgttgcataggctggactcaaactcttcgcctcatgcacttcttctgcttcagcctcccaagtagttgggcacacagttgtgtgccactgtgcctggctcagaggatgttttctttgatgttgagtctgtcttagtccatttgtattgatataaaggaatacctgaagctgggtaatttgtaaagaaaagaggtttatgtggctcacagttttgcaggctgtacaagaagcacggcatcagtatctgcttctgatgagggcctcaggaggcttccactcctggtgtaaggtgaaggggagcaggcatcacacagtgagagaggaagcaagagagaaagaggaagagctgccagtctcttttcaacagccagttcttgtggctgagaactgagccagttctcactatgagtgagaacgcttagtggcaccaagccattaatgaggaatctgcccacatgacccaaacacctcccaccaggccccacctccaacattgggaatcagatttcaacatgagacttggtgggaccaaacaaaccatatgtaaaccatagcagtcttaatcaaaacattaagtgatgattgcagttaccaaaatatagtaggaaaaacactggaggattggttttcaatgcttcagatgggaatctatcagaaaatcttaatggatatacttagctcgaggcttcttcataatctaacttctgtaaaacaagttgtcttgcttttgactagaggtgtgtcaactccagatggtaatgctgcagaactttgctccttagttcagctaaaaccaggttcaggagttcatagttaattgaacatgggaaagttaattgaacatgggaatgtgaaattctcgttcagtagatgaggttattgggtagacagaatatttcaaagtgtgagatccatgagtccatatttttaaaatgggttttgagtggctaaaaaaaacagtaagaaacaactcttcgttgtaccgtagtcctgtgaaataggtccaacatgggttggtggttgacagtctcaagagtaacaggcagttacttgatgctgtttgtgacagactgtattttctaaggatggttgcaacagtattttccatcgcacatgtgtgagcttgtacagaccctaactgttctctcattctgaggtgggatttaagtcccttgaatttgggcagtcttgtaaatcacttgtagccaatagaatgtggcagaaaattacactgtatgacttccaaggctaggtcagaaaaggtgagagagcttttgcctagctcacaagaatactggtctttaagccattagcagctttgtaagtatctgactattctgaggtccccatgctataaggaagcccaaactatctcatggggaaaatcgaagaggctaaagtccggagctagaactgctcagccagaattgcttagctgagccctttacaaattcctaactcataaaaattgtggaagaaaataaaatggtggttgttttaaaacactaagttttagagtgattttgttatgtagtgataggtagccagaatactccattccatactactttcccatccatacttttaaattctgtgcttttttattattattattatatcaagtttttgaacaaagtagtgggcaagagtttctctgagtttgtgacaggattatgttatgtgctcttcttcacttgtagtcttttctgcaaaataatacaacccaagcctcatccctgcatatcttaatgggctttccttttagaaatacagatttttaaaaatatatatcttgaaaaaggctataggtcatgtcatccttttgcattcagcctctggcatatctrtatttctgaagcctggcattaatgtgttgttttgttcatgaagatattattgtatcaaacaagcatttgttggccattttacagtgtgtcagtaacaatagtagtagtgaaatcatagacaacgaatatttagactgtactgctttcccattgatgtctttctcatttatacttcatttttctgaatgtttgtggaatattggaaatcattgtttaaaacagaggttggcaaactatggcctgcaaactgtcttcctgtttttttaaagttttattggaacacagccacacccattcatttatttattatccatggctgcttttctggtacagtggcagagctgagaagttgttgctgagattgtatggttcacaaagtggaaaatacttgttacttggccctttacagaaacctttgccagctcctggtttagactgtttcttagaagttgattatcctttttacttttttagttttttacttttgaggcagggtctcactctgtcacccaggctggagtgcagtggcacaattatggctaactgtagtctcaacctcctgggctcaagtgatccttccacctcagcctctcaagtagctagaatcacaggtgtgcaccactacaactggcttatttttgtatttttttttttcaaggtggggttttgccttgttgccaaggctggtctcaaactcacgggctcaagcaatctgcccaccttggcctctcacagtgccgggattacaggcatgagccactgcactcagccagttcccccttttaaagggacatttatttgaagttattttttcttctacttttaaagacatgcaatctaatgaatattaaaagattatttaacgtaactttctatctgctgcttgaatttctttcagtactcctaccatatgatcttccagctgaaagggataagataatgagataagcagaattaattaaataatgacagctgggagtggtggctcacgcctgtaatcccagcactttgggaggctgaggcaggtggattttttgaggtcaggagttggagaccagcctggccaacatggtgaaacctcatctctactaaaaatacaaaaattagctggacgtggtggtgggtgcctgtaatcccagctacttgggtggttgaggtaggagaattgcttgaacctgggargtggaggttgcagtgagccgagatcacaccactgcactccagcctggctgacagaacaagactccatctcaaaaaaaaaaagacaaagcagcattggatatgggtgtgttaaacacagaaattgcacctgattgggagtaaaaaaaacatagatgaaatactaatattttgttatttgtccatttgctcaaaactgtctcttcattggtaagttttttgtttttttttaacaatttttcatagagatggggtctagcgatgttgcccaggctggtctcgaactcctggcctcaagtgatcctcctgcctgggctcccaaagtgctgggatcacaggtgtgaacaactgtgcttagcttcattggtaggttttgactttgaatttgtttacttgcagaaggcacagaagagccaattttaatagaaaaaacacgtaaatgggctggacttccaggtatagctataggtggtagaaatttttaggtagctggatttaatggttagatattcaatttgagactttccattgcagtacttagtttccctaaataaatgtgtagcagctaaaacatggaactaaaagtccttacaaatatacctgttgtgagttactgggtttgtacaataaatgatgatacagaaagatgcatacaagtagagccagtctagacttgactgcagtactatattgtgtattgtactatatttgtatattctatgtactttattgctttgtgaacatggtgaacattgtgaatgaggtgaatctcacaggagatagaagaaggtacatccatttccaagatcaacattatctcgagagggaaagtaatttttcacattccattcaggaaatccatcctgttagagtcccgttaattatttgtttcatacataagtaaccatctaatgtttttaatacattttccatctaataaagaaatggaatgaatttaagtaataaagattagtaaaagaaggaaaacataggttgagcatcacattaaaaatttttagactatttctgaaatattacagatcagactgacagctgaaggaccatactgagaatcattaccatagaagtaaagggaagatgcataaggaaatgtaattgtgtgcccagtcttttgtgtttattttcacaaaaatgctataaggtggagttgggtgggttggatgttttatctgtattttaaagataaagaaactgcagacccaaacaggtaagcaagctcaacagcaaggtaaacaggtgagtttagattctaacctaaacctgctagacttggagtcccagggatttctattgtgtcttggtgctggattatctgaaaggcttgtttctataaagggcctaccttatttaggaaggagcagtttataagctgggcctcatttcattcagtattgaaaatgttttcactaaacatttagtttcctaatagctcactagtctgtgtactttattgctttgtgaacatggtgaccattcaagtttaaggcatttaagttacagtatatattttcaaactgaagtgatccataggattaccttggtataggaatttgtagaaacatgtttgaatgtattattagtcttaagcaagaccgcaaatcttcttgttttctaccttaccttattaactctactgccttgggggttttttgtttctaatatttcaataaaagattctatctaggtaagatctctctgtggatcaggtagggtggagttggaaataaagccactgatctttgatatgtgcgtcttacctgaaaatgatgtctttttattcaaattgatagtgacaataattaaatccacctagaagatggtcttctgagtagtgttctaaggttgacagtagacttttctccctcttgttttggctgcctctggaaatggccctcagggaaatcctggtaaagtctaattgcctttagattttaactacctgattttttttkttttgttttttgaaatgcaagatctcacatatttattattgaacccagccaactggcaccttcatagcacatacagagagaaaaaatatattcccaataagacgtgtccaactgtccagatagtggtgacattttcagcttgatatggtaacatggttgtgatcttgacatagcataagtatgtgtgccrtctcatgtgcaattctttatagacccagtctggttcttctccagtgtttccttttggagttgtacctgattttattaccagttttcatctaaatccactgggagtgggacaattttttgcttttgtttcttggccaggaaacacttaatccggaaactcttgtgagaagacatggtgagaagccaagtcgagcacacacaatgatggtggagaaaggaagagagagcctgaattttttaacagtaaaatttctatactgagttgctagtttggcccatcaacttttaatgcaatgatgtggaatttttaaggattctcagcaagaggttgtcttatttcatatgttaaaattttctgtggagcagatttttgtccattgtatgcagttagtaaaagctgaggccttgtagtggagactgctgttgtttcctcctgtcgtgagtcatacarctttagaactgggtaggacctttcagatcatctattttaaccccttcactttctctgaacttctcttctagcgctgtgcactcaattctcattcatgatgtgatgccttgacctcgctgaaggacaagtagaaactttatgtgccttctctaaaagtgggatttagttagaagatttggttccaatttcaccctacccgtatagacgtgctgagggacctcaggcaagaaaagttattaaggagacttttggaaaatagtatctgaaggcatgagagagagacagtttgtgctaaataaatttttctttccctttcttcccttaactatgtatttttctcctcactggtgagtcttctttaaaacttcattcttattctacctggctgacccatggaatttcctctcatttcctttccgcataccccacttcttatatatttgttcataatttgtcttactgcttagcaagtatctgaaataatcagctaacattatgttaaaagttttaattaatttgagttgttttaaattctaatacagaaaaaggaattctcatttctcggcaccaaaaagctgccgtttaaaaaaaagtggtaattttttgtgctttttaaaaaatgactagtcaagtgcaatagtgagaagaagggaacaagtagagcaaagagttcagtctataactgtgaacaatcagttgtgataattcactatcttcggaccagctttacacttttctgattattggaatactccaatctctccttttaattgttttatctgtttaaaaaaactcttttaaaaagttgaagatgagaggatcttgtctttaattatccagaagtttctaaaattaatgaaacaacatgattagccttccattaatattagggcatttattaagagaatacaatcatgttacaaaagtgcaggtttatattgagtggggtgttaccttagaagttctctgtgattctccatttgtggtcatttcaggctcttttggcccatgagacctgcgtgttcttttgcaaatgaggaaacaggttcagagtagtagctttatcttaggatctcatagctgctaaattgcagagtttggacttgaactcctagcaagtaaatatatcttaagtagctttgtattatgtttctcttagtgcatttataaatgcaaatatgtgataattttttttacagccactaggaaaacccactttgtaagtaagcctaagtgaattccttgaaaataatggtgatacatggtactcagcattttgctgatcttcagaaagattgcttctttaacttgagtcaaaagataaggtgtgttttgaacaaaatagctagctacgactgctaggtgctatttcctaaagcagctcaagaacagtgaaaataaaygtaaattacctttcacagtcctgtcgtccccttccccaagtgtgtgggaatgctaatgctgcagcttttctcatattgcagtggtgcagctacttttcaacagatgacaggcgcttgtagatatcttgctgtgtagcaggaatctgaacagcatgctctggaaggattgtcagcattcctttcatggcttttgcttttctagttgcttctggccactctggcaggactgtggaagataggacaagtctgaacttcccttaaaagaactctcatttttattggctttgccaataagtttgtagggtgaagtgtattggttgaatggggaagccaagaatacatttcttttcaaattagtgcggctttcctttgagccagaggcagagtttaaaaatatttagtgcttgtcatatacaccatggaatactatgcagccataaaaaatgatgagttcatgtcctttgtagggacatggatgaagctggaaaccatcattctcagcaaactatcgcaaggacaaaaaaccaaacaccgcatgctctcataggtgggaattgaacaatgagaacacatggacacaggaaggggaacatcacacaccggggactgttgtggggtggggggaggggggagggatagcattaggagatatacctaatcctaaatgacgagttaatgggtgcagcacaccaacatggcacatgtatacatatgtaacaaacctgcacattgtgcacatataccctaaaacttaaagtataataataataaaattaaaaaaatttgaaaataaatatcaaaatgcacaataagaaaataaaatgagtctcttgttggcagcaaaaaaawawatatatttagtgcttgtgaagtttttggtggcattatgctaagttgtgggaattgtttttttttccctaggaggaaaattgtgtaagtcattatagtagtataaaatcacttgttaatagctttgaaagaagccgcttcattctacaactctcttagcaagcaatctttattctgttaggcttgaggagaattaagcctaacagaatatttattttctgctatttggtggtgacagattagctgtttaggctttggtagggcagatgtcttgataactgaaggaagtacatcattctgggttttttttagggttgaactcatcccaggctctaatttctcarttgttagagggaaaactgcttaatatctttccctgtcttacatgcatatgtacacctatggaaaactttctggtgcctggtacctagtaggcccttaataaatatttgttgaataaatttttacataagaaaaaaataaagctcaaagaattagctgatctaggtatgttctcagtatactatttaatatatattgagtatgtaattgtcattaatacctacttgttaggaagtatattgatgcagaattattcttcatatctcccatatgaggttattgacatcaaaccgttttatttatttattttttttaagagatggggtcttctgtgttgcccaggctgaccttgaactcctgggctcaagtgatccctctgtctcagccttcaagagtagctgggaccattcatttgaacttcaatgctctgtagttttaattaggctttttgtcactgaaatcttgaaatagtctcaaacctgaagtagattataatgaaagtaaccatataatttattgtgcaaactgagacacttctgagaaatcaatcaaaattaagttggagcagcatgtataaaccaggcttgttctaggcaaactaggacatatgatccctgtttgtttttatttttcaaagtaaatgttttatcgaaatataataaattcagaaagtccatatattcgaagtggacagcttgatgaatttttaaaaaatgagcctcccagatcaagaaatagaaatagaacatcaccagaatcccagaagtctccttcatgttaccttctggtcactccctcttcttccctgcaagacttttggccgtagatgttttgcctagtttgaactttatataaatggcatcatatagtagtacacacttttttacctggccttactagctcaacgctccctttgtgagatccctccacatgtgttttagcgatcgttccttcatttttattgtttttaaatatttcatcatatgcatataccacactgtatatgttatattgttgatgaacacttgggttttattttgggccaacaaaaatggtgctgttataaccatacttgcttgttcttttgatgaacatatgtacttatttctattgggtatataatcaagagtggaattgctaggtcctatgatatgtgaatgttcagctttagtgggtagtaccatctcctaagtatcatatcaacctgtacttcctccagcagtaagatgagagttccagttattgtgcacccttattctgagggtcagtgtagtgggatcacataggggttttaacttgataactaatgaagttgagccccttttcatgtgctgtcatttcgatcyttttttttttttttttttttgagttagagtcttgctctgtcggccaggctggagtgcagtggcacggtcttggctcactgcaacctccgtatcccgggctcaagcaattctcctgcctcagcctcccaagtcgctgggattaaaggcgtgtgccaccacgcccgactaatttttgtatttttagtagagacggggtttcaccatgttggccaggctggtctctgaactcctgacctcaggtaatctgcccgcctcagcctcccaaagtgctgggattacaggtgtgaaccaccgcgcctggcccaatccttttttgtaatgcccatttgtatactttcttttcttgtttgttcaagcctttcccatttttctattggtttatctctcattgatttggaatttacatatttatgtattctagatattaatgttttcattatatatatattacaaatatcttttactctggtttgccttttctctttattgttaatgtcttgggataaacttcattttagttttgtccagtttagcaatattttcctttttatgttctgtttaagaaatgactgcatgaaagtcatggaaatggtcctcctctgtaatcttgtagaagcataattgttttacctttcacatttagatctccagtttatctgaatttctgtgtatagtgtgagatagagttcaaaatttcattttttctatatggataattgactctgcaccattctcttcttgtcccaataccacattcctgtagctttataatacatctcaatatatggtaatgtaagttctccatctttgttatttatgtttgtcttggctaatcttggccctttgtatttccataaacattttaaagtctcagtttccatattaaaaaaacagcgtagattttgattgggattatattgactttaaggatggtaaattgacatcttcagtcttccaatctaggaatatagtatatgtctccacttatttaggtgttgtttaatttctgtcagtatttagtaggttttagaatagaggtcttatatatcttttctatccttttccaattcttgatggttttttaaaaaataatttattgagatgagattcacataatataaaataaccatttgtgtctgttttgtgctgctataacaaaatatcttagactgggtaatctataaagaacagaaatttatttctcaccattctggaggctgggaagttcaagatcaaaatgtaccaattgttttggttgtctgatgagagctgctccctgcttctaagatggcacgttgttgaaccctctatgggaaaggaatgttgtgtcctcacctggcagaaggcagaaagaaaagcaagagagcaaactagcacaatgttgagtgaagccacttttatgaggcccttaatcccattgatgaggaaggagccctcctgcccttatctcctcttaaagaacccttctcttaatagtatcacattggcaaaatctgaattttggaggggacacattcaaatcatagcaccatttaagtgagcaattcagtggcatttagtacattcagtgttgtgcaactgccacctctatctagttccaaaacatttcatcattcgaaagtaaaactccttaagcagtttctctatactcaactattcccctatgccacaggcacaggcaactaccagtttgcattctgtctctgtatatgtatctgttatggatatttcatatgaaaggaatcatatagtatgtgaccttttgtgtctgacttctttcatttgatatatttttgaggttcatccatgttgtagtaagtatcagaactttgttcttttttatggctcagtagtattccattgtatgtataaaccacaatttgtttattcatttgctgattgacatgtgggctatttgtgccacttggctatcgtgagcagtgctgctatagattgagtatccctaatccaaaaaatctgaaattcagaatgctccaaaaktcaaaacttttgaccgggtgtggtggctcatgccagtaatcctagcactttgggaggccaaagtgggtggatcacttgaggtcaggagttcaagaccagcctggccaacatggagaaaccccatctctactaaaaatacaaaaattagctgggcgtggtggcgggcacctgtagtcccagctactcgaaggctgaggcaggagactcacttgaacccaggaggtaaaggatgcagtgagccgagattgtgtcactgcacttcagcctgggtgacagagtgagactttctccagaaggaaaaacttttaagcaccaacatgatgctcaaaggaaatgcttccagatttcatatgttcagattggggatgttcaaccagtaagcataatgcaaatattccaaatttgaaaaaaatctgaacaatgaaatgcttctggtccaaagcatttcggataggggatacttaaccttacaaacctgtgtcaacttgtttgagaacctgttttcagttttttggtatgtttacctaggagtggaattgctgggtcatatgataattctgtttaactttttaaggaactgccaaacgtttttccacagcagctgagctattttacagtctcaccaacagtgtatgattgttctgatttttgtacgtcttcaccaacacttatttttttctgtaattttggtgttctatactgttttaagtggtataattttgagtttaaaatttttcactatttcttattggtatacagaaatacattttttctccatataaaccttgtaatcaggtgacattaaattcgcttgggggctattaattttaatagtctatttatttactggattttgtacttacacctgaatttccattttctaaatgctttcatattatttgtttccttttttagtaattatattatggatgcagcagtcttgtgaacaacttagagaatataggaatttaagttttcttaaaatttttccttagtttcctttgtagttctattgcttttcattttggtctttctttattttgtaggtatttttcaaatatctggtgatccgtggttatctgtttgtatttataatggaatagggtggttggttttggtagctgatagtggcttcctctagttttttgaggtctgttttctcaaaagagcttttccacagatggtatgattgagaactctgcgtgagtttcctttaaggtggggatatccaagcttttggcttccctgggccacattggaagaagaattatcttgggccacacataaaatacactgacactaacaacagctaatgagcttaaaaaaaatcacaaaaaagctaatgatgttttaagaaagtttatgaatttgtgttgggctgcattcaaagccatcctgggccatgggttggacaagcttgcattaaggccggcagcagaggctgaggacttaaaatgtattctgagcgctataaatgcttttttcttttgtttgtttttgtttgctctctcctgatccactgcctcctccaccttcgtttgtggatgtttggagcaaccatcaggctcaattccagttctcttttgtccctagtacccatgctggatgctcttctcaatcagatctagatactaagcctgggagccaaagtttatgcagaaagtaagactgtcatgagtagctctgctgttctgtgagcaatcttttaattatcttgatttccttatgatttagtccagcttttggatcctgaccttgatgttttctcccaggttccatttaggagattggtaaaaagagctcttgcctcattatagtcctttcctgtccttgttttgcttgggttgctgtttcttctggtatggctattctaccaattcagtcttatctgtttcttctagaaattcttctgtttcttttctttcttcctttttgtttgacttggtttaatggagctattttttccaggttgttatgaacatatattttttaattatgaaaaatttggacataaatcacatgtatctactccccagcttaaataaaacataaatacaattcaagctccttattctctctctggttgtattgcactccctctcatgcatctattaatatttttccatctgtatgcattgctaaacaatacagagcattgttttgaatgtgttagagctttttgtagtgacataatacatgaattcttctgcaccttgtttttatttttyctttcattatggttgttttcttaatatgtcttttctgctgttttagaggaatttgggtagagaagataagtcagctcatgtatttcttactctaactttttaaaaggggagatttaagcaccttttggatatactgtcactaagagacacgtagtagaaagggctcggtgtcacctcttcttgtttcaattggtgttgatacgcgaatatgacacctccagtgttacacaagctaggtaattgagtcttgctgctgacctgtatttggtgttataaatccctttggagtcagagaaaccattcatttgtgtttagggtataactgaggttgaatgaagatttgagttcttattgctggaaggaatttttagacatcctttagtacaaattgtaccaaagaaactcaagtccagagaacgtgagtgacttgtctgaggtgatccaagggaaaaacacagggttaaaaataagctatagttctcattcttctttccactttactataatgaacttgaggttagagtcctctcttgttaatgttctattttgacttttgtctgctttttaaaatacttatttgaataccaagagatttttagtatgaaagaatgatggtgaatccttaaactaatgcttatttgccatgtttttcttaggatcaaaatggtttcaatcccagaatactatgaaggcaagaaygtcctcctcacaggagctaccggttttctagggaaggtgcttctggaaaagttgctgaggtcttgtcctaaggtgaattcagtatatgttttggtgaggcagaaagctggacagacaccacaagagcgagtggaagaagtccttagtggcaaggtaagtatggaaaatgagcactcagaacraagaaaaaagcgtgtgcttgtgtatataattattgtagtcgtcaatagcttggtatatttcttcagtattctgaaaaaattagtaaaamaaaaaaacttagtaagttcctacaggatggcaagaaactggatatgacttgtgaatcacaaggagaaaaagttttcctctgtgactggcaaaattgtataacaagctctaaattacctttatggtaggtatttaaagtatgtttttagaacatttgaggcaggttgtttgtaactactaaataatttaaatagccttgataataatagtaattaggtagtgagactacctactattctgtaagacactatgctttgataaaatttataaacaccacttactcccccacaacagtattaggaggtagagaagtcacatattcccatttaacagatgacagaggggccgtatagaatataatatgtcatatattttgagcctttggaaaaatattactaagaaaaaatggaaatgagctagaataaaattatttcacgatcataagtttgtgaattctctcaaaatgaatgaatttatctgacatttactaataaatagtaagttgaatcggaaggctataagctcaattttggtacacataaggaatctgactgcaggcatatctcaaaaaggaatttcaagtagagcatttattttacaattagaataacactcatttgaatatctacattcgtataggcctcttaaaaaatcctgaaactgtagcaagcctcttcatagcaaccaaccagacttttgactttgaatgaacttcatatacctttatagatagttctttggaattaattgtcatatcacatcagcatttgtttgacaccatgcaacagatattcctcattatgttggttttattttttaatgatgggatgtaagattctttcttagaagtttaaaaattattattatacttttaaattattcaaattagtctacattagtctcccttaatcattttttctctctgattctttgctgaacccttctggaatcctttgcttcccttaaaacctacaaggaaagagtcatcaatggggctgtaaaaccacaaggcttgttctaagtaaaatgtctacatgtatgttttattgctgtctctgccctttgtttactcatcttggcatttttattatgaaccacttgtaattggtatgttttaatttttctcctgatactcctctccccccagtgaggggttatttgttcttactcactttttattttttagataatatttattgtgcctgcttagtcctgggcacttgacttgttgtagggggtggaattcagggataagtaagatacgttcctggctttttagacagtttttaagagggaaggaagagggagtgatagacgtgtcaggagtagataggaacagatatttaagctgatgtgctggccagaattgagggtctgagtaaaacatgaagaagacttgggcatcttcttcggggtcttcagagcagtgcttctaaaatttcttccacactaagcctaagagaaggagtattttctacttagagcctgaggtttcattgaacttcagtggtttagcctgaacatacagctattattttcaataaaaaaaagttttttccccaaatatttgacttaacttgatactccataaaattatgtaattttatcttatgccttcagttacctcctggcatatcctaccacttaatcctaaagccatgtattctccattatgtatagcattgctggtgagtccataaaaatgagtcctttttatgtcaaatagcagtgagtgtacacttaaagttagtaagaaattttaggtatggtctactctgattttgaaataggtataaagaacataaggccaaaagcacataccaccatatgggacattgacttatagcagggtttctcagcttcagcaccattgacattttgggctggctagttctttgttctggaggcttgttctatgcatggtagggttatcagcagcattcctggcctcactcactcttgtgacaaccaaaaatgtttttagacatcaccaaatgtctgttggggaccaaaatcacccctggtcaagtaccatgacttatgggaatgtctcaggtaacagaaactccattgggtgatgaagattgaattaaaataattgatcatggcctgtcacggtggttcatgcctataatcccagcactttgggaggccacggctggtgggtcacttgaggccaggagttcaagaccagcctggccaataatggagaaaccccatctctactaaaaaatacaaaaattagccgggcgtggtggtgcatgcctgtggtcccagctactcgggaggctgaggtgggaggattgctggaacctgggaggcagaggttgcagtgagttgagattgcgccactgcactccagcatgggtgatgagtaagaccctatctcaaaaaaataaaaaataaaatgaagtagttgatcatgaagtaaattcaggaaagaatcaaggatattaaaaaggcattagtaaacgtagtaaagtaggaactaattgggtactagtgggttgaaagcaccagaaaagatggtattgagtaaagagatgttggccagagaagggaagagtatcacatttaagatctagcaagtttaagagcagcatgatcatgtcctggtggtagtggtatagataactgatattaaaggaaattaaaggtcatcagcaattaggagaatgaagaagtacgaatcagggtgttaaaaagtacttttttagtcattccttaggttccttttcctctgcttgccccataaggattgatattcttcaagtttcaggcttaggccttgttwtctcactaggtccagtgagatggttactcagccttcctctgttttatgtgagatgaatggatgtcctttaaattagatttggatttagtttcatatagttaggatcttgkgtccttattattgctgttacctggataaactcttttctactcccagggcttcagttactacctgtatgtggttagtaaaatctatgttgatagtccagctctctccctgaacttagacccacaaagccagtcacctttactagacctgtcttctggggtgtcatgcaggcactttacacttgacattcagaagactgaatttgtatctccaaaacagtacttctttctctccctgagttcattagtctactgaatttattcacttaacaaatgtttaaagtctttatcttgccaggcaagatctgctctcttggacttgtatgctgagcaaaatagatatggaccctaccctaatgaagtttgcattccttatctctcaaattcagtcataagccaaaatgactacatcctgaatgttacatcctgaatctcattgccgttattttgattcagacaagtaaatatcttgatatgggcaacgacaagagtgtcctaaaactcattactgccaaaggattttttaaaaattatgaacatgcttgtatcacctctctgcttaaaatctgtcaatagcgaccgggctggtggctcacgcctataatcccagcgctttgggaggtcaaggtggggggatcatgaggtcaggagatcgacaccatcctggctaacatggtgaaaccccgtctctactaaaaatacagaaaaattagctgggcgtggtggcgggcacctgtagtcccagctactctggaggctgaggcaggagaatggtgtgaacccgtgaggtggagcttgcagtgagccgagatcgcaccactgcactccagcctgggcaacagagcaagactccgtctcaaaaaaaaaaaaaaatctttatcagtagttcaccatgactcccagataaaattcatctttttaatgtggcttaaaaggcacagttatctggcctttcttatctccatacaactctagctgcttttcctgcatactctatgttccaggctgactgaattatttttaatttcccaagcatattaatgccttctgatttctaaggggttatactgctacttcctctgcctggaaacactattattctactttgtaatttcagggccttcctccctcacttttgtccctaacacacacacacattctgttaaatgtcattttctctgagaagccagcttgtgtgtggtcttttaaagctgggttagttgtttctcctatgcaggcccgtaacacttacctgttattgcttaacactatattttaattgtacatttacttggaccaaaggccatttccttgtgtctttagaatctagaaggtgcctgcctggctcatatgaaatactcagtaagtttttattttttaaattaatataagaaaacattaatattcaagtcatgtgctagcagtggaagtagcagtaggagctatcagtaggagcgggaagactgtttatactaaagtcatccaggaatgtggaagtgagcactgatatgttatatagactttcttcttaggttaagaatcctgcttaaactgcaagtttgaacttcaaatggagagtcaaagtgtgatagagcagtgacctagaggtggcatcagtgtttctctgtcaaatctgggataaaaagttaaacttgactcacaattgaatatgcctttaaactgtaatcattttgtgatctgattgtctagcaaaatttattcctttgggtacacttaaagaatgtttaatgttcagcttaaatcctatatatgtaatacttctgaagtttgttcagtttctggtttgcgtttgcttaccaactttttccttgaacatattgactttgttttcctttttaaaaatttgttctaagattttaggtagaatgtaaatcgtgtttttttctaatctactaaaagggaataaaataaaaatgaagtgaagtgaaaaattaagatctagattttagaaatctgaatgatcattttaaacattgtcctaatgtctatattgctgaagtctattctgaggggtgatacaatctaatcagccaaggcatggacagttcaaattcaactttgtgaactaccagctttgtgtacttagcaaactccttaactgctctgagtctcagattccttatctgcaaaatgaggataatagcgtgggcctcatagggtgttttctatacagaataatggcaattaagaatagcaactttaggaattgtatagtttaagtttctaaaaaaatagtcatccttggtgggaaaaaaatggtgataatgagttttagaaagtggaaaaatactgctgtaaaataaatatttttccctcttgatagctttttgacagattgagagatgaaaatccagattttagagagaaaattatagcaatcaacagcgaactcacccaacctaaactggctctcagtgaagaagataaagaggtgatcatagattctaccaatattatattccactgtgcagctacagtaaggtttaatgaaaatttaaggtaagtacaagtaattatataatatttgaacttcagtatagttattaaaaaatctcattttaattctactttttagtcaatttgttttgaatgtgatttgatactatttgcctatgttaactgtggctttcagtgtcctacagagtgttaaaagaattctcttcttcttcycagtttaaaaatcttggataactaatacrtgtttattggaagaagttgccatgaatttaaacatgcaacagggaagaggcaaaaagtggagtagaagaaaacttagtcttaacaactaatagtgtttgtcttctctttcttcagaagcctataccccagcagctttattcttctaatctacatcatatccatgtgaaaataaacaaaattaggctcaggttttacaggataaggaaaaattggttataaatttaaatcacacctttttattttcaaacttttgcagtagtgctaggggcaaggtatgttggacataaatttaatttaaaaaataatttagacttctttcaagattcctgttgcaagaaaaagttaagactctaaatgtccactattcttaaaaaaatctaatgagtatgcatttcaaataatggttctgaattcagagcattctttttgacagtgtgtcwaaaaatacagtttttataatgttaatctaattgtatagtctcatgccaattaaaatggtgtagacttggtataggtttcaaagctacttgaaatgtaaaatgttgtctttaaaatgttttaaagataaataactaaaaggaggatattgaatgctctaacaaagaaatgataagtgtttaagatgatagatgtgccagtcaccctgatttaattactatacattgtacgcatcaaaacaccgctatgtatctcataaatatgtacagttatgatatgtcaatttaaaaaataaaatacatttttaaaagtttaaaaaattgagttctgaggctgaggtgggaggatcacttgaagccagcctcagcaacataatgagaccctgtctctataagcaaaatattttaattaagaattaaaaaaattaaaaattaagttctgattacaaaaggtttgatattattccccctattgtctttatctaatatggaagtataaacgtcagtcaacattatataaggtgacagttcagtgccaaagcattacagtgtgttttgcctgtattccaggtgagggcactgtaatagttccttagatctctgcagtagtcctttatgggttttcagtgtattttctcattaattattttattccatagtcaccttacctactgtaatattatagggaaatccattgtacgcttgaggaagctgaggcagcattgtaatggaagggctatgagctttggaattacatacattagttctaatcttgaccatatcattcatttactggtgagtttgtataagttattaacckccttaagcctcagcttcctgatttataaaattgaagtaacatttctcaaaagattatttttttttccttcaggaaatttaagtgatgtctcagtttgactgtccatggcaggaaatctgaatctgtagcagttgctttatttattttttagctctttctatgcagctgacaggtaaaatattgtgcagccattatgtgttaatgattcaaaggtgacaaaagtatgttattaggactataatatgatcttattttcataacatatatgtgtagatgtatttatgtacatgtctttctatatttgctgataatacatttatctttgaatgttgcagttacaggtaggtttttagtcttacctgtatattattttttctactatgaacatgtgttaatcttcaaataaaggtgtatacaaatgacttttaaaaattatttttaaaagtaacacctataagaaatcttaaagggactgataccctcatcaactaacaaatatccttattttttacatttaaaattttgttgtgtgtgtatatttttgtatataggtctaactatttgtttttaactagcatttccaagattgtgaatgtggtctctaatttttagtgatttatcttttcctaaaattcattagtgtgaaatggtcagtaaagtcgattttttcccccatagttctggcttttattatttccttcatagacaaaagaaagagttcacatagctttrtgaagcttagcatgttttcatgaaaaacatacgtagatattggctaatggtagtatagtcttcattgacttaacgaggaaagttatatgctttgaaaggtggacaggaaacattgattagggtaaaactcataaagggaagctttacaaggaggaccaaagtacagcactttcagggaactttctttctgtccccctagggtaagcaaggctaccattaatgaaaaggacatcttctcgttattattttcttcttttactagagatgccatagcagaaggcatcttatgtattacattgtttttcttttcctttgtcaaagcatctatgttcactgacctagcccttgtcattacattgaaattatttctgggaagcaattttaatggatgttgacttccaagtggtgataggacattaggtttgggtcagacactctataatactccaggcaggcatataacaacttcgtatgaaagaattactgtttgtttttgtttttgtttttgtttttgtttgagatagggtctcacctttatcgcccaggctgagagtgcagtgacacaatcatggctcactgcagcctcgacctcctgggttcaagtgatcgtcccacctcagcctccctagtagctggtactagaggcatatgccaacacacctgtctaatttttgtgttttttgtagagacagggtttcactaasagttactctttataactacttgttaagttaacctacaaataaaaaatggcatgaagcttttactgttggggggaagttttcagatgttactacaacattaagcccaataccttgggagagaaaccaacataaattgcacacagatcttatttgcaaagtgcatatggtctagaggcgataggatatgcaaaataaccataatgtaggatagaaaataaggatgtattaaggagcacacatgaaatcctattagagttaagagaaggtagatagagctcacttgttttcagatgtggtggttcctaaatcttgagacaggagaaaaatagataggcttaggattcataaggaaatactgacaaaaagtgtggggagggctgggcgtgggggctcacgcctgtaatcctagcactttgggaggctgaggcaggtggatcacctgaggtcaggagttcaagaccagcctggccaacatggtgaaacctcatctctgctaataatacaaaaatgagccgggcatggtggcacacgcctgtaatctcagctgcttgggaggttgaggcagaagaatcacttgaacctgggacgtggaggttgcagtgagccmagatcatgccattgcactccagcctgggcgacaagagcgaaactccgtctcaaaaaaaaaaaaaaaaaaaagtgagaggagaagtgaagataataaatggagtaacttaagtagttcatcatgggatctggcataagggaaggtactagctggtataagggaaggtactagtaaaggaagtgcaagtaagacagggtcactagagttgagagtaatggagaggcaagaaactggagaatgtgaggacaaaaaccaggctgaagggagagatggatggacagatggtgtggtttgcggaaaattcatagtacaaaattttagaaatagagcaattctgagtgataaaacccaaggtatgaatatgaaagattttcagaaaggaatggaagttaagattgatgcttagaaaagatcaagaaactattgagtttgttgggcattgattatcaaactttagaatgtattaagaatcttaagaattactggaaagtgtgttaaaaatgcatattcctagactgcacttgccaaattttgactttttaattttggaatcatactccagagttctttttagcaagagccttaggtgttagtcactgttgcaccttgttttgcccctttagaaccattgctgtcagaatcagctttggagacattttttaaattacagatgactgagccccctaccctaagattgcgtcattgttccctaaatatctgtgtctatattttcattaagattaaaaaaaatggcagtagtagtgataagatctcatctagacagtattttctcaggggcagtagggtggaaaagagacttgtgtcaaaatggcctggagaacttatttaaaatatagtctttcagacctcatttcatgtgttaaaagtatctgatgatgaggtccaggagtctgcatttttaataaactgctagttatatgttatgccaagtatgagaaccctggtttaaggtctttagaagtattatcaacatagatttctttgaaaaacctaagatgcctgtagaagaaagacgaacaagaaaatgtattggcacttcaggtcgttgagcttttttttctttttaaatttttctttgaagtgatttccatgtcttcatttagtgaaggattctaattacaaagactttctcattttgtaccccyctcccaaaagcctgtcttaccgaagatacatttatgactccatataaccaaaacaatgagaacattatttttgtttagtactaaatgacttctgatataacatgtcagagtctcagtctgaaggtcaatggagtagaaattggattgaggtaaaacacagttaggttaactagcctggcagagagatactagatgttactcacktgggtgcagaatggcttcaggtttgggctctcaggtacrgatgcaaagggaaaaaggcaaggcatasaagtgttcctctcaaattatcccttattttcggtgacctagaaactctgtcaccatcctcagggacatgtaacagaatatcctttgtgtacttttcccaaaacatggctcttcctgcccccattgttttgcaaatgcaaaagaaaatagtgcattcccttatagtctagtggacagtatcctctatgtgaaatgtctttcttgttggattttcacttgaacagattttctccctcaattaaggaagaaaaaaaaatgcatccatgattttaagaactcaacccaattatttcattaaaaaaattatttctagtgtgttttcatagggtsttggatactattaaattaaaagagaaactatggcacaggactttttttctctcctggagttactccttgttcctggtgacccaaaacttgtcctgtcctcaggaacctgtaacagaatattctctgtattcctctcccaaacagtaccctccctatccccattgttttgcaaatgtgatagacatcaaagcactgcttcactttacagtgaagtagactggattctatctatgacatctcctggtcttttaaaacaatagttggatttttttcttaaatactgaaaatataagaattttagaaagtactgaaaactttttttaaaaaatttcctttgaacattatttttcattattataaacatagactttctaattttacttttaaaacaatatagaaaatttctgtatttctaattttttccatagttataattttagtgatttgatgatattccatcatgttgacataccacagtttatgtattattcacttagaataaactttaaggaattttagtttctttttatttggaaaatgaggattagaacaagtttttcctctgagttaatttcaacaggttaactagattaataaatataccatttctgtaattcctggtactttgtcctagtttccttcaaatcatttgtgtcagtttgtagtatcaacaacagtgtattactttgccatttttgtcactartattgagtatttaaatcttttcgtttgtttgtttttatttttttaattgacaaaggtatatatatttttcatttacaacatgttttgaaatatgtatatattgtaatggtcaaatgagctaattagcatattcattatctcacatactttttgtggtgagaatacctaaaatccactctttttgtaatttttaaaaataacaatatattgatattaactatagtctatgttgtacaatagatctcttggtcagttttttaaaagctgtaaacagaagtttaatagaaagcaaatctatccaccatctcattaccttaaggaatatttgttgactgcctgtttggtgactatgttagaaatactgctaaatgtttgcaagctatttgtttaattttataccagtcttagtaggtaggtttcattattgttcccatttccaggtaagaaaactgaggcctgagtgcttcagtttatgtcctgataagtaggccaagtcaggatttgaacacaggtctgattccagagccttgtttttaatcctgcttcaaaaaaatcgtatgtattcttttggtattattcatacaaatgtttcatatttttatagacttcaaataattattttagtagctatattctttcattgtgataaaatacttactttattgagtcattccatattccatagtgaatatttgggctctctaggtttttattaattacatgatgcttcattgataacttttctgcatatatacttttgcttttgtggaattatttacttcaagtaaattccaagaagggaatatatagattattttggggwcttgcatatgccttgtaacagatgtaccagttttattataatatccctttgaattttgtagggtagccttagaaaagtgtttggattgattgctacaaagaggaaaataaacatcttctttcttgattatatgttaatataatttaatgtttctgagttttctctggctgtatcacccttattagtgactctacgttaacattttaaaattacttaaccattctatttttttctccctgtggcacatccatattatgcaagattatacttttaaaaatcaagatgcaaaataagtctagcatgacttaaaaatgtatgcataaaagctaaagactgaaattatctgtttgttcctggacaattatataatttttaaatttctactttaatttttaagggctacaaggcaggttattttataatcaaatttttttaacacagctgataaacatttaatatggaaataaaatacacaaaatcacagctaaaggataagttgtaaagaaacaaaaatttctctgtctctctacttctctaatgaaaatgatatttttaacaggtaaaataacatagcttcccaattttctattgtcactttttctttttaaacagagatgctgttcagttaaatgtgattgcaacgcgacagcttattctccttgcacaacaaatgaagaatctggaagtgttcatgcatgtatcaacagcatatgcctactgtaatcgcaagcatattgatgaagtagtctatccaccacctgtggatcccaagaagctgattgattctttagagtatgtttgtttraaatttatatacatttactttgatcccaaaagaggccaaggcgggcggatcatgaggtcaggagttcaagagcagccaggccaacatagtgaaaccccatctcactaaaaatacgaaaaaaattagccaggcatggtggcaggcgcctgtagtcccagctacttaggaggctgaagcaggagagttgcttgaatcccagaggttgcagtgagccgagatggcgccactgcactccaacctgggcaacacagtgaaactctgtctcaaaaaaacaaaaaacaaaaaaaaaacctttggattcaagtccctccctcttctcctcaccccaccccatatacatgtgcgcgcgcgcrcrsacacacacacacacacacacacacacacatacatttatctcttttcttcaaaaatttttgcatatcccctgcattcttattgtatagattaatatctaaataaatgttaatgaagtcaatgtgtagttttcacttttgaccaagtataatggtaatatttggaggaaggctcctgaacatcttattagtgatattaggggctctctttttcagggaatcaatcttagcaaccaagaagtaccaatggagacccatgactgcctgtttaatagcaaggctstaatttatcaaaggattcccctcaccaccccccagccatggagtatatatatagaggggcctttaattattagagaatcagaggaatcatagtcttttaattcataaccttactttttatctttctgaggactgagatcctgtcagcaattgttacatgaaaattatttgtgagtattgatagatagggattaaatgagggagtatataccatgaccttattctcatttgctgcagctcaggctttctcatcaaacagacaaggttcagacaagaaaaagagagatcttttttacttttacaattatataaacattccagtatccaccatattttcatgtttgttaatccttatataatatctttgaattttttcctcctttattcttccctcttttagtcttctttctttccagagattctatccactttgactgcttagttaacatctgctgctttctcctaaaataagcacagtcttttctttaaggctttcctgctaatatgaggaaacagatagattgtaaaaaaaatgagaaattaccaagacattttcattgtaattccctaatttctattttctcactcattttcttagatggtcccaaatatctacttcattttcttcatagatcaataaacagaaatatttaatatctgcgggaaaagttgagtgtgaaagttaatggagcattttactttttctcttactaacaatatatacaaacatttgagaaactgaaaaagaacttgtaagctaatgctgtatctcctttccttgctgcaaagaaatctagctaacataattttaagataactcatgggtttgttctgtaaactcgttctagtaataaggcttactagctaaagtttctcctgagtttargcaggtttttttttcctcatgtatcaactatccctttcatttttcaaatctcatctccatggtggaatttttcctaagttgggtagcaatttcccttcaatttaattgatgttcttttcctttcatatacaaaaagtacttccatatacagaagaaaattttatcttgataatctctgttttatgctttcttatcaattagtatgggtatcattagagtatgacaatatactgagtctacttgcatacacagcattattgacaagaagtaaaaacaagtacataatgtattagaatcagaagtttaggaaaaaccatggacaccacctagtatatcgccctccttttacagatgaacagagtagaccatttcttcaaagagaactggaggaatttttttgacttcatagtaggttgctaattgaatttttatagcatgcttcaatttatttttattgttcatcatagcatttgttaatctcattagagcatatgatttgcagtgctgcaccttaaatactaggccttttatgccttttgtgttcattataaatgtatgttaattataactgtatataattaacatgttacttcattaggtggttatatacagatctgtatttcctaacctgcaaacttccagaaggtttcagatatattttggaatttatttggactttagagagggtatataatttatgtactgtgtaataagaaaaaactttaacttgatctgggttagtatccctgatcaaatacatgtaaaatatatgaatgtttaagttgtatcaaaaaaaagaccataagtcagtgtagatcagattttgctatccactgtatgatttatgaaagaactcttagttttcagatctttttggatacagaaattgcagataagggattgtggacctgtagttgatgtttaagaaaaataagactaagttccatttttcagtaaaagttgtcaaatgatttgagtcagaacagcagatatgtttgaatgtgcgaagttcaattaagtagctttttattttatagtaaaatatctggaaatatatttgtatgcaatttctttaccaggtggatggatgatggcctagtaaatgatatcacgccaaaattgataggagacagacctaatacatacatatacacaaaagcattggcagaatatgttgtacaacaagaaggagcaaaactaaatgtggcaattgtaaggccatcgattgttggtgccagttggaaagaaccttttccagtaagttgttagaaacctttataaataactggagttgagaattttaagttgtaactctgtataaaaagagctggcagttctttaagaacaggtattatttactaaaggtgaattaccatggcaaagctgttttgtgttcatagagttaattttattggtactttcatttctataatgtgacgctgggtatatagaaatgtagatcaacatttaaaaaatcctaagtgaaaattaaaagctgtgacattttcttaagtcagaggagatttggtttgtttcttagtagcaaaaagaggcagaccttccaggaggtagaccccttcctctgtagatcacaaagtaaaaaaggtacagggtgttagggtatttgtgaattcctggaatgagagaaagcagaaatataaaccagttgggtcaattgatttaggcaaaacctaggtctgtgtaatggtagtaagtgatagcatctgttgttgctttgacaattattctatttttctctgttttattcataattttgaggaggatttaccattttccctaatctcaggctattgaattagtaaatagcataaaatcaaacttgaacaagcttaattttgtaaaaatattcaacaatataaaccctcttttataaatttctctttgcagagagttaatggaagagtagtaggtagccctttgaaaatgattttactcaattatttttgatcccagaggaagactgcttctgtttgggactggtagaaatagtctggcctgaatctagtctgttttttagtttttagaagacagctaccaagtatatatttggggttgtagagttcaaataataaatctctagcttcataatgtttctaagcttctctcccttttaaaatttttggtattagggatggattgataactttaatggaccaagtggtctctttattgcggtaagtaaaccttttgatttatttaatattctatacatttttctgytttttgtatatctttaaatatatatacactatggcttatatatcttaaggtgttgtttttaatttcaacaaaggcagggaaaggaattcttcgaacaatacgtgcctccaacaatgcccttgcagatcttgttcctgtagatgtagttgtcaacatgagtcttgcggcagcctggtattccggagttaataggtatatgaggtgacaatgtcgcttattaaatatatagtaactgaaaagggaagacatagcttttgagtaatgttaattaatccctctatccagatattgccataccaatatttaggctgtatcactgccaactccaagagttggtattatcacagacaatagcaagtgctcccatcagtagtaatgaagaattaatgttaatgctcatgtattacttacaggatagacaagttcacttaaaaatgaaaaaaaaaaaaataccctcccctaagcatgattttttaatccaaactaaaacttgttgaatatataaagagctgaaattcacagaatatggtttacatatattaaacatggtacaccagagcagctttaatcagcccatgaacatctttcctttaaaaaataatagtagcatttacaggtaacacttaaactttaaacttcccaataactttttttttctaggtagtaaactacccttatttttgataatcagtattttctgtcctaaaaaaagagagataggattatatgaatatgttgtttctggcaaaaggaaacttagtccataattttttttcagctagatcctctgaaaatgagacaagaagagctgaggtcatttgttgttttcctcgtgtttaaaaatagacattcctgctaatataaggaggaaaaatgtgaaagaaaaaagtctgtattttttaaaataagttattatttttggtaggggaagaagaaagggtagttgtaaatagtcattaaagtaaaaactaatcctttaaggataattaaaaaaaaatagtatagaaaaggtgcccatcatcctcatgtcttcttgaatactatgtaggacttagattggatatgtttggcctcttattatgattaattggtttcatctttgtctttgcagaccaagaaacatcatggtgtayaattgtacaacaggcagcacyaatcctttccactggggtgaagttggtatgattttacctgtgtttttgaatgttagaataaatcttaaagaaccaagttccctgaagttttaatgttagaatacctatgaggcattaaggccactgagttaccaatttgttcttaattgtcgtcttagaagtattatctaccaatactaccttgtggtccttaataatgtttcacaaatttaaaaatatactgctgtctattcttacccacccaccctacccttgtctaagccttgctgtttttctcctgccatctgcagtagccctcgtagatacctatggcatgggaacagtgctttttttctcccttgtgagcaccctcagtcttgatgttgcctatccataggcagtatcacttcttacaagaggtggtatatcaagtggtacccagagtaataaatgaaggagttaggaagtaggatacagtttgccagaatattttctattaacctgtattaatctatttaaattcacagattcacagcagatatacatgttcctagttctataggaatagcataacttaaataggaatagttaaaacccattgaaattgagtcaattttaaattgttggttgatgagttcaaatttaaagtaaaatttttttggcattgatttagtgataggtcttatttaacctctaattgattaattacccctgcagaacaattttgatttcaatgtagattttttatgacatttgtcctaggatttttctgtggcatttttatttcagtgtaaaattgaccattagagcatataagaaaaagataaaatctaaggtgattttaactttatgataattattttcagtattcttttaagaatatttaaacatttttaatgagttaggtttttttgtaatcttttattgtgttataaagtttagtaaaagctgaaattgagcgttatattttagtgactatctcaatatacatttctagtaaagtattaatatagatgatactaggtttgattatgttgacattacatagcctatataaattacaacagaagttaattttgggttgttttaagcctgttaatgtatgttaatttgagcatcttaagcaaaggatgattattttccttttcttttttaagtaagtacagtaataagagtctggaaagaggaacagaaaggaagaagctatcgtgagaggtgaaatatagaaagtgacactgtaaactgacataggtaaaacattaaaaggattttaagagtgaattttagcaaaaattcattcatctaaaattcataaatagcggcagttacaaaaccacttgagtttagcagtctaataaccatattctcttagctactagagagtagaaaagtttgttttttaaatgtacgaactctgacatctttggtaaaatattttgcattataaaaacatgatttttttttttcaaaacttcattacatggttattatcaaagctgttacacaacttttcttcttcagagtaccatgtaatttccactttcaagaggaatcctctcgaacaggccttcagacggcccaatgtaaatctaacctccaatcatcttttatatcattactggattgctgtaagccataaggccccagcattcctgtatgatatctacctcaggatgactggaagaagcccaaggtaatggtgactagctctgtcttatctgttcctctgttaaacaacccatgcttacactaaaatgcatattaactctgtatttgtttatgcttatgataaggcttaatagccttttgtgaatgagaagcctcttgaatttaagactttgtcagaaaagcaaagrtagtgttgtaagtcactctaatttgtttaaagtttggrtaagttattgtcatgtattgaattmtaagtcttactttaggcttctttctgaataacaatatttaaattgctttgacgcttatttttcctacaggatattatgtaagtcattccttcaagatgaatcctttaaaccaagtattcaggtgccccagttttaagtttaattccaacagcctatcgcatcattatcggaagggtgtcagccatagagtatctgcattattgctcgattgcactcatgttgacaggtcagaaaccgcggtaagaagaatagcagtaaatacactatgtattggtaaggtggtggcagcttgctggagagatgaaaaaaatcactagcatgagctttacctttagatttactcacctgattaatcacaatcagaatgctaggacatttcttagaatttggagatctttggggacactaactatggatcacatcgtattgggtcgttcatcctccaaaattccataatataggaaatgtcctacatcatggttgtcattgttattataagctgaaattaagcccttctctccctcttaaaaacctagggatgagtttgtataggggattaagggcaaaagttttgcttcaaatggatggtgcagttttatgtgaaaaatataggatgcttctagaaaattacttgaaatatctcagctgcccattcagcttataatatggttatttcagtttttgactaattatccaggttgggaatggcatagttatgaaaaaaaagttaataataaacagaaaactttgttttcttatcgttgttrtagcttttctttcttttttttgttgaaatcccgcaaacttaaagatctcctactgtctttaccacacaattacagtggaatatactattaaaatacttaattttttttaactacattggcattacagtggagtcgttgattggagagttcaggatttgagtatttttgtataaagaagatgctgatcccagaacttccatcaactactcaaaaaataaaagtgaggtaactgccagttacagtgtatcaggatctgagttcctcgtaggtattgtctgtggattcacttttccatgatgtttctaaccctatatgttagctaattgaaatatgtgagaggtgttgaacaactttagagcaggtaaagaaatattttcagacttttctagaatgatctgcaaaatgcaatacttgccattggaagcattcttcatggctaaaatgcagatgtaaattcatgaatggtggcagtgcatgctttctttatattaataaggttgttataatttaggacagaaaagtaaaaactgggtcaaaaaaaaaacaggttaaatacatcrcattgccttacacgaagaaagagggcttagtaaaattttaaaaaaataagtgaatagctggtttactaaatgcttcagaggagatgttgctgcataacaaatcatctcaaacttagaagctaaaaacagcaacagttattttattatttctttcaattatttctgtcaggatcaagaatttgagaaagaatccactgggcagttttggcttggagtctttcatgtgtttgtgatcagatgaaagaggccggtgggcagagaggcaatggaacagcaaggggactgatgttactctttgtcgtgtcataaggatctctccatatagctctttgcaaggattaatgatagccttaggggaattagacttcttatatagcagctgatggcttcaagggggaagtcttttagcaagtaaggtggaggctgcgttgccttttctgagctacccatrgaagtcatgcagcatcacttttgcctcattcttctagttacaagtgagtcacaaatcttcttaaattttttttcatatgttcataattttattttggtgcctgacatagcacatttttwaaaaatacttcaagttctagggtacgtgtgcacaacgtgcagatttgttacatatgtatacttgtgccatgttggtgtgctgcacccattaacttgtcatttacattaggtatttctcctaatggtatccctcccccctccccccaccccacgacaggcccccagtgtgtgatattccccaccctgtgtccaagtaaggggatttagaaagtggtcaagatgaagggtattgttgccatcatttttggaaagtacaatctgctatagtcaaccttctggccaaaacaattcatatttcttctacatggaaaggacagttgcttcttccccactcatcctgccttccccctcgcgcctccccatccccaccaccgccccagatccctgtggcatcagctggaagccagggttttgtcatctaaatctggtcaattggcggatgacgctctttaggagtgattttgtcagcatagctcctcaagtatagttcctcaataattgatatgtgaactaaagcaacgagttactgactgcccatacgcccatcataaatgatggtaagcataggataatggctttagacagttttattcaaaaagagagaaattgggaggcacccagcaaacactggtctataacatttctgaattccagtcagatatgtgttgatgatttcttgataaggagctcagtcttattctctgggagttctctgaggttcttgcctctgccctctgagtcatccttccttttgcataaaaactggcctgtgggctctgtgtgcagccaagtagccttcttatcctgcttcgtgcccatgaaaggttaggggatcagggcaggaactggaaagcttttcttgtaaattaaggccatatagtaaatattttaggtttagcaggacatgcggtttttgttgaagctactcatctttgctgttaaaaatgaaagcagccatagacaataggcaaatgaatgaatatgactgtgtcccagtaaaactttatttacaaaaacaggtggtgggctggatttggtatataggctctggtttgctgacccttgatatagcagtctcttcattttttttttcttgtctatccctttacatgtaatctgacatgattgcttaaaaattgtgtgagtttccggtgtatctgttttcaaggaatccagcctattagacgaaagccatacccataagtttctttgacacaaacccttctctatcttgggtcccctgtgaggttcctatgggacagcacttttagatcttaaatccttgcctcttagatcctgccttttgaacaataagagtttctgttacacatttctttaagatctggagagtgccttttgtctgtctgaaagttctggaaggcactgcctaggtctttctaaagtcttagcaaaggattcatcttcccctaccctgctatgctcagaaactgtttcttaaagaattcctggctgacattttacatttcctccaaattccactcaaatagttcatttttttaagatcatctttgtcctcttttgccctctttcagcaaatttctgctagatcattgagtttattagtacactttctatattccatataaccagaggtgacagtttgttgtcctcacttcaagccctcaccaacagctttcttaaaaccctttaaggcttccattaataatgttttcctggtcctttcacatttcactactgatcacctcacaggccttagagattttgtttaccacttgaccctgaagccaataccacatgttttaggtttttattatagcagcccctcccagtgttgagatctgtgttgagatttgttaatctgttttacataacaagtcacctcaaacttagtgtcttaaagcaatcattttatttgtgtgtcacaatatctgtgggtcaggaattctagaagggttagcttgatggtaatggctcaggatctttcaaatgattgtagtcagacagggactggaggaactttgctgtggagggagtggtaaaggggggaaggggacagagtagctggggtggctgggcatctctctctctccagtagtgtcataccctctccatgtggcctctccatatggactagtttgagcttcctcgcagtatggcagcctcagggggagttggacagcatacacagtgactgaaggcttcaagggtgagtattcagtgagcaagacagaaagctctacacctttctgacctagcctcggaagtcacatcatgtcacttccacctcattctgttggttctaagttattttcaactctcattgagaagacagtcaaggtgacattgtattgtaggtgggcatgtaggatggagataatatcataggcacctttggaaattaatatctttcctaaataggaaacgttaaggaaacagtcttcttaactgaggtttgtgctgtgtgaggctttctaagtatcaaagcaggacagatccttgacctccgggagcttataatctgaatgcaacaaggaatataaaggtttttttacttagacaattttgtaaatgttaaatacaaagtcttataatttataatatttcatttgttcagaaatttattgagcacagtaatagactttacaccttatattggggccttactatgatgcctaattctacattaaactgatgtcagtcatgtcattcatttcatccagtttacttgtttacataataattctgaatgtgagctagataagcatctgacctgacattttttaaaaaatggctccatgatcttatgttttggttaactagcataactttatctagcttaacttctctaaaccaggtatctatttttaatctgtgtacttctcagctggagacatttgacaacatttgcaggtatttttagttatcacaacagggggagggctgctaccagcacctagaggccagggatggtgacaagcatcttatagcatgcaagatagccctccacacgaaagaatgatcagacccacaatatttatagtgccaaggttgagaaaccctggactagataatcattaagatcttgccttactctaaaggattgtgattatttttttaagttgccataataaagaataaatacatattcagaacatacctggcaatgtagtcataaacatctgttctaaggtatgtttaaccaaggagtgatggtgcaaagttttacatttcttattccccaatagttttcaatccagtatttttgttgcatgataaatattctataaatttcacacacaaatatatggcctttcaaatttcttccccctccccgattttttattgcaattattttttgaatggctgaattactgattgatgttagggtgattgtgtcacttgaatgaatctgaagataagattaggtgagagaattatcagtgaacaagagttaagaaaaactttttaataaggtatatataggaaaaccgtgttagctgtgtgtgtgtgtgagatttaagtatgctaaactggcgtgatagtatatattgatgtagtgacaaacttgttgtatctttttgtttagaaaaaaataatcacctaatcttttctaagagcagcatgtgtttttcccccagatgctttttatctacagaactatccctgtccagaaattgccttagatgcttgataattcgttttgtgtttgagattttattttgaagttactttattggatgaaatatagtttttttttacatagtttatattgcttcattttcttccagtattctggattcagagtttatttctaaatgtattgaattgtgttatcagaagtgcttagctaatgatacttttttgatttttttctccttatttctaatgtaatttccctccatgcccctcccatttctaaaacccctaattttgagactgtctaaactacatgatacatataatcctaatcgttattataatataaatgaaatctttaaaaagtacttctccaaaaattctttttctgttcacagaagtggggatttttttggtgtttgttttgtttcagaaagttctttcttccctttccctacttataataaatattattgtatagatgttactgctcaagttagtgttatgatatcaatgacttacagtgagccatgatatataaaatgacagatttaaagattaaagctccttgtacttttaaaaacaaagaatcacagtctttctttaaagacacactttaaaaagagtgtcacactcctttatttctgtaaggatgagtattggtggggtatggagaggtgagtggatatctatttcagatagttttcagcatgagtcattgatttcacagcacatccagatgatcaagagtggtgccaatcattgttaaagaaaagttgttttgtttttttaaatgaatagagttgactatgtggcaaacgaatatttctgtattstttgcttcagcagtgctgaagagttggaattataaatataacacagtatgttattaattcacaggaaatcttagcaaatgcagctgtgaattaaaatgtagtttaaggaatagaaagcaaggaaatattaattgaatccattcatttgcttagtattttatgtagaaaatttaagagtattgtataccctttgagaattaattctgtatatcagcagaactctgtttaggtggtattaaatgcatttgctgctgctttcaaaaaaaatttgttttccttttggatttataaattgttcmtccaagatgcagaaatagtcttattccctgctgatttggtacacttaatgattaaatgttataattttaatactaatgtctatattatagggggaaacttgcaccctgggtggtgataggatttttcctaatctatacaaaatatgaatctgtccatttttcttacaatacaggatgatgaaaacaataactcgtcttcacaaagctatggtgtttcttgartatttcacaagtaattcttgggtttggaatactgagaatgtcaatatgttaatgaatcaactaaaccctgaagataaaaaggcaagcaagtattttctgttttatattagaaaataagtagcatactaattacagaactattagcaacctgagaaatattttccacagctattatgcaacaagtaagccattatttatagtctctcataaagctttagtcataattgttagtggtgaaataaaattgctgtatcttaacatttctagtgtaagtattttagagtggcaaaggtattttcaaagcatgattgaaatgttgattctttttttcccttaatgttggtttcagagagaattttatctttatgtgtttttctttcaaacactttgttttctcttgagttttgagaaaaagcttctctaagaaattgttttttataaactcttttactttttgttattccacattttgccctttgttactttggaacttaaattctttgtgtatgttctttttgagcttactctagatgttttaacatgtatatctaacacagactaagttaagcaatatttatagcctccttcttaataataataatatttagaaccttaaaatgttttagttgtgattaccactcccactcacttaaaatggttgtattaatacattacttcagttctctaattttttttttctttttctttttttttgagatagagtttcgttctgtgcccaggctggagtgcaatggcacaatcttggctcactgcaacctctgcctcccgggttcaagcgattctcctgcctcagcctcccaagtagctgggattacaggcacataccaccacacccagctaatttttgtatttttagtagagacggggtttcaccatgttagccaagctgctggtctggaactcctgacctcaggtgatctgcccacctcagcctccccaagtgctgggattacaggcgtgagccatcacacccggcacagttctctatttaaaccccatgttgagatactcttttgttcatttagtttttatttagatttctccctctctctctctctctmtmyatatatatatatataaaatatgtatatatgtataccaatatctgtgctttcagattttctccttatgatcttctttctgcctgaaatatattcagcatacctagaatatgttttacttgggaatctgttttgtagtgaattctgagtttttgattgtctgatatgtgtgttgtttcacccttggttttggaacatgatttcagcacgttaaagaacttttttgctggtcatagtagctcatgcctgtatcccaatactttggaggctgaggtggaagaatggctcgaggccaggagttcaagaccagcctgggcaatgtagcragacccatctccacaaaaataagaaaaaatcagacaggcatggtgacatgtgcctgtagtcctagctactcaggaggctgaggtgggaggatcagttgagcccgggaggtcaaggctgcagtgagatgtgatcacgtcattgcactccagcttgaacaatagagtgagagtctctcaaaaaaaaaaaaaaaaaaaaccccmaaaaaaaacttttttatttatattctgtcttacatttttgctgttgaaaagtcggtagttggctcttcctttataggtgatatgttattcctggctcgtcttccattttctctttatgtttgccgcttggcagtatcactatgatagtgggtgtaattttgaaaaatttacctagattgcattgggctttctgaatctgaggtttggtgtctttaagcaattcagagaaatacttagccagtgtttcttcaaatattgcctcttcactattcttatatcgtcttccaaaattcctagtgtatgttagattattctgttctccaaatcttttaacgttaatttcatattttgtatctcagtgtttctgggctaaactctagataatttaagattctgtgacagtctgccagctgtgtctaaactatccaattgaatttagagttttattgttttattttcagttttagaaagtataatttttcagatcttataaatgtttcttaaacagtctctagaattttttcttgaaacatattaaatataattgtttttcattctgcttctgataatttaaacttgcagatgatttgcagcatctgattctgccatctattacttgagctaggtctcacccatggcacctaatttttttaaaaaatatttgtttgactataaatttatattctttgaggatttctgtgagaatttttttgaagccgggattgaaattgcagttttctgataaggatttgcctttgcttctaccagtagcctagttaattagctagctggcatttataagccagggcccctttaaaatatctgattaggtttttagcacaactcagattaatgtaggccttaaatagacagtaggggccgggcgtggtggctcacacctgtaatcccagcactttgggaggccagtgctgggataacttgagctcaggagttcgagaccagcctgggcaacaaagtgagaccctctctctacagaaaaaaaaaagaaaaattagccaggcgtggtggcgcatgcctgtagtcccaactacttgggaggctgaggtgggaggatggattgagcctaggaggcagaggttgcagggagccgagattgtgtcactgcactccagcctgggtgacagaacgagactccgcctcaaaaaaaaaaaaaaaaaaaagactgtagatttgggtcattacagtttctcaagagtttcttttttcatccagtgccagcttcctttctcttcccacttactttttttattttcataatgttttatttaacctaacatataatcaaaaatattgtttgaacatatcaaaaacctaaaaattatttaaaggatattactttctgttttttcatactgagccttcaaaacccagagtgcattttatactccactgcatgtctcagtttggactagccatattaaaagtgcccaagaggcacaggtgggtacagaaacagaagcctgtactgcctgcagaaccatgagccagttaaacctttttatctttacaaattacccattctcaggtagttctttgtagggttgcgagaatggactaatgcacctaatcactacctcctctgtcttcccagagggaacaactcttgaattctagcactcaatattagttttacctatttttgactttatataaatggtattatacagtattttttcattcttctgttgatagacatttgagttatttccagtttctggctattaggaataattatcctatgaacattctttatgtctatatgtacacatttgtgtagggtatatacctagaaataggatagcatagggcattcatatgttcagtttagcaggtaatggcagttttccaaagtggttgtatcagtttacattccagagggcagtgtatgagagttcctgttaatccacatcctccataacacttggccttttaattttgattttcaattttagccacttaggtgatatatagtggtataacaaaatgattttagtatacattacctagtacataaaatgtttatttaaaaatagtaaaaaaaaaaaaaaagtaatcctattggaaaatagattagagagatgaacagtttacagaaaatgattcccaagtatttgaaaagatactcagctttactcagtggaaatgcagactaaagttagactgggatattatttactatttatcaaatttacaaaaatgcagacttggacaatgtactctagtgagttcctggacaaatcagcatccttacacattgctggtagaactatatggtgtatgtttctccattcttttattttcagtcattttgtatcttatcttttagatatgtcttttgtaagcagcatatagttagttgtaagcagcatatagctgttagtttttattttcagtctgacaatttttgacctttaattggagaacttaacccctatgtaattcctatcattttagatttagtctgactagtagtgctttgtatttgtcactctggttttaagttcttttttcttttttttttggccgccctttagattatgttttgaataatttaatattttcccatctatatgtgttacatagaattatgttcctttttggtttagtaggttactctagagattacaatgtcctttaatttagcaaggtctaatataaattgatacttttatccttctctgatagtgaaggatcagcatgtatmtgttattgttgttattaggttggtgcaaaagtaattgtggttttggccataatgcatgttttaattctatatatatattaagccacacaagccagtatttttattgcagcttatgcaataaatattcatacagatttaccagcgtaactgtccttttattgctctttatttcttcctccatccccagacataaatctagaatcattctcctgcctaaagaatatccttaagtttactttctctaacatgggttttctgctgatgtcagattgtctcaggttttattctctggaaatatctttatttcacctttatttttcaaggatatttacactggcatagagttttatttaggacttattttcattgcgtacttagaaaacatctctgtcttttggctttcattgcttctgttgagaagtcaacttacagtctaatagttgttcttttggaggtaatctataggacctttttctgactctcatatgcctagatgtgtgtgggggcagggatgggggcagtgggagttgtatttgtgttttgaattggtgacttggtttcttatttttggaaaatttccaggcattgtcttctcagatactgcttctcttccttttttttttttttaaataactgttcttatgggattcccaataacatacacatataccttctcaaaatgtttcctaagtcttcattttaatgcagagttactgcatttttatattttactgaattttttatagtagctttcccttcctagaattggctatttttagataagtgatggtatatactgaataatatctttgtaactccaaaaaattatcttattatatgctaaggagcactgagcaatgcatagccctcttactttgccataacatttctgaaggctttcttttctggatttacctatccttctcatcaaataatctaattactgttatccaaactccttagccagctttcataacatatcttgatgtcagagatgttgttttcataacgcatcttgatgtcagaagtattctccaggaaaattagtctgttcagtaggcatgaactggaaatgtatcagtacgtgcataaagtagtgaggaatacatagatctatgtggacaatataattttgtctttttttttctttgtttagcaaaatggtacaggcttttttcttcttatatttaacctacttctctttaaatgctgacattagtttccagattatcttctcaaatgtttccatgtttaatggatggtatgaactaggaatacaaacttttcagtgactagcggtaagatttcagaagttaattctgtatttaagaattttgtaattatgtcacttggaactggcctttagaaaaagtgtgaatttctgactggttgtgagaaaaattagtcaagaaaataatcagtaatttttttgttaacgtagaccttcaatattgatgtacggcagttacattgggcagaatatatagagaactactgcttgggaactaagaagtacgtattgaatgaagaaatgtctggcctccctgcagccagaaaacatctgaacaagtgagtttgatgcatggatttgattgcttcttgtcttccttatgaaatattccacaatttttttggtaaactggtatatttgctatatctgtcattcaaagatgcagataatttttaatggtaatctcttatatttgtagtgctttttaatgtgatttttatgacactttttaagactttcacattattatccctctcatgcctcataactctgtgcgactttgcagggcagccagttctatagatgaggaaattgaggcttaggaaagttatatttgcctaagccatattgtattgagtggcaaagcaaactagaatattgatctttgactccatattcgaacctcttttctctacatcatttttcttacattgccgtcctatcttgcactgcctgctgaggtcagtataatttatgtaacattattacatctctaaaggtttgtatttctttcaaacaccatcagaaacatcaaaattttttgaaacatgagctgaaacatgagagtaacatattgttactctttgagaaaagggaggatcctcctttatcaagttaatgccatgttttatgcttggataagggcttatccacttggcctttgatcttgtgactgtcacctgtaactgaaagagtaagttacttgtctgacaacttgtaagcaactaaagatgtcaaaaaaaaagtttgctctattttgtctgtactgtgatgtatgtaatgaatgaacctttttagattagatgggaagctctagaaattcaaggtacatatctgttttacctacagtatacttaatgcctatcataagtttmaaattaatatggatttgagctttgattaaaaactcagtattaattagctgccatctaacaatatttttttctagaaaatactgtctaacatatctcttgatttgctttccaggttgcggaatatacgttatggttttaatactatccttgtgatcctcatctggcgcatttttattgcaagatcacaaatggcaagaaatatctggtactttgtggttagtctgtgttacaagtttttgtcatacttccgagcatccagcactatgagatactgaagaccaaggattcagcattagaacatctatacatatggtgatctaaatgtacaaaatgtaaaatgtataagtcatctcactttttgtcaagacattaaaccatcttagatcggagtgtgaagtaaattatggtatattttatgtaacattttaatgtttatgctcataaaacttagtgaacacactgtgttatgccagctcaaatctacagtagccaccaaaaccatgacttaatattttgagccctagaagaaaggggtgtgctgaggacaagagtggggaaataggaacactgaccagtataactgtgcaattctggaacatattaattaaaataatatgccttaacatatagtgaatttctaattctaatgttcagtgcaatggaagacatttatttggacagtaatactagcaaagttggtagatatttgattcttcattttttgtttttttcattagttgaagtgggttttagttttgtttaaaattataaccagcgtattttcacatcattctgtaagttaaatgatatcaaacatgaaagagatgttctcatttttctttttctgattaaacgtctgatgcatatcatttttctataagtaatcagttgcttttaaaatcagaaggctatattattctaatgaccctattcgatctaaatgggtttgagaatccatatcagcaacatacgtgttttttgacagaaagtgaaaacaaattccgtaaaactgttagtatcaaaaagaataggaatacagttttcttttccacattatgatcaaataaaaatcttgtgagattgtttatgttttgaagcaggaggatttcttgagatttgatggaagtgggagttgggaaggattcaccatacttgtgttctcctccctttataaattttattcataggacttttaaaaggcttgtgctatctttccagtgaaaactgaaagtgcattattatggaagaatgtatttgcaggtagtaatagcattaaaaaatatactcgtgtgtaaacacatactaattttgaccttgaaagatgaattccttcaagaaaaataaaataatgcttaagataatgtgtacgaaattaaataaaggactttatttacatactacataaggtagcaaactgttgaatgagtttgaaggtatcacttattttttatgcatgtgattttagctttagaaagaaatgcgttatagaaacaagtaatagcaagaaaattgatgtatattttaatgatacattaaaattcccttttaatcataatagttaactctacttactgttttaacatacatttgatttaacaaattgttcagcataacacttctaattaagtttatcaagttgtactgtattagataatcagcagtgtatctggagtatgtttaaagagaacagttcgcaatacaaaaagttacatggagctttacatcttaactttctttgtcaatttaaatgcaatgtataaaaagtttattttgctattgtgaaaaactaaatgtaaaggaaatcacctactttcatgcaggtgtataatcttgaaaaggaaaaatgcttccatgttgaagccagattttctgtagtaaaacttttaaatattattttaaaagaaatatgtatataaatatctctatattctttggaatgatactaaagtctctggtctaggaccataccttatataaaggtataagagaccatgacaatgtctgaaaatggaatagataatgatgccttttatttaaagtggcccacataatatacattgagtactccatctctccaaatgtatttccataatgtgttgaaaacatgctaacatttgtatgatttttatacttctgccgaatagacttagaatcagatgaattgtctgtgtgtcttgcaaaagagttggggacaacttgggcaggcctatgaagtgcatagggagtgtatgtcttctgaatggttttattgttcttgtaatctagcttaaagaaatgttaactgggagggtgctgaggccactcactgcattaattttgtgtgtttagagttctgttgtcaaaagaaaactaatgaataaattagtttgtcattctagaatttaaagttctaagattagtataaagagtatatagattgttaatccccaccagctagactttgaacttaagtcagacttaaagatttgagaaattatttgtgtcatttactagacgtgatttttagttctgtttgattatatttcctacacaaacttcttatttaacaggatagcctactaaattaaatgtttcttatttcacttaactcatttgattaaactgtattctaaaacatttggggtttttccccctattcagttttaatcttggaatatgcatttgtaaattgtgatgtcattgagactatatttatatttgacttggcaacattaacatgtcctaagacttagtgcagagaagcttggcagtacgttctttgacttaaggatggcataaaataatcatttttgaacctgtgtaataaagcttgaaagcagggaaaagaatttccttttcccccttttttgtgttgtctataggaattaacttgggattgttttgtgggtttttgtttgttttaaatgtaaattgagaatcttttataagaaataaaagcattattgggtgcctttgtttgtaaaccaaaaagtaataaatgaatccctatatttccattatagtatttattgtatttttatgttctgaaaattacccatggaacaatatgcttaggattacaggaagcagtccttacttacacttcttgtctgttttaggtgtacttgttaattcttatgtcctaattttatttaattctgagttccttacacagcattttagggaaagaatacaggcaggatgacactttgtgttaaagtgttatttttatgtattacctggaatgaggcaggtttttttctgttttctaaaaagagtaaccaagatacctccagggtgtcattgggttccagctgctctcctccacattgaatgatatcttgttaatttataggcacatttgtggtaatttatatgtctatagagtaagtataagagataattcattagtaataggaattaactgaccccttttggatgggggagagcatcaggctggggtcaggtaagtgtaaatggccttctgagcatgctcttctaggctgactcccagccctgacttgaaaccattagcgctaacttgctctgttttgagaaaaactttccaaacttttgcatgagaaactagaaaaaggaatgtatgccacgtaactggattacagaaatgagttaattgtctctgtgataaaaaaaaaaaatgaaatattttcttattgaattaatatttttgtcttgaagcattttctagtgatagaatgtatttgtcttttttcctggtggtaccctcttagcatatatctttgctatccttaagatcctaaacaaatcatctttgtcagttaagtatagttgcgcaaaaattgttaaatcctttgtctttattaaagaaaaatttgagtaacattaagtttgatgtgctcctttgcaagttgatgtctctaaaattcatttatttagaaaaacatgaagtggtaagtataagtttaatgtctttaccgtgggcctgaactcagagaaataaggatataattgttttttggcctgagatcacagatgatagctatgatacctgtaattttatacaagggggaagggagacaatcaagatttttctgaattcatttgtttaaaacaaagttaacattcctagttattgtcttcaaaatacttttctcctctagacatttaattttcatttttaaagttccatgaagttgaattaggtgtcttccaaagatgctttggaggcagaattcctttattttctgctgttgtacagtaaattctttctctctcatataaatctagagagcttcctttcacttgttttgagcaaggtgtaactagaaagtgttaggttgagccgtataaaaatgctaatatgtctttgacctgtaagaaatttcatatggctcagtctagtattatagctgcctttttttcttttgtttctaacaaacacacctgaacctaaacagatgggtgtagttttattaaagtagtcatccagattgtttatcagtatttagttgtttgacatttaatacctaactttctgctttatgtcacatctttaacaggttcttgtcatttcccctaacttctgccaagttggttgttggtttcttgagagtgaaaccagcattgcacattttatgttataaaaacaacactaataacatttgttaagttcttacaatgtgccaagcactactataagcattttacatgtaataacccacttatgccctctgtgtttgtaagtgtgataactaaggtgtatgatgttaataaagtaccccaggttacactgctagtagcagagccgagacttgaactcagactagttccaaagcccactctccagtccattatactgtactgtctttcaccataggaatacagatatttctggactattcagaggttacctgacttgtactaaatgtctttgctgacttcatttcaaaaacccagcattcatccattcaacaaattttgagtgcctgttatgatttaggcactgtgtcttatattgcaattattgcaattatctatcacataccaaactaacctgctcagtggcccagtcctgaatatgacacactgccttcccttaggattttgtgatttgatatagataaataagcagataattttaatatgtaatgacaggtaagaacaaaatactaagggcacagagcgatttcttgcttatttcgagaaagctcatacaaactacttttgaattatggttttatgtcagattggtgggatgctcgggtagggaagcatccaggtttcaggaagagcatttgcaaaggctgggaggtataaggaaccgagaggaaatgttttggtgctaaaggagaggatggctaaagaaagatgaggctgtagagattgctgggccatctgagggccttcagacgctcagaatgcactataggctgtggaatggctattgcaaaaacactaagaaggttttcctagccaaagcacatctgttactggaaaaggggtcccaatccagaccccaagagagggttcttgaatctcgtacaagaaagaattcttggtgaatccataaagtgaaagcaagtttattaggaatgaagaatggctactccataggtagagcagccccaagggctgctgattgcccatttttatggttatttcttgattatatgctaaacaaagaatggattatccatgcctcccctttttagaccatataggttaacttcctgattttgccatggcattcgtaaactgtcatggccctggtgggattgtagcagtgaggatgaccagaggtcactcgcatcaccatcttcgttttggtaggttttagctgacttctttactgcaaccagttttatcagcaaggtctttatgtcctgtatcttgttctgacctcctatctcatcctgtgagttagaatgcctaatttgggaatgcagcccagcaggtctcagccttattttacccagtccctattcaagatggagttgctctggttcagatatctctgacatatccaatttctcttaaatatgagtagattttgtactttaaatgaacagacttttaaatatattttctaaatgaaaatttaagagaaaaaaaatactggtatagtgtcactcgttttttgagaatacagaccatatcagtgtttaaacaaccagtctctgtttttcagttttctatgattctcaaagtgcaatccccagaccagaggagtcagcatgggcatcacatgggaattcattggaaatgcaaatttcggaccccaccccagatctattgagtcagaaactggggtggagctcagcaatctattttaacaagtcctccaggtatttctgatgcacactaagattggagaaccactggtctaagagtcagtcttcatgccataccaacacgatctaagtggaatgcttttctggggttttgggacagggtcaagtaagcaccatttaaaaatcaacgtttaatgccaggcgaggtggctcaagcctgtaatcccatcactttgggaggccgaggtgggcggatcatgaggtcaggagtttgagaccagcctggccaacatgttgaaaccccatctctactaaaaatacaaaaataaccaggtatagcggcgcacacctgtaatcccagctacttaggaggctgaggcaggagaattgcttgaatccaggaggcagaggttgcagtgagctgagacagcacaactgcactttagcctgggtgacagagcgagactccatctcaaaaaaaaaaaaaaaaaaaaaaaaatacaaaacgtgtgtacatagaaaaaggtcaactggcaagaataaggccaaaatattaaagaagttagcgctatatggtggttatgagccccttgttcttttagttttctgcagtgaccctgaatgattttttaaccaaagcaaagtttttattttaaagtaatgtaaggatgagtatgcttggatctagaaaaataacaaaagtgtaaaaaatgtcttatctccaataaaaggtgagggttcattcattctgaatttttagcttgagacaatttttcttgtgagtcgggaacaacaatttactaggctgctatgtcccttgaaattgtccaggttttttttgttgtgtgtttggtggacttggtaaatacttccacccttaccagtttctaacttggtctttctctgatgaccttgccaacccccgaatatacatcctgtccatataataagtaatcactcctccagctagcttagttttcctttgtgattcccattataatgctatgttggcattctcatttataaatcaagtaactgagtttatagagaatcagctctcacagagactgctcaactcatagtagactgagaaggtatttctggcccttaaagctgagttctagagcctgtgctatgggaacgtctaactaccatagcatggtaccaacagttgaaagtattgctaattttcaaatgtcttattagaagaaatctgaaataatcaagattcttttgccttaacctctatgaaaacggcctaacctaccccattacattaaaaacaccaatttacatttttttcctctatttgatgtatgagcattcttacagggcagggcctattttttaaggtacctggcacacagaagttactcaatgaatatttcgtcttaactgtagaatgaagtttgtccttccttccatcagtcacaggattcttaagcttcctgcttatatataagattttgcaatcaacactttgccaagaagggtataaaagttaacaccactaactcttttgttgttggtcacctagagatgttaacgcaacatgtaatgcaaataccccatgttagaaactccacagttgacaaactttactgtcttttattcaataagcattgattagctgtttgtggtccattaatgtaaaatcatgctaagtgctcttttctaaattgttaacatcataatcaaagtactaacagatgcctttatacctccaggatttttctttgaagacatttttccaaagagatctagttgtctagattgaggggcaacttaatttctggtttatgggtaggtttgatgactccgctgagctcagtagtgctgaagtggttaggagggtgggctgtgcatgtgacacctgacagaacacagtagatggaacactgccctgcctatatcatctgccttctgcaatatgccagaatgcatcttatagacctgcattgatttttttatttttcccccatctggtacaagagacagtatgcagtgcactgtaagaactgcctaccttgctctgagattcaccagacttcaagccttagttccctcagtattcaatattgttctaactcataccgcattataaacacccttctgcctctcatgaattgtcagatatacttcacctgcaagtacattgtatatatccatactctgttagttttactagaccactagattctgggttatcacagagtaaatggatagttcttaagtaaatgtcagtacttgggtcctcgactactcagaaatcctccttggcactaggtagacagtagtatcaaaaacacacaaaaaccatcctgtaggaggaaaatggaagagcccgttagagcagaaaggaaatctttttttcacttagtggagaaaaatgcaaggggaaaatgttgacttttaggcattctaaaactccagttcacaggcttttttacaaagcctgagtatattgtataaacctagcttcatctctttgaaaaccacytatacttgtttgcctaccctggtctcatttgctattcttctttttgtcacatagttccttgactgatcctgtctgctcgtgccttccccatctcccatttgaaagctcccttgccagctgtaatgagcctcccaggatcagctggcattcttcttccaggggactgggctcctataaggtccacatacaagaagaatgacacttttggaaataaccaagcagttaaagattagtgttgaaagggattcttaaaaagcattgaatattgctaacttgctttacccttgaagagtcagtggtaaaattggagtcagtatatatatattatatataatgttaatatatatatcctattccttttatgtcacataactcagcaaaaaaaagtgctgtcagagaatattggtttgtggggggagaccttttctgaaacctaatagtttttaaaaagcagaaaaggtttgtcaaacattatgcttatttaattcttctttaattcagatgatttctctgagctcacactcttcacattattgctagggttcttgaagaatcagatcgtaagtttataaagccccaaactgaaaatgccatctcattggatgataccaatcactttgcaatccacaagctcagagttcattctagctaacccccaaaccaggatctggccaggtcaaaattactggctaactttttaaacatagagtttccctggactgacccctggagttagtttctttctttctttcttctttctttctttctttcctttctttcctttctttctttctttttcttttttttgaaacagagtctcactctatcgcccagactggagggcagtggcacgatctcagctcactgcaacctctgcctcctgggttcaagcaattctcctgcctccgcctcccaagtagctgagactgcaggctagcacccctgcacctagctaattgtattttttctagagatggggtttcaccactttgaccatgatggtctccaatgcctgacctcaagtgatccacccaccttggcctcccaaagtgctgggattacaggtgtgagccaccatgcccggcct

SEQ ID NO: 95146 - DNA, 36504 bp, Homo sapiens
acacatctgtgaccccagtgacaaggaaagtaatatgggatatggaagaaaaccagagatctcagttttaggaggtcaaagtacagtttccagcctatacacctcactctgcctcagatggtcagaatttaaaaacagccaacacagccaggtgcggtgactcacgtctgtattcccagcactttgggaggctgaggtgggtggatcacctgagatcagcatttggagaccagcctggccaacagggagaaaccctgtctctaccaaaaatacaaaaattagctgggtgtggtggtgggcacctataatcccagctactaaggagactgaagcatgacaatcgcttgaacccgggaggtggaggttgcagtgagctgagatcatgccactgcactccagcctgggcgacagagcaagactctgactgaaaaaaacaaacaaaaaaaaacaaaaacaaaagcaaaaaaaaccaataataaaatatataaataattaattagcttcctctcccatcttatgctgaaaatgttgtactgatgattttatattggtatatgccttgctacatagaaacacataggtctgtttatttaatctgttgtggtttgtcttcatagtattttccttgattagaattttccagcaaataaagagagatacacattatstggaaaaawatcagtcactggcatgagattttcttacccctttcttctctatttttcttccccaataatcatttgtaataaaagaataagagtttgcctttctatctaagatgttgatttctggaagcttctttttaaattcttgagaagccgacatgacatgaaatcttcccaactcacagatggagattcaaagacagaaggagttgaggattggcccaaggttacactgtgcataaggagacagtcagcactgaaactgggctggtgattctgagtctcatgttttgaccacattccctactgctggggaattcctgggatttttgcattccttggaagtaaaacaaggatatggtttcagcaaataacaggaggacaatagccagtatacaatatctgtaggatgactcttccttggcggggggcggggaaccctccgtatggaagaataagattggtggacaactgttcatttttaagaaaaaagcaacacattttcatttatctaatagatatttactaagtactatgtgtaagttaccttgctaggtagtttagatagaagacaagaaaatgataagatacagtcgctgcttaatacaaactactcaactagtccaggagccatatcatttctttcttagaaaagagcctgacacagccaggcatggtggctcacacctgtaattccagcactttgggaggctgaggtgagcggatcgcgaggtcaggagttcaagaccagcctggccaacatggtgaaaccccgtctctactaaaaatacaaaaattagctgggtggtggcaggcacctgtaatcccagttactcggcaggctgaggcaggaaaatcgcttgaacccaggaggcgcagatggcagtgagccgagatcatgccattgtactccaccctggctgacaagagcaagaatacgtctaaaaaaaaaaaaaaaaaaaagaagagcctgacacatattaattaacacataaatattctgttaatcaataaatcaaagcatgtaataataatgttagctaagccatatctagcctttgctatttgccaaatactttgcattatctcttttaatacaataattttatgaagataatattattctcattttataaactagaaaagtgaggattagagagaataaattttgttcaaagtcatagaactaatcaactcaggacttaaactaagtctgtctgacctcagagtccatgccccaagcccctgatagaagaaaaacttcagctgaattaaatttaaaggtgtttaattgagcagtgaatgatttgtgaatcaggcagcccccagaatcacagcagattcagagagactccagggatgcctcgtggtcagaacaaatttatagataaaaaagggaagtgacctacagaaatcagaagtgaagcacagatagagctagattggttacagctcagtgtttgccttatttgaacacagtttgaacactcagcagtgtatgagtagctgaagtaccactgctgggatgggccaagactcagctactgttacaggcgcaaactcctagttaggttttcaattttgtctacctattaagttaggttgcagttcatccacaaggactcaaatatagaagtacagagtccttctcgggccatatttagtttgttttagcacctcttacccttaaaactgtgcaagcccccccacctccagctgatactctctctgtgtgagtatatgtgacttttggatatttaatacacatttcagaagagaaaaagatttttctctccaaattgcagcatcaattattggcatcaatgcacaatttcctgctttttaccaatgtacaaacatgttctacactactgcaactggtctatatctgtgctaagctttcactcaatattatttggtataaagagttcaaatacttgaattccaccagctatatatcatattcatgtcagtatctattaaatatacactactggtgcagtttactattatgggatatttaggttactatttcactttcactctgatgaatagcattgccataacaagctataaacatttattcctttggttaataatcatatcattgagatcatggaatcaaattattggatcaaagtgcgtgaacaagtttatgatccctaacctataccaggttgctttgcagaaggtctggccaatttccaaagtcatcagaaatgagctggtgcgacacttagccccgaatcctgccaacacttaaaaaaaatcattcagttttcttaatttaacagataaggtggaacggtgatgcttagtttgaatttcttcattactagagaaactaaaacttttctatattttcctaaatgtatttttctatgtatataacacttcatttatccttttccttcttgcatattaaggggataatttttttaaacccaaggaaaagcatttatataatattgctataaataattctaagaaactctgaatttcagttgactaacagttttgggttacctgcgctttgcacaggtaccatcgtaagatccaaataaattacacaatttttaaaaatgtagttgtctgagaagttagagacggtgtcaagtgataccaactatctgacacaaccatgtggcaatttgattaaacacttgtgattccataaatggcaataccactctcccaatttgtcagtgatgcttacttggtggttttctttaagagtttcaggctcctttgacaatgtgatagaaatctgtgggttatttccacggaaaatatccatatgcacacattttgcacaacgtttcaccgacttcctagggtgccaagttaataatccctgttttacagcaatcttggacttatctctatcattgtttttttcatttgaaatatttctcccagctgcactgtgctccacatcccccttgccaatcccccattccatatctgaggttacagaatggaaaagtgcaggagaaagatataaatggccactttttaatgatatcattattgcgatgagctctgtgacagagctaaggccagcgtgctatgtaggaaagccatcatctggtttgagtccatgttgctcacccagacaatcacaatagcttcctaactggtctctccatttttctcttgccttcttcaccagttcatattttgcccagtagaacaacatgcctctttaaagcctaatcagatcatattcctccttcataaaattctacaatcactctaagaatataattcgaactgctatctgcatagcctccaaagctgtacatgatctggccctgccctctctcctgctgctctctgcttagctgtgtccattctagccccactttccttcttctgcctcaggaccttggcacttgcaaaaccctctgcctatgccacacatctcttagagcttcccatgatctgctttctctctccattcagatctcagatgactgagaagtgcattccctgatcacatcatctaaaatcttatcttcgtctagatcactcttttctctttatcttgttttattatttttcatcatacttgacactaccaggcactttatttacatgtttgttttctgactttctccctccaacaggtatcaggatgacagagtctttgtttatttacaaatatatctccaggacttagatcagcacccgatacacatgtgcattttctcaacagatgtttgttaaataaatgttggggttaccactctacgtatacacattagaccacaactaatttctattaccagagtaaaaagttaaaaacaggttttttttaaagtaaaagccatgaactactcctaaaagaataacataaaaattgtaacaactaacagtctgatattcacatatgaaatttacctaccattgtgaaaaattggcatgagaagactagatttgtaatttttattaaaaaagttgttatgcattgtatttgaaaaaatcagtacaaacacctgttaaagcagtgaaactacatagaaagattattaaattaaaaataaaatttctcctactgttcacatgttaatctactttacatggcattttgcaattgcttttttattttaaacctaataatgtgtcttggactttttttaaaaaaaaaaactcaacccttgagcctccactgaattcttttcaaaagtttgagaaatacctttgacttaataggctataacttatgaatgggcatttagattgtttctaggtttatgctattacaaaaattttttttgaatatctgtgtgtatgtatatatacatgtatatgtctgtagaccatatataataatatataccatatggtgcatgacgtaatgtattatatataatggaaaatatttgtcacatacactgagtggatagatagatacagatatatctacagagagagagaacgataagttcctagtaccaaaatatttgaatgagatatcaccaaattgttcttctaaatatcataccaattgtgctcttatcagtaaagtattacaattcctgtttaattttacacgtgccaactttggacattagttaaacttaaaaattataatcttctgggtgcagtggctaacgcctgtaatcccaacattttgggatgccaagacggcgggatcaattgatgtcaggagttcgcgaccagcctggccaacatggtagaacctcgtctctactaaaaacaaaaattagccgggcgtggcggtgggcacctgtaatcccagctacttaggaggctgaagcaggagaatcgcttgaacccgggaggcggaagttgcagtaagccgtgattacgccactgcactccagtctgggcgacagaatgagactccctctcaaaagaagaagaagaagaagaagaagaatccattccattgctccggcctccagcctgggctgtcatcctacactagtcccaccccttacacagcttccaaatctgcccctatttttcacaccgctacgcacatcctataacaagccaatatatgtttgtcgaatggatacatgcgtgaacgaattgggtagggagtaaagtgaactaaatgatgccacatgtgttaataatcactgaaacatgttttccattgcttctgtttttcaaagcggttttcacagcttgagttctctccattcagcgtcacgaaagcccattcgaaatggatatcagctgacgttggcctgcacgcgtttgccttcctcccctcactccgcttgtgcgcctctctttcggctggctttcctctctccttccatctcccctctttcgcttcccttccctctgcgcccgcgcgcgcctcccagcacgctggtcagctcctcttgctcgcaagcaggtctggccccagcggcgcgaagtcacgaggctgggggcggccggcggcgaagggggcggggcgaggccggggcgccgcagcgcgcataggcggagcctcgggccgcgggccgccttggtatatctgcgcgtgcgcggcgtcgctgctgggccagtcgggacagaggagacaagatggcgctgcgggcgatgcgggggattgtcaacggggccgcacccgagctacccgtgcccaccggtgggccggcggtgggakctcgggagcaggcgctggcagtcagtcggaactacctctcccagcctcgcctcagtgagtatcagagagtaatacgtctccggtctttgctccctagcctagccctttgctcccagtcacctgcttagccagcgggtagggggtaggatttgtttttccctcccgcgtctcccctccgaccctgacccacttgtctctttagaaggagatttgcctgtacctaatatttccaggagatgggctgagggcaagagcaccagcgggaactttttcctggggttggtgggctcctggctgttgccctaccccctcccctccccagcttccctaggctggagccttcttaggcacttgcttcccgtccccgagggccacttcttgccactccgatcttaatcttcccctgacttcatttggatatctaggggtcgagggaacgccccttctcccctccccctggtgaggacctcaatggggtcttcaactcctgcggagggcagacggtagagccttcgctgacgtggtcaggcctttcgtggatggaggtcaggccagtagccagagggagatgtggcttggtgtttggtggaggggctgctccrcagaaggacacctagatatcagagaacgctagagctgaaaagtaccttgcaggtcatccagtccaaccctatcattttacaggtgagaagcctaaggttctggaaggggtaggatttgccatgcttcagacacttaattattggcagagcagggactaaaaatccaggttcttaaattctcgctgggcctttttctaccgttgcctcttcatttactgaccagttaaccaaacttggttgagtgcagggttctttggggaagccaggtggctttgcccataggtggtgtgtgtgcataggcttgtttaaatgttgtgattttttaaataaaaaggccttaatgaactaggtttaagtggatagctcagcaattccaaaagaaatggttcttgattactagagaatgcagttgtgtagcatccaacttcttcacagctttcttcggaactggcaatgagccctcgaaatagactttttaaaaaactgggaaaagcacatgatgtttccccaggtggtgagactgcattttcactggttaattgccagagtgtctgtctctaggtggccgactgattaaaaaggatttcagatgaagggtgttagtctgggcgatctgaagcctgactaatccacatcctgatctgtcactgggtcatgtgatagcactgcagtgtgaagaaaaaggaaaacatttgattcggtggattgctgagatgtgccttttacagtaactgggaattgttcgaattasaaaatgtatgttgggacttatctgagctgaagtagctacttcaggaaatcggcagatgttgcattcttatgcaaaccttggcaataaatttatacctacgaattacaaattctcttttattaattgcgtttgtatgcattgcctttctttgggtaraacagatagacattagtggtgcctctcaaaaaaggttataaaggtgcagtagtcagtttccatataattaatcattcagtgtcaattcagagaatatcaactgaaataacgttgtttaaagagtactccatgattaagattgtaaacctttaagagagatgaatatgatttctccatggtttgtacgtacttacccagttgctgagggatttttccagacgttattcttgacaaaactgttgtagcatagggcttcacactcaactgttagatgtcagggatcctttttatgtccccactgcctagcacagtgcctgacacatagaatgtgtcttgtaattgtgtaacttgcatttaaactccttgctcgaataattcagtggatagattgtgaacatgggtggaatcagagcagggagttgaaatgcccggtcgagttgagtttcacttatatatccgtgttattctaaaaagcataaatgatatcatacttaggctaacaactaacagcatttgaatatcttcttattttgccatattttttattctactcaaaagttttaattgcttctgagtaaatattgattaacctcttaatttttgtgggttttttttttttttttttttttgagatggagtctcgctctgtcacccaggctggagtgcagagtggcgcgatctaggctcgctgcaacctccgccttccagattcgagcaattctcctgcgtcagcctttcgagtagctgggactacgggcgcacgccgccatgcccggctaattttttgtattttagtagagacgggatttcaccgtgtttcccaggctggtggcgaactcctgagctcaggcaatccgcctacctaggcctcccaaagtgctgggataacaggcatgagccaccacgcccagccaacctcttaatttttgtaaattgattgtaattttttgtgaattgattgatgttatcatttaaggggacatgtaattatagttattgtgtgtgtgtgtgtgtgtgkgtgttgagacagggtctcactctgttgcctaggctggagtgcagtggtgtgagctcaggtcactgcaacctccacatctcaggctcaagcgatcctcccacctcagcctctcaagtatctgggactacagacggacaccactacgtccagctaattttttttaatttttattttttatttttggtagagatgggatttccccatgttgcccargctggtctacaactcctgagctcaagagatccgcccgccatggcctctcaaagtgctgggattacaggtgtgagctgctgtgcccagcctaaagcttcacactgaacctttagaagtcagagatcctttttgtgtccccactgcctagcacagtgcctgacacatagaatgtgccttgtaattgtgtaacttgcatttaaactcaaaaagctttgttttttgaatgaagaaatggagtaatgttgacagttccactgtacaaattagatccttttaaaaaatagcttcaagattataggacttttaaaagaaatggaaaacatattcaggcttgaaattaggaaattatcttgagcattttagttgaatttctgaagtcacaaggaatgaaaacttgattttctcttaaaagaaaagattcaacaacatacatagagctttcgggtgctatgtattttgaatttggtcatctccatttttcttgagaccctagatcaactggccttaagtttcttatatcataaagcagagccagccctgcaaaaagtcaaaataggaatcttctccttgcttttttcctagaacctcttcttcaggtgctcactgctcatcatgcagatctctactcttcttgtacaagggaagatgattgctctgggtttttgttttgctaataaggcagaggctaaaagactaggacacttattatgcaatggctgtcaactttttctgagtatttcgtaatcattaaatggtgttactagtgttgagcaatatcctatcctgcaggaggaagaggatgtcatctgataaaatatgtgctccttaaaacccgtgtagattttgggttttagatgttacttcataaatacttgtctggctcatatgatagttcagaatcaaagccaagacattttggttgtaaaatatgttaagaaggtaatataagcatatatcttctgtgttgtcagaagttctgattatcccccattcacacacctacgggctcaaattctttttcatttggagaggagtggtcaatatgtaggtaaatagaaatatttaggtaatttacaaatgggttttttcctgttttgaagggcaacttaatgtctttgacagccatagtttaaactggtatctctgttttgggctgttaatggtaatggtgaggaaggctggataaatctagagataaaaggtagtgtttgttatcattctgcttggttttctttgcagatagttttagtaccatggagaagagctgtagttttatacaaattgtctttttgtccccacttgtagtccaagtgctagaagctgtatgatctccatactttttaattgtactgaagactaaggccagaaatattataagggtcatagagtaccaatcctaagattaaagaaaaacaaaacagttagaagcctggctcccccatttaaaaacaaacttatcagggccttagtttccttagggtgcatcagccttgcctactgtcttagccattttctgctccttttaacagaaaacctgaaactgggtaatttataaagaaagggaatttatttcttaaagttctggagtctgggaaggccaaagtggaggggccgcatctggtgagagccttctttctggtgggacttgaaagagtcccagggtggttcagggcatcacatggtgagggggctgagaatgcaggggcactagctcaggtctctcttccttttgtaaagccaccagttaccttcacatgataattcattaacccatgaatggattcatccattcataagagcagagccctcatgacccattcccctcttagaggcctcacctgtcagtactgccacattggggatgaagtttattgcctggtgcgttaaaaagtaaaaacctgttttgcatacctaaaattgcaggcttgtgaaattgttttgggtggtatcgcttcataattcttacaagataccataccacaaaaaatgaaccagttcagttttagaatttgggctgtagtagagtcaaagaataagtggctttggagctagagtgtacacattcagatccttgggctggttgcttgtgtccttgggcaagacacaataatttctctgagaataatttttctcttctaaaacttagaataatgatagctaactctgtctgttatggagattaaatgagaattcctgaaaagtacttattaaatgtatgatagtgttatcaattaacttgcaaggttacttactaactttttaaaaggctggatacgttgttccaaatttagagacttttgatgaagtagaatcttgtcttctgtagtagatgtcaatttgagtcactgtttccaggaaaagctatgactagtgtttctttttcttggtcatacttttgctcgtgactggcaaaatttcatagtttggaatgagcttgaattttaaacatgagattctaaagcagtattgttgtagaaatcagacctataaaggagatacaatcttgttgaaaaaataaagagaattttaagaacctggtgtattttactgatgttgcattttattcaaaacagttaatcataaatctcaataccatatcccctccctcaccccagctgtttggtaaaggttttggaaaggtctacgtttctgcatttctgaaaactggtttcaagaaaacatatttctaatgtagctcactttccatttccacatggcaattttagaaagccattgtaaaaaaaatgctgggagtctttaaaatgagaacaatgaagaaatcttttaaagggttggaattatgttttttaagagtattcaatcattttaaaacagtagggatggttttcataaaagtggcagaaaatgtggcaaatggggtctttctagtaatctaggggaatgattaatcctttcacatgaccatccatccaagtagcttgctttttatctaaagtggggaaaaaaaaatacagttcagttggggggcctctattgagacagttgcagtacaattactgatgtattcaagcaaatatgtgatgtctggatttaaacgtcctgttagcaggaaagatggaagccctgacagtgctgtctgctctgtcccagcatttttaccagggctctggcttccccgcctgaggctgaaggaattgtaattttaaattccaaagccacttgagtggacagactggttagtaaatggtttcctcatgcttgggagtccacatctgtgccaggaatctctgtgcaagctcattataagacctcaaaagaaatcaagcaagtgaaaaattcccagttgctagacagcttcatgttaattattttaggccttatagtaaattttcttcaaaactttagttcatgtattttttttcagttgttctgcttatgaaatttagtgaattttgtaggtgtctggtagaattactctcccctgagtgttcttatacctgatccccatttcacttgccatgcaggtgtgataggtgagggctttgggtaggacctgctggggtagaattagctgtttattcctagggcgcactttgcagtggaaaacaacagtctctaacctggcagtaacgtttgactttttttaaaaggatccttttcttatcttgtttgaccccctggcctttctttccattgcctactccgtccttcagaagctcttttccctagtttttatgacaccatttaattgtggctttttaccttgcasgctatacaatttctccaatttcctttgtgacttttgtcacttctgcgtaacattaaggattccctttcctcatctacttagctaaatgctgcgtcctctataaagtttttacttttctccctgaggtgagaactattcccctgtttctgctgtgctcccacaaaccctgtgcaggccatagttagagcccttatctcatcacattctaactccaccccctcgcataagactgaacttttgagacaagcagagtctttccctctgtgtcttgtttttgtatgctgggtgcttacaacaatgacttactaaggattcaaaatatttttggttggatgacagtggattatgaaaagttgtataggcacagatgtagtttataaatgcattgaaaaattttgtagctatttgagtgtaccgtattctaatagacatgataacgtagaaaggatttttggtaatgccagagagctaatttaagcttttgtgctatttgactaaaactgactcttctgtatttctttccagcatacaagacagtatctggagtcaatggtccactagtgatcttagatcatgttaaggtaataccactatctgttttggtctatttatgtagttaaaaatgtggcattaagtcctatttagtrtactttaaatttttgttatgatttttaagccatactttagactgggtgtcagtcagtctaaagcccagataccatgataccctgggctatcagataccctgggctaagatttttgcctgagctgtttgaccaaaatatcatcyaagaaaataatttccataatatgttttctagaacagtaattgtacattggttacaggggtgggtcagggagaggcatacaattactagtttgttgagagaggttaatgatgcatttgtgcttggcgtgtgacccctctggaagtagaaaatacattgagaaacacttcttaaaagaaggggcaaagtgcattgcctcttctgctttatcactaaggtaatatctttctgtatgataaggcacctgtagaaactaatctcaagatgaaacctagtgagtttacctcctgactgcagtttgatatgtgctgcagattgattcaaagccataatcaaactgaagttgtacaagatttaggcaggtgcccattaacgttttgtaaaagaatacagcctcctcttttgttttctggggaaaatattaggaagctttgtttgtttctttatattttaattgttttctatattctttgtgaaataaacttttggactcatttttaaaatataaattttttaaatattagtaagtatattattgaaacagctcaaaaaatrtttgggctcaattgtgttaagtgctgagcccagtacagaaaatataatggtggacaacgagaacggggtctcccctagttgagcatagtatagtggagatgcagatatagtatcaatgtctcattggtacgcgctgtgaagaggcagttagggtgctgtgaaagatgatactgggaaggacttagaaaccgtctctgaggaagtaattttaagagacctaaaaaagtttcattgaatgttacattgggttgtagttataggtgagggaagactggtaaatcatttttatgtagttgtagaaaaatctatttagactatgagattkatagtgatttgattttagattttggcttttgtttttaacataaaacatataggatcaaggaacagataatctcaggcaaattatatcagaatagaagaagatgaagcactgctgccaactaattttgtgaagttaaagtatctttgactccaaaccagaaaaaggatagtattagaaaagaaaaatagctgttctcacttataaacacagatcccaaaattcttaatgcattcatgttagatattagcaaaatacctatgtaaaatatcagcaaaagtagataatttgatattagaaaatctaacaatgtaattcaacacattcatggattaaactagaaaaagcttatattcttctcaataaatacagaaaaaaaatttgatgaaattactcattttttaaaaagcctcttcgaaaataaggaatataacaaacttttaacctcttagtgagtatctaccacaacctgcagcaaatcaagtacttagaagattctataaacattcccattgaaatcagtgaaaggaaaataactattccctctctactgctgttctcagtatgtacttcacttctgacaccagatgtgtgtgttttttcctataacaattcagttctttggggaacacctattggatgccctgcaatttagctcagttctggcactcactgcaaagagttgtgtgtaccccataggttaagggcttagtcccacaagactgcagtccacttcagatgccaatcaaaagtagtgggtccccaggttacccacagctactgtccaactcggctacagattgaggatacccttctgaagtttgataatttgctagaataggttacagaactcaggaaaaccatttacttactattactgatttagggtatattaatatattaatattaccactactgttaaggttatattaaaggatacaaatgaatagccagctgaagagatgatcatagagtgaggccctgaagagtcccgagcacagaagcttctgtccccgtggagctggggtggaccaccttcctgacacatggatgcattcttgctgccgaacccagaaactctccaaacaccctcagttaggattttttttgaagacctaagcatgactggtcaagtccttagcagcggtgattagtcaatttccagtaccgctactctgtcaggaagtcaggggatggggctgaaatttccaatcctcactcagcatcactatccatctttctgctaaaaacttacccagtgctatggggaaaagaaattagggtacaaagcgattagaagggaaaaggaaccgccatcatcatttcttgataatctgattaatgaatcagaaaacccaagtcatccagtggcagacaattagaaacaaggtagcaaacaaggtagtggatacaggatcagtttacaaaaatttttagtgttctgtatgccagagtaactatttacagaaaactataaaacattgtgaaagaccataaaagaagacctaaaataagtgaagattccatgttcatgaaggaaaagactcaattctccccaattaacacaatcagggaagagtaattaaaaatgaggatttggttcagtaataagcagatataacagtggaacaaaattyagggccctgaaatcaactcttcacacatgagaattcgacttggtaaatcaacattacaaggccatgggggacactgtgctgctcagaatattgttagggcaattggtttcccatataaaaatgagaaatataaaattagttaccaaaattccagatgaattaaagatctaaatatagaaaaggaaacataagtctaatagaagacaatacagaagaccgtttttgggtgcagcacaccagcatggcacatgtatacatatgtaactaacctgcacattgtgcgcatgtaccctaaaacttaaagtataataataataaaataaaataaaaaagaaaagaccgtttttatgacttcaggctgttttccaaacaagacacaaaagacataaatttgtaaaggaccacagtatgttttattatgtaaaaagtgttgtgcacatgtatcctaaaacttaaagtataaaaaaaaaaaagtgttaaaacttttgtatgaagagataccataagcaaaattaaaagatatgaaggagagtaagaaaagatatttgtacaaggattaatatagagaatctataaaacttctataaatgaataagaaggatttacttgataagtaagaaaaggatattaataagcaattcataggaaatgaagtctgacttatcagtaatatgaatgaataattgacaatgataagcatgggaagttcctcagtattggtacaagttaggaaaatgcaaactaaaatgatgctgtttttattaaaatggcaaaaattacttttaaaagcatagattggcaaagatggagggaaaggatacttttttatatagctagggagagtgtaaattaataaggttcctttgcagagttaatttggcagaaaatgggcatggcctgtatgtggcccaccaaatggctttgggaaattctggcatgcttgtatgaggagccccatacaagaatgctcattgtaacatttctgtgctagtgtaaatttggaacaacctagaactccactggtaaaagaacagctgaatgaaaggtagtgtagttatctgatttaactatatctgctctgttttaacattaatactaaggtgcccatatctccaaagggtcttaaagcaatggcacatcatagtttaattggcaggtttctcttttcacatcacacaaaataatgatgcatctttcaataaattatgttgataaaataagtattaacatgccaaatgtcatgttaatatcaggtcaagtgaaaaacaaattgcggartgattagtacgttgccatttatgtaaatcaccaaacttcattttttggagacatgtctttttaaagagtaaaaatggattagaggaatatatatcttgttaggagaactagattgaggatgagacttaagcattatcttattataatagtaattattatttagtaactttcttttttttttttttttgagacagagtctttttctatcagccaggctggagtacagtggcacgatcttggctcactgcaacctccgtctccccggctcaagcagttctgccccagactcctgagtagctgggattacaggcctgtgccaccatgcctggctaattttttatttttaaaaaattaaaaataaaatttcaccatgttggccaggctggtctcgaactcctgacttcagattatctgcccatcttagcttcccaaagtgctgggattacaggtgtgagccaccgcgcctagcctatttagtaacattttattcttcccctgtcaaccacatctggagcacacagttgattacacacacagcctagaaagcaatcatcatttctaggtggtgrgaacatgtttatctgtacttttctgtagcctcaaaactataaaatatgcatgcagaggaaaagcaatacatttaattcccatgttttcatggatttaagacccttcttctgtaccttatgctttgtttgctagtatatgtgacagtgatgtttgctgtaaggacttaaactacctgagggtattgaaagctctcagcaaaaacctgtgtctgtgaagagtrgagggttccatattcagacacaacatgggagagacagagcatgtgtagtaatttggggggcttgtaaaatgtcggatattgatcctttatttttttctctttagtttcccaggtatgctgaaattgtccatttgaccttaccggatggcacaaagagaagtgggcaagttctggaagttagtggttccaaggcagtagttcaggtaagtttcagctggccagctgaactgtttcctagttgcctacacatagggaacactgcttgtttctttctgtgatgatcattgcataagtgkttttagagtctttagagattggttaccggctgcagggaaagaaactattattgcatgtttttttgctcagtgtcacttagtccgatagcaacactagtaagtggcttttttaaaatggataaaattaagtagtcatgtagaaggagagagatgaaaagcagaattcactgatgatgtgatgaaaccaacaggatatctgtctgagtttcttcctttaaattatctcatacatttcctagttttaaaatgttacctcactatgggtaatggcaattttctaaaataacatgttccccttaaaaatagcctaaagcagggattggcaagatttctgtaaagggccagagagtaaagcttttaggctttgtggggccaactaaattctcctacatattcttctttttctttctttcttttttttgaaacaaccctttaaaaaatatatatatatataaacatatatatatttatatatttatatttatgtatgtgtatatatataaacatgcttagcttgcttatcaaatttggcctgtaggcatgaacccttgatctaaaggttgacaatttratttattatcatatttctttgctcattatatcaaaagtagtatacattcatgggttttacattataagggctgtttaacagacaaataaaatgtaaatgcccgtgatctaaattacttctacccttctcattaattctttttcttgataggtatttgaagggacttcaggtatagatgctaagaaaacgtcctgtgagtttactggggatattctccgaacaccggtgtctgaggatatgcttggtaaatggatattattcattctaagccgagatctgtttccttttaaacatatttccataatgtcttttaaaaattatgaacatttgaaagtcagcatctactctgycctgtcttcttactgatttctaggtcgggtattcaatggatcgggaaaacccattgacagaggtcctgttgtactggccgaagacttccttgatatcatgggtaggkacagtagatggattgctgtgtttgggagaaaataacctcactctgtcttgtacctttgccagatagagagtgttttttgtgatatcacttaaagyagwtaggcaacacgctccataggttataaattattttattatttaattatattttcttagaaattatcgtaaaattttatgtattaatatcttaagatactgtaaaatatctaggatatatctgaaatgtatatggtaaaaccatgaatttgaaattaggacttctctcttatttgctatatctttattttactttaggaacttgaattctattaccctatgttttgtgagtctacaaaagagtaaaggaaaaaattatttcaagtttcatatttgaaaaataactgattttttttgtagtaaagagatgctttatgtagttctggtcttctggtgctttttcttttcttttaatttgatrtgatatctaatttcattcatgaataatgcggcaacttgttgaaattttcctttttggaaatacrttaggtcagccaatcaaccctcaatgtcgaatctacccagaggaaatgattcagactggcatttcggccatcgatgggatgaacagtattgctagggggcagaaaattcctatcttctctgctgctgggctaccacacaatgaggtgaggactgggatyggtttgctatgaagtttagcagacaagaatttctataatgcatcactgttactgagaaaccgaataaagsgttttcaaaataaatactcagtgttattgtttgtataatccagttacctcacatctttatttctgcacatgtcttcttgcttacccttgcatatctttgcaaaaagtacaaaatagttttgttgaatgaataccctaaaacatcctggtttcgtttatgattacgattccaaaaagtttatggtaaaagttattttgttgtagaaatgttattttagatttcaactgaattcttctactttgttcatcagattgcagctcagatctgtcgccaggctggtttggtaaagaaatccaaagatgtagtagactacagtgaggaaaattttgcaattgtatttgctgctatgggtgtaagtagaatttttgttttagtatgatatgtaaaattttgcttgtgtcgtgagaacattgtagtaagctgtacatatatagttgaatttttctttaggtaaagaatttgcaatctggcattttggccaaattaaggactaaaatttggcatttgactaatttgaaatttaagaataatattgtttgtgccccaaaccggctctttgttctgttggtttttgtgaagatttttggggtacttgaggttttaaaagaaggaacaattcaaatctgtagcttggctttcatcagaaataaatgttaaggatttttcttctcccagcactgatgaagttattgttatttaggtaaacatggaaactgcccggttcttyaaatctgactttgaagaaaatggctcaatggacaatgtctgcctctttttgaacttggctaatgacccaacgtaagtaacagagctatttctttctgtggcccagactcgggatcaaaagtgtgtcttaaggttggggaggtaaaatgtsgtaataacagcatttggacctaacaatgaggtaaccctgtatttaaagtccagccctgcttcttggtagttatctggcactgggcaaattacttaggttctgaagctcataagatgtgacagctgatacttgtctcatggagttgttttgcatattaaatgagwtcatacttataaattacctaatacacaatcaactctctgtaaatgattttttcctcctacctcaaaaatctggctttcatttgtttcctctctctctccttcctacctgcctgccccaccccagtgttgagaaascatacaactgagaaatttgggacatttataaataactgttaataccttacttaagaatttgtaawataacaactgctttactctcctcaattcatttaaaactttaaaaggggaattgtactgttatttccagaatcatttctttttgtgttttctttttggtcttttggtttgagtggcctaagacttaatgttccctttcagcattgagcgaattatcactcctcgcctggctctaaccacagctgaatttctggcgtaccaatgtgagaaacatgtattggttattctaacagacatgagttcttatgctgaagcacttcgagaggtaagttgttcatgtttttccctcagttaaacaaaattggttaattttcagggttaacttgtcactttgcaagttttcattctttatggttttttaattccactgttcatatattaatagaatgccttaataaatcagaaaggaaactacttcgtttttgtcaacttggtagaagtgattagaggttaagatttaaatggttagcctgtttatcatactgtcactatctccatggattaagaaatgaytgtaaaagggagtaaataattcaagctgtttattcagttactctctcgggaagttctgtttctgtccagactattaatttttaaacctttttgtaattccatttttaatgatgttaatattttataaagaccctactctcacagtactctcttcagcacttttttcttcagaaaacccagtgtttatttaggaaaaatattaagattctagcaggctgggcacggtagctcattcctgtaatcccagcactttgggaagccaaggcaggagggtcacttgggatcaggagttcaagaccagcctgggtaacatagcaagaccctttctccacaaaaaaattaagatattggctgggcgtagtggcacacacacttgtaatcctagttgctcaggaggctgaggtgggaggatagcttgagtccagtaatttgaggctgcggtgggctatgattgtgccactgccctccagtctgggtgacagatcgagacctgcttcttaaagaaagattataacagttacccctagaagttttggggtatttgttcagtaatacaaattactgaaattttgagtaagttacttttttaagcacataaaaagattctgaagagacaggcttcttaaaattccttcagtgccctcaccatatcttactctgctatattgctgtttcagactaactctagtcaaggactagtttttctcccccatccatcacagaccaatacttttgtaaaatgcaataaaattgagttattagaaaagtgaaattttaactatatatataatttacaaatgcagattttagaattgttagattcaacaggcataaaattrttctgccaaattgccctgaaagtttctaaatgcttatcttgctttctgtgtgatcattgcatgttgataacagttggtctgcagaccgtgctgtgaggagcacygctgtagcacgctcctttgaagatgtcagagtagcacttagaagttggatttcataatgctttagggttctagttgattgtaggtgaacatgcacacctatagtctggtatccatgtctctaagggaaagatcgtttatcaccattcttattttgtgcagtgsaatggactcctgactttgtgaccttcagaaattgtttaatttttctgacccttgattccaactgttaattggaggtagcaccttcctcatagggttgctgtgaggattaagttaaataatgttgtaaagcgcagcagatgattcctcgtgtacatttccttcccttttgacctttttgggattaggttagataaatatggctagttccaccacgtggaataaatcttgtgaaccaagaatcttttctgttttaaaattaacttcctttgatttataaaattgcaaacagattttcttctagcaaactatttgaaaacttacattatggcaatacgattttagcaaaaaccttctggtgccccattgtcaacatttttgttacagaatactttgaatttatgttgccgggagatttttctaaatcattcttaaggacagtatttaaaatgaacatgatgggattttcaactttgtactttggcatgttgaaacaaacatgttgtaagcaagcttgttgtaatatcgtgcatgatactcttctgcttgacctgctgtcaggtttcagcagccagggaagaggtacctggtcgacgaggttttccaggttacatgtatacagatttagccacgatatatgaacgcgctgggcgagtggaagggagaaacggctcgattactcaaatccctattctaaccatgcctaatgatggtaagttttggtatttggattataacacacctaatcattttaaagagagagaagacccatctaccttttcgagttgaagttattttgagaacacatcccctaagagtttatcttggttatttgcctaaataaaacatttttcatttgaaaattacccacagttattatcctattgtggaggaaaagcaattttcttcataatttaagtttttaactttattaggtactattgagtgcctgctgtttgcaggacactgttctaaatgtaaagaatttttgaaaagaatttatggtctctacttaatgtaagttactcagtctaattggggatgttttttatgtgtgtgcaccrgtaatttaacatggccatgttcagtgccacatgaggagtacaagtgggaaactccacaaaactgagagacagatttttttaaccaagggctggttaaaaatgactttccaatgcctgtctgtgtgtgtgcccaggatggggtacgactattcagaattcctctcctgtgttgcctctttgtccttatttcagtttttgaacaacactttgacaaaatatggtaagttattacttactgtaattgagcactgttctgagtgctttataaatattcactcatttgctcctcatagcaactttgaggcagatgctgtttgaggcacagggaggtcaaatgatttgttgagattagcaagtgatagatttaggacccagtttgagttcataactcacactgttactctgtactgcctctgacgtgaaaatgatttgttccaagggagtagctacaaaatgatgtaatttaacagatttggaaatgtgttgctttgtgtgacctttttggtgcagcctgtgtagtgttgtttacttgtctatatgcctgcgttttgcatggtgaaatgttgtgtatccatccgacatagcttatgaactaagaatgttcttagtatacatcaggttggcaaatttctataagggaactttgggtttaaaatgaaactttacttatattgagaggggagagcgcttacctaggggagagagtatttttaatgaatgcagccagtttacctcatagagccaacacatgtctaactgctgcaaccaaactaaactggccagtatggttgccgctagccacatttggctgtttaagttcaagttaactgaaataattgaaattaagtttttcagttttgttagccacgtttcaagtgttagatagccacatttggctaatggctaccgtactgcacagcacagacacagaacattggcagcatcacagaaaatgactctaagaacactcttctaagtaatgttacaggtagtacagagggactttttgtgggtttggttctgagagatggccgctttaaaactcataacctaaagatgccatgcttaatgccaactgtcttcctctggtagatatcactcaccccatcccagacttgactggctacattacagaggggcagatctatgtggacagacagctgcacaacagacaggtactggacgggagcagtgctgggaagcttgcagacctgctcatccgttattctttagtgacttggattttgctcttaggaattgstttgcttagaargtatcaacttgaattgtttttaatatgrttataaaattgtcatttctattatcttaaattctggtgtcggcagagcgccagaattaagaatcttcttaacactttcctttattgtgtcttaaaacagagtcacttgtctccaagaacttttttgggaattctgttccataatggtatcatctaccaatcttgttattgatagaaaaaaatgacttttccatgcctctctagtagatgctgacttctaaaatcagcttttaggaattattgttaattttttttattttgtgtataattttttgagtcagttcagaagaccattttgactcgataatgtggtagtacttatcaaacagatgttgaaagttgagttttttaaaatagtcttgtacagtgttatagatgacacttttttggatttgattctcgaaagaaatgctatgctataaagtgtttcttactaccttttcttgccaggaagagacagtaggattcatctaggagacaaatgcagcggttgtctttgatttaagttgtaataatgagtttcaaatgkttttttattaccagtaaaacttgagttttgtacttaaatatagtattttttccctctcattctacccaagatttatccacctatcaatgtgctgccctcactatcacggttaatgaagtctgctattggagaagggatgaccaggaaggatcatgccgatgtatctaaccagctagtatgtacattcttctaagaatggtgtttgaaaatatggatacgtttctgctgtcttacacctcttgtctttcacscttaccacttctctcttccccatccacatggaattttagtgtaggcttgatgtggaatacataatcattcattagaaccaaagcagccttttcccataaggacagatgcaaatgatcaagattagcttgaaacccatgtctaatgctatcaagtttccaaataaaaagccaagcaatgaggttgtttaaattttttattagcaattttaatgttaattatagagtattcctgaaaggctactctgacctatttcttgcttaacatattaagccgtcaccagaacactaaagtatacagttttatgtaggctctgaaatccttgatttttatactcatataagattgtacactaacacaaataaagaaaaacactatggccataaagtagaaatggtaaacttagcgatatcacagattttttttgaatagaacttcaagatggatttctccatggtttaactatgagttctgattttcaagtgctctataaattttgagctcattaacatattgaagaagtgtgcgttttgtagaacattaggagtgtcttgtgtattgtatgcctgaagactcctttctgagtgagaatatagtccttctggtactttcatatgaattttatgtgaattgtttttgtaaattccttctatgggctcttgtgaggagaactagagcagtacattcctatatcccagatgactgaacattttgagagcttctctctgctgatgggtgcctttcttctctttagtatgcgtgctatgctattggraaggatgtgcaagccatgaaagctgtcgttggagaagaagcccttacctcagatgatcttctctacttggaatttctgcagaagtttgagaggaacttcattgctcagggtaagatgactgttggcttacaaacataaaaagcctcatatgtaattttgaaaactgctttccaagcctaagaaaattctcattggtttctatatagttatttctctggttagagaagaggctctgtcacctgcctgccttaaccctctggcttctcctctgccttctaaacatcttgggagatcttgacttgattttccagttactcagctaccatctcactgttttccttcttccatcgcccttctgaatcctccttcccagcccctctgcggtacaacttcattgccagttctccttgctgctaacttcttagcaatgatctgctttgacatttggggcttgggactttcctgattcatctatattcatctctttttctcatttcttaccttcctgcctcttaattgttagtaatccaaaaagctcagttacctgttctttctgctttccctcccagcgtccacttttcactgtgctgtgggctctatgatgtgtggacctttacccactgtccagacctctgattccacaatctccagctgccttaggaacaccgttgttgtttatgccaccatcccctcaggctcagtgtactcagaaccaaagttttttttccagctgacctgcctagcagtgccctttcaatttttatctacctctgctataatcattgtcccagttaactcaagctcagtaactgggcattattcttaaccttctttgcttattgtccattgatcaattatttactaatttgtgttgttttcttttgaaatatcttaccctattcagtttttatttccattataatgccttagtcctgtatttcttaaactttaatatgcttttgaatcagctggagatcttgttaaaatgcagattcagatgcagcagaccttggtggggacagagattttgcatttctgtgaattcctgggtgatgttgaagctgctggtctctgaccactcttgagtccaaaggctctagtccaaacctttgtcccatcacccttggccattggtgccaactttttcaccactcttcttgactctttgtgtgccattgccagggtaaatatattactaattttattggttgtccctctactaaaaaaacctgtagtggtttttatgacatagcataggcaggattttcaagctgttttgcttggtctctcccatcacccctgctaatgctagtgatactctcttaacatcggtggttacaacaggtgtgtttactttggaataaatgcatcaggctgtacacttaggatgtgcacctttccagttatatgatacattattaatattcaaatccccaaaatattcatgattattggaatttttttaatgcagaacctgaatatcttaaacaaaataaagttttcctctagagaaaagaacccagacctccagccttggactcaaagaataagatttatttgtggggataaggatgattctgccatcaaaaataattttaacaacttgggaaaccactgaccttcagatagtgatactctggagagggttgcatgtattcaggtgcttgactggcatttatgtccttctgagcatctgtgttagtcgccttcaaattcagccttttctctttgtgtgaaccttctgtgctagggagacttttcttactaatctctggacaaaacattgattctagtttccattgctcaagtatcctacccagttgtcaaatctcagatctgtctcaccatcctctcccgcaagactgctccctgtctcagcccagccgcctcttccctcttctctggttccttatgatactcactgtctgtgccttcttttcctcagtccttctcatttagtcttgggagtcccaacttttttttttcaatatctatttaatacactgctagtcatataacaatacatactggataacactgctaagttggaagtcatttgcatttattaattcaatctcaattttttaaggtccttacgaaaatcgcactgtctttgagactttggacattggctggcagctactccgaatcttccccaaagaaatgctgaagagaatccctcagagcaccctcagcgaattttaccctcgagactctgcaaagcattagctgctgcttctgcattgctccgcgctcttgtgaaatactggttctgttttctttattccttttgcactctcggttcccacctttgtgttggagtttaccatgttaccctgtaattaaaaacaaagaataggtaacatattgtgccagtgttgcaacgttttaaactgctaacagaccttaaaatatccccctacctgggtcctcagtgctatgtttaaagtgctgcagggatggagtggcgttttcttattgctgtatgtattgtacatagtggagtagttagttacctgataacagtcttgttatttgggtctcttagaccttacctctcaactccctcaagagtaccagtctctgaagttataatgctttggtctctacattaggggcaagatccagtctgagagaagtctcctttgagaagggccaagaggctctttcctgagtgtttgctttcggtttgttggtatgcctgtattgctgggctgtgctgctgctcgaagcagatggttttgactgtctttttgctctttcctatataatgaatagatgagtgaaaggagttttctttttctctttagtacttacgtattgggattcctgtgtcttacagctctccctctccaaataatacacagaatcctgcaactttttgcacagctggtatctgtctggtagcagtgagaccccttgtcttggtgatccttactgggtttccaagcagaggagycacatgattacaattgccagtagagttgttgtttggggtacaagatgagaagaaagaaaaacctacagcctttctacattctgacatgctaacagtggtttaagtttctaaagtgtttaccagatgctgaaggcaaggggagggagcagaagcacttatgtttacggatattttaaactctgttagagagcagcctttgaaaatccccaatttggttctgctttttgacctctctctaccttttcagggtaatctttgtggcacaaacgatagcatttccaagctttagagttttctgaattcctgcgccttcctgacgtgagccctgagcgatcttctatgcagttctgccatgcgtcctgttggtctctctgtgttctttgttacttgggtgcaatrgcaacttccctaccccgtgcattccatctttyatgttgtgtaaagttcttcacttttttctctgagggctgggggttgggggagtcagcatgattatattttaatgtagaaaatgtgacatctggatataaaatgaaaataaatgttaaattaaatggaccttaactaaagtgactctctatcttctaacgaggaaagcaacaagcaaatatgtaatcacacatctcttcaattcacagctctgagcatcataaccaggattgggaaccagcccttgtgttgcagggacatggcttccacactgcccttgtcattctttttggtactgtcccttacagcatgctgtagtttgatccagggctgagcattcctacaggtgctccccagcgttcctcatttcaggcctagtcaggacctctagagcccatctgctgtgagcaaaagagggtgctaaatagtgaaatacagcttgaagcaagccaaaacctgtttcacataaaatctcacatggatgtcctgtatatatagaaacctggtgaaagcacagggcatgctgtcatggagcctcccatttctccccactccagttcaaggcagctttcaggagatggagaggaaaaagcttaatcataagaagaactgggtagacctgagttctctttcggattctaccagtactatatggccttgcttaatcattcaacaaattcgagtctgcttgtctgcttgtatgccttttagggttgttgtaaggactggagatttttgtgtgtaaaacactaggacagtgcctggtccatagcaggccactgttactagtaaaccttttttaagatgaatttgccttattactgttacataatacttaggaattgttggttatatagcactcttgttagtttgtaacttattttttagtgaaaacattttctgaaggagcctttttataccagaataagacctaatgaaaagacctgctacgaagccaagtgtcctcaaaggtcaggctaactaaaatgactcattcggcatttattcttgcagttgactgccacttcattgtgtaagatttcatgtaagtgaaaaaatgttttcagactaatgtcataaatacctcgctaagatgttttattttcagcaagtgtgagggtacaaatcgtctgaggtcaacaaagcatcctctgctcttgaaattttttgttactatcataagggcaagttagcttaattcagtattaggagccaacggaaaatagttccccagactacatttaaaatagcatttagagactacaacaagaaatacttggcaaggcagttcttgagggaaaattatcctttgtgggaaaacttaagaaggaagtgggtttttttaaaatgaaacagtcatgttccttactcagctaccaactgtagttttatttcaagccatttttccagtttggggttgaacacctgcctcacactcaggcaaaccttgtggtgtccccagctgccccctcctccatatgaagccctgcagtggtaacaaggagcgggtgactgatatttggaaacaatgagaaatcacttccagtcactaatgggtcacagagctttgtatcctgagctagtggcaaaactcgtccagaaaacttagtaagtgtttttcagacacgtgtgaaggctaggaattgtgggaccctccctgaacagtctgccacatttctacttaagggaaaagcaaagcatctgaccatggctatccctgaggctgaggcacacatgaacaatgcctaggtctcctttgtaggagcctgagggtgcctaacctagaatcaagcccgtggctgtttgctgtggttagcagctacaagtagtgcacatgtgatatgccactgttctccacagaatttcatctctaaactcctagagcattttctaaatccaataaattacagcgttccaggtaccagtggtcatgtagccctttatccacagatgcaactggaaaatgactcgtccagggtcacaagggaatggcagaacacgagctggaacctgggtctttaagcgtgggctagtgctcttcccacagcacaatgttaacatccaaaggccactccacacatcaaaatggtcttcacaaatgtcaatctcgctagaaaccaggattttgtattgtggctaaagttccatatcctggtggacagaatggtagcgtgaatgtaaaccaaaggccctgactgtctggacctaggaacttcagggctcacactaaaaagttaagcttagggctcacactaaaatgttaagcttttaggggaaggtaagatgggaatgtgtgtacagacaatagcctccaaatgcatctaatttcttttctaagcagtcgtattcttcatttccacaagagggcagcagcccctgaatggtgtggcagtggctaaacactgagttctagaaacagacacttccggatcagtgactggcagtcaacagttcactgaatcaaatagtgctttttttggggctgcatgttagcctggggactgtaagggaacatgctctgataaaaataaactgaaatcggtgtaaggagccctgtactgtggaattgggaggtcagggtagagagatggcaaggatgacctggtccagccctttcctgataactgaagggctttctgagcatctgaagcagtgagatccagcttctggtgaaggtgggacggtgtcaggaggcagtctactcacagatgggcatctctggtcgttggaataatcttcctaaaccaagaaacttgcctccctctaacttcacggaggggtatccttgggctgtcccctacggctctcccaggtgtttaccctctaccattctgaagatagttggccacttctaagtcttcagtctaaatatttctagttcgcttaaccatccctccctttatgagttagggagttactgatctctctggtaactgaacaggtttagaagtcagatctagcctcctcccatagtacttttgttattgggtctgtgttgtccatagaaaatcttctccaaaatctagaggctcagctcatggaaaccaaggcctctcccaagcgggaagctggagctggaagcgagcacggaccatgggccttgagaccaactcacagaggctgggactctgattcaagcttaggttgctggaaacctcaatatactctgacgtaagacattctattctctggttctactatacttttccccaggatctactattcagtcgcactcaagtgtggccctagcaccaaggaagcttcattagtgatttacctactagatgttcattgttcagataaaacttggaaagtgcaggtaagcatgaagaagagagttccataatcctatgactttgaggaaatttaacactttatcatatagaacctttcaacaatcatgactttaccacctgtggctttgcccttctgtcttcttaagccaaagcccacggcaattctggctgctttctcctgaggaccacatatatataagattatgggaatcatgtcaagaagagatgtgtttaaggtgtaaactttcagtacatgagattacaaaacagccgtgtggtttaatctgagggctccgttgaaaaacaaaaataatttccaaataacaaagttctattgaattccttagattacatgtgccatgaggggaattgtggtcctttagcagtacttctcaaaagcccctttcttctttttttttttgaggtgtctcactttgtcgcccaggctggagtacagtggtgcgatcttgactgactgcaacctgcaacctctgcctccggactcaagcgattctcttgccttagcctcctgagtagctgggattacaggtgcgtgctaccacgcctggctaatttttgtatttttagtgagacgaggtttcaccatgttggccaggctggtctcgaactcctgacctcaagtgatccacctgcctcggcctcccaaagtgctgggattacaggcgcgagccactgcacacaggcaaaagccccttgcttctcatgggtctgctgttgtttccttcagccactttggttttcagggagggttcaggaaaccatcctccactgtgcttctttctggcctttgctacccctgtttcccatcaggagaccccaggaactgaagtggcaagggtgaatcctgtgagacgatgaggaatgagaccaggctgaagtgtgagatgcagtagccctcctccacctccaccagaaggcaggggtggaataagagctgaaaggtttgtgtgcacatttctgggttatccagagagggagggagagagagaaagagagagatggggcctaggtggtttacttctaagtgcttcaacaacctgtgaaaataccagggagttatccatgcgttttgctaaggattctgaaagatcgacatgagtgtggaagatatattttaagccaataagggctggcatgaagaaatgtaataacagattaagtctgcataccctgattacagaagaacccgccttaatagatgatgaccgaagcacagaatgtgcgctgaaccattgaaggtgatgcagagaagagttacgtgtgtgtgcgggcgtgtgtgtgtgagtgggtgtgtatttaacagctttactgcaatataattcacataccatctaattcacccactgaaagtgccattcagtgatttttagtatagtcacagagtgtgcaaccatcacaatcaatgttacaacattttcatattctctccccacccccaaaagactgtacccattagaagccactctccatttctccccaaccctaccagtcccgggcggctactgatctttctctgtccatggatttgcctgttctggattttctttttttttctttcagacggagtctcattctgtcgcccaggctggagtgagtggcgtgatctcagctcactgcaacctccatctcccaggttcaagtgattctcatgcctcagcctctcgagtagctggaatgataggcgcgcaccgccatgcctggcgaatttttgtgtttttagtagagacggggtttcaccatgttggccaggctggtcttgaattcctgacctcaagtgatccactcttctcgacctcccaaagtgttgggattataggcgtgagccaccgcgcccggcctgttctggatatttcttataaatggaatcatacagtgcttctttcagttagcataatgtttcccaggttcatccaggtcataacacataatcaggcttcatttctttttattaccaaataatattatatgaatatactactttgtgtgtatccgttcattggtggatggacatttgagttgtatatgcctttgggccattggtgctgctatcaacattcatgtacaagtttttgtgtgggtgtatgtttcattcctcttgagtatatccctaggagtggaatggctgggtcatatgataactccgtgtttaaccttctgaagaactaccaaacgacttaccaaagtggctcccctgttttctattttcactggcagtgtgcaggagtggggttttttataatgcccaataatcggatttattcaggaagcaagtagcttccagcttatttactgagcttttaaagatatacttaatgtcgtttcttaagaaaaaccaggtctttatttactatgagactccaagtgctttaatatagttgaaactaaagaaacataaatttttcattctgcctcttaattgcatgggaaactgcacttattaagcattcagtttaatggctatataacactttatcataaatatacccatattgtctctgttgtttaacatttagcatattttcaacttttgcttacactgtgatgaatttgttggtacataaatattcgtccgtgttctgggatatttaagagacttccaaaagtataggacaaagaatatgaacactaccaaagctcattacttatattggctccactgctttaaaaaagatttatgacagcctttggtctcaccgtgatttcattgcaccctctctagcactgggtgttcactcttgttaaaaccctaaaaccagaaacaccttaattttaagaaaattttctattagagtaacatacatagaaaactgcacagat

SEQ ID NO: 95147 - DNA, 74352 bp, Homo sapiens
aagggagttgtggttctttgaagaactgagatgttttgtttgtgttttaaaaacctggtttgatttttgttcagtttccctttttgtctcccctgtagaacccagtgccttctggcagcaggccttagccattgtttcttttcttctccccggcaacatttagctgcatctctggatagaatattagatggcttttatctttgtatttttctgtatttgattttattttctgccaatagtatgcattgttgatataaacagaaaacacgtgaaagctactttattgtcaaaacagaacgaaagttcattgcttcttgttcagttccttcaggtcttagtagaaggtggactaacgcagtttaaatattaacccaggtaaagtttattctggctccttctccaggatgtattttcttatctcggtcagcattaactctaaccacctggactgctaagtcataaatcctggatacatctttaatacctcgccgccactatccaaacactgtctaattctgtcaattgtcactttaactatctttcaaatatgtccctttctttctttctaatttgctactgccttagtttaggcctctatcatctctcacctgtattaccacatcacccttctaattgatctctccacctccagttgcatcgcctccagtacagtmtcctaaatcataactcccctctacttaacatccttcactggctcctcactgtctataaacatacgaatcagtctaggcaatgtagtaagaccctgtctctacaaaaaaaaaaaaatttggccgggtgccgtggctcacgcctgtaatcccagcatcttgggaggccgaggcgggtggatcaccttagatcaggagtttgagactagcctgaccaacagggagaaaccctgtctctactaaaaatacaaaattagcagggtgtggtgacacatgcttgtaattccagcctacttgggaggctgaggcaggaggattacttgaacccgggaggcggaggttgcagtgagccaagatcgtgccatcgcactccagcctggacaacaagagcgaaactccatctcaaaaataaataaataaataaataaataaataaataaaattagccaggcatgatggcgggtgattgtggtcccagccacttcagaggctgaaatgggaggattgcttgagcctgggaggcagaggttgcagtgagtcaagatttgcaccctcgcctgggtgacagagtgaggccctgtctacaccccactcccatcaaaaacaaaaagagtatggctcagaatgtctcaacgtggtctacaaactttttaagtcctgacactggctttacctctggcccctttaacaatactcacgacttccttcatgtctcctggatggttctggctccttattgccttgtggcctttgaccttgatttttttttcctttgtttggaatgttcctcctccctaccctgatgacaaaactcctcctactggttcagaaaactgggctcagttagccttcttccattctcccttccctctcctccaaccgccagctgtgatcatcattaacctgctcccactgtattcagaagataataacataaacaataataatagcagttagccaagcctggtggctcacacctttaatcacagctacacaggaggctgtggcaggagaacagtttgagtccagaagtttgaggctgcagtgagctacgatcatgccattgcactccagcctgtgtgacagagcaagaaacctgtctccaaaaataagaataaaaataaaataacaaaaaccattaatattggttgagcacttctatataccagtgtctatatgtgaagctttgaaggcattaaccaatttaatccacacaatgaccctgttgggtaaacacattttttttttttttgagacagagtctccctctgtcacccaggctggagtgcggtggcgcgatctctgctcactgcaacctccacgtcccgggttcaagcgattctcctgcatcagctgcctgagtagctgggattacaggtgtgcgcgtggcgcccggctaatttttttttttgtatttttagtagagatgggatttcagcaagttggtcaggctggtctcaaactcctgacctggtgatctgccccccctcagcctcccaaagtgctgggattacaggggtgagccactgcgcccagcctttttttcgagacagagtttcgctctgtcacccaggctggagtgcagtggcgcaatctcggctcactgcaacctctacttcccgggttcaagcgattctcctgcctcagcctcccaagtagctgggattataggtgcctgccaccacacccagctaattttttgtatttttagtagagatggggttttgccatgttggccaggctggtctcgaactcatggcctcaagtgatctgcccacctcggcctcccaaagtgctgggattacaggcatgagccactgtaaagaattttttttaacatctttttctttttttctttttgagagggagtcttgctctgttgcccaggatggagtgcagtggcgcgatctcggctcactgcaacctctgcctcccaggttcaagagattctcctgcctcagcctcccaagtagctaggattataggcgcctgccaccacacccggctaattttttgtatttttagtagagacaggttttcaccatgttggccaagctggtctcgaactcctgacctcaggtgatccgcccaccttggcctcccaaagtgctgagattacaggtgtgagcgaccacgcctggcctttaacatccttttattgtaacacttatctcattgttttgaaatggcttatacctattagtgtctccaatagacagtcttattcatattcttagcactagcaactatacaagttctgtacacctgtttttttttcaatatgatgaagtcaacacttgcatttaaccaaaccttgatttccaaggattgagtaatgtgagattttcagtgcagtggtgggagaggcttggagtctgagcacaggctttggagtccctccaatcatatatcatctttgcccttgcactaaatggtatccccatcctctcaattgcttaaggaaacaacctgggagtcatctcgtttactacctttcttcacacctgcacctcgggaaaatatcctgaaatctttcaatttctatttccacaccaaccagcctagtccaggtaccaccatctaccccctgaacttgcccaataactttgtattgttcttcggctcctttttgttccattgctgctcccttcaagtcattctctataaaataggttgatttaaaaaaaaaaataaaccaatggccgggcacgtggctcatgcctgtaatcccagcagtttgggaggctgaggcgggaggatcacttgagcccaggagttcaggaccagcctgggcaacacagcgaaaccctgtctctacaaaaaatacaaaaattagtctggtgtggtgacgcccacctgtagtcccaggtactagggaggctgaggtgggaagatgacttagcgagcctggggaggtagaggatgcagtgagccctgattgcaccactgcactccagcctgggcgacagagtgagaccccatctcaaaacaacaaaaacccaaacccttcattatcttgcctttgcacttaacagataaatccaaacaacgtgattaggttcctgcttaatgctccaaactcaacttcaaacccctatttgacatgctcaagcctcctggcctgttcctcaaacagccacgcttcagcatcagccacagttcagcatcggggccttcacacccattatcctctgtctagaatgttcttcctccccatggttggcttggctggctccttcttgtcatttaggtcttagctcctgaattatctcctcagaaaatccttccctgaccattctgttttgttttctgctcagtacttatcactgccagtgattatctcatctattcgttttattatttatattcttcattagaaacataagcttttgttgtttgagacagagtcccactgtgttgaccaggctgcagtgcagtggcatgattttttggctcactgcatcctccgtccctcaccccccatcccccaccacaagcaatcctcttatctcagcctcccgagtagctgggaccataggggcctgccacaattcccaggaaattttgttgtcattgttgttgttgttgttgttgtttttaaattctgtagagagggagtctcactatgttgctcaggctggtcttggactcctggcctcaaagtgatcctcgtgcctcagcctcccaaagtgctgggattataggcttgagccacctgtttgtttcctttcatacctagtcctgcagaacataagcctctaagtgcaggggcttcttctgtttattcaccactgtatttctagcaccaagaatactatcaatattttttgaatgaatgaatcaaacagtgaaaaggccagtcatcttggtgtatatagaaggtagccaacagagacccaatagaaatgagtgcctatgttcctactgctctataactagtgggagtggggaggggaagcagctgggggtctaccagaccctgtcaccaactagtcagcacacgtggcaatcacagttgtagaagaggccaaacggagcagatctgccaatgacagccagtactaaactcgactggatgctgagggccatttctgctttgagtgaacagtgcagcctgctgggtggccaagggaacgtgtacaaatccactttgtttaaaggacccagagagtagtcagttctgctaaacctcatctgtttgttcagggatttttgtcctggggaggagtggggaagaagcgattagtcaggccaggctagctggtattagtttgcaggctgtgagtgcgactcttcagtctctgctcctctcatcattgccttttcacctacctttaccctaaattcacgtacacctctgccttcacaaattccaagcgattaactgttgtatttaatctctgtcccaaatctctctgcatcattcttcttttgattatgaagtcacgagggccctttgtttattttatttttaaaactttttttgagaaggagtttagctcttattgcccaggctggagtgcaatggcacaatctaggctcactgcaacctctggcttccgggttcaagcaatcctcctgcctcagcctcccgaatagctgggattacaggcgcgcgccaccaagcccggctaattttttgtatttagtagagacggggtttcaccatgttggtcaggctggtctcgatcctaacctcaggtgacccagccacctcggtctcccaaagtgttgggattacaggcgtgagccaccgcacctggcctcaagggcccttaaatattacttagttgttccattatttggtgtgttttattatttggtgcaggttttttccccttatctagtttgaatgttgctgaaggacgctggttttcaaacggtaaggaatctcctgataaaggcacgaatcttggtgtgcagataagccagcgattcttgcttctggctagttctacgttgttcctggatggtcagttcaaactgcaatgatccacagctccagaagcggcttcttccagtcggcctaggagccaaacgcccctgcagctccatgctaccacgcagggtgccgtttcgggcttgcagggagttgtcgcagtcccgttttggctgcacattctactgctggggtggaagtgtcaagcaagatgttgtcgccggtatcatgatgtccgggtgagaagcttccttggcaggttgccagggccagcctgcgagcactggcgccggggacccgcgcgcccgggaaggggcggggaggtgggcggagcctggcaacctggggaccaccaataggatgctcagccggaggtggccctgcgcgtgacgcagcggtgctcggaggcagggggcgtaggggccgggctgtccggcgctttagcttagcaggcgacgttgcgggccctgggcgccaggagagcttcccggagtcgaccttcctgctggctgctctgtgaccgcttcccggctctgccctcttggccgaagtgcccgctgccgggcgcgggcctcaggtaacggtggtgctcccgcgcctctcctcgcttcccgcttgggtccaccggcctcagcccgcggggaagggagaagcggtggcggcagcagctccggcccggccttgtcctgggctgtgctgcggagaaggcgaggctcggcgactgcaggggagttggggaggggagggcgggaaagttaccgtcaggcgcccgggtcacgggcagccttttaaaccctgcacgctggtttggtgttccgcaaatctcgtggcatctctcaagtcagtagtaaagaaagttagsaattagaagacgttttattctttaaaaagcgaaaccaaaaatgcactcaggaagtcagctttttaatgatttagagaaaatgtgtgaagggaaggatggtattagcaagacatgaaaatctgtaggggcaccagaacctttaatcaagctcatgttttattgtaaaatattaggatgtaggtaagtttctgttttccctaagtgttaatggtcatgtaatttaaataatatgtatattgaaaggttatttctaagtgagaaacaactatataaactttattctccgtatatatatttaggttaagttcgttggtcacttttgtttgtttgagacggagtctcgctgtgtcgcaaggctggagtgcagtggcgcaatctcggctcactgcaacctctgcctcccgggttcaagcgattcttgtgcctcagcctcctgagtagctgggattacaggcgtgcgccaccacgcccaggtaatttttgtagttttagtagagacggggtttcaccatgttggaccaggttggtctcaaactcctgacctcaagtgatccgcccgcttcggcctcccaaagtgctgggattacaggcgtgagccaccgcgcctggcctgttggtcactttttaatatttaagtggctgccacctgtttaaaccacttttttctttttttcagcctgcttgatttcctcttccttgaagtagaattcaatttgaagctttttttttttctttttaaaagttgggcggtgtcagtgaatgacttgttaaggaagtctgtgcgttgtctgggtgtgagaatgggttttggaaggagctctgtggcactgaattatcgtttagaaatgcacgtgttttagtgaatcacatgcttagaatgcatctgaggtttcgcagtcttttaggataaagacctactgagtgagcacactctmtctctggttcatttggcccactttccttctggctttccaggttcatgccacactggctttatttttgttactggaaagcttcattttctttcctctcttggctttyaggagtttcctccacctctaatgctgtattctctccctccctccaactcttatacctgcctcagatatcagcccacatatcacttcctctggaaatcaccccatccccattaagccctccatgaactctttattctccttagcagaagttgatcattaattgtaatgaattagttgctttgtttcctctgctagtgcatttcatgaaggctggtttagcctgttgtaattttcagggtctggtccagcacttggcccagagaaagaatgaataagttggtggacagaggaaggaacttttgaatgagaaatacagtgatccccacttaactgctttctgtagtttcagctacctgaggtgcgaaacagagtacaataagacatttcgagagataccatgttcaagtgaattttaatacagtatattgttaatctcttactgtgcctaactttttgaaactttgcctcccaggttcaagggatattcatgccccagcctcccaagtagctgggattacaggcgtgtcccagtacgcccggctaatttttttttttttttttgagatggagtttggcgcttgttgcccaggctggaatggcacgatctcggctccccgcaacctccgcctcccgggttcaagcgattctccgcctcagcctcccaagtagctgggattacgggcatgtgctaccacgcccggctaatttttttttttttttttttttttttttttttttttagtaaagactgatcagatcttactggtcaggctggtctcgaacttccaacctcaggtgatccacccgcctcagcctcccaaagtgctgggattacaggcgtgagccaccgcgcccagctcacccggctaatttttgtatttttagtagagacagggagggtttcactgtgttggccagactggtctcaaactcctgatctcagatgatcggtctgcctcggcctcccaaagaggtgggattacaggcgtgagccactgtgcccagcctgtaaatgaaactttataataggtatgtataggaaaaaacaacgtgtattgggttcactgttattcacagttctaggcatccactgggagtcttggaccgtatcccccatggatatgggagaactactgtattaaccagggaagagtccctttttcctatgggaaaaagtttttaacaaagaccagccaagttctatttttctaagaggatggctttgttttgcattttttttgccacattggttaataagagattatactaaccatacagatgtaaatgagaatttgttcttgttctttagttttgctaattacttaaagacctagttctgtgatatgtaaaagttgtagcgttgtgttagggccaacctttgggtgccagagggaaattttttttgctctggattgtaaattctatccacagttgtgtcccctttccaccactgaatctaagggtgatgtggcaaagttctttacctggagtaggcactcagtatttgtgatacagatttatgggctcttttgaaagctrtattaatgggaacacggaggcaggctaaagttgacatgtctttccaagttcatttgtttctcaaatcatttctttttgttttgctttcttaagataagttagatgcttatcacactgaacattatgtaattgcgtgcacagattagattcttaagaaattctttttcaatcagtgtgttgtataaatagctgtctacttagctttgttacctgggggggaatagctttatgttacctgtgactttgaacaagtttgttagcatttctgaatctcctgcatctttaaaaatggacatgttaaatgagatatgtgctacacctactgcactcagcactttgttacctgcttcctaaacgctagagattccttcactgctagacctcttgagagactagtcttatgatcactgttttcacttcctcaacttactggcggtgtactccaatatatttatttgtccttcctcctaaaactgtgcatgtaatcaaatcatagctattaatgtcccccaattgtgaaatatcccatgtcctgtccttttcttttcttttttgagacggagtccagctctgtcacccaggctggagtgcagtggcgcgatctcggctcactgcaacctccgcctcctgggttcaagcaattctctgcttcggcctcccgagtagctgggattacaggcacctgccatcacccctggctaattttttgtatttttagtagagacggggtttcatcatcttggccaggccagtctagaattcctgaccttgtgatccacccgcctcagcctcccaaagtgctgggattacaggcgtgagccggtgcgcttgtttaagaaacagtggaaggccaaagtaatgagtagagaaaatgagacagccaagatcatgccactgcacttcaacctgggcgacatggcatgactccgtctcaaaaaaaaaaaaaaaaatgccgggcgcggtggctcacacctgtaatcccagcactttgggaggccgaggcaggcggatcacctgaggttgggagttcgacaccccatctctactaaaaatacaaaattagctgggtgtggtggcctgtaaccccagctgctccagaggctgaggcaggagaatcgcttgaatccaggaggcggaggttgcggtgagctgagatcgtgccattgcactccagtctgaccaacaagagtgaaactctgtctcaaaaaaaaaaaaaagattgatggtgtttaagggggtggtggtgagtggcaggcaatgcagaagttactagatcatggtaaggacttaggatgtttgaaggggtttaagttgtgaagtgacttgatctaacttatcttgagtgcaatggtgtgatygaggttcactgcaacctccacctccgggttcaagcgattcttctgcctcagcctcctgagtagctgggactacaggtgcctgccaccacacctggctaattttttgtatttttagtagagacgaggtttcaccgtgctaggctagccaggatggtctcgatctcctgacctggtgatctgcccacctyggcctcccaaagtgctgggattacagatgtattccaccatgcccggccctgttttagcttttgatgtaaggtttcctctagagtagcttgatggttgaggaaccatcttattaccaaggactccctttttatatttcttcttttggagacagggtttcactctgttgtctgggctggagtgcagaggtgcgacctgtgctcactgcaaccttcgcctcctgggttcaagtgattttcctgcctcagcctcctgagtagatgggattacaggtgcttgccaccacgccgggctaaatgttttttgggtakttttagcctagtgtaccttaaatatgctccaaacacttaatattagcctacagttgggcaaaattattgaacacagactattttacaataaagtgttcattatctcatgtaatttattgaatactatactgaaagtgaaaaacagaatagttgtatgagtactcaaaatatgatttccacagaatgcatgttgcttttgcaccatcataaagttgaaaaattttaaattgaaccatcataagttggggactgtcttgtgcttagaataattggttacatattaactgatacatttgctttctttcttaatgcctgcctgttgtactccaggtactccacactagatttgggggagtcttacagaaaatactatgtaatccctatctttgagaacttaagcctaatgtaagagacagagagtattgctctctgattataggacaatgtaacatgtgacaggatgctcagtgtagtgggaccgcagagaggatgagatgagaggtggtggtaaaggaaacttcakagggtgagttggaggcrgtttagcgattagagggcaggttgtagaatctgatagtctttgttttgaattctagttctgctgttggagaattatttgatttgggacaagttaaatcacttccctaaactcatctgtaaaatgaggataatacttatctaaggttgtaaagattaaatgtaatgtaaaaagtttagcagcacagtgcctagaggtacataataggtgctcattaaatcagaactgttggtattaattctattactgctgtagctgtgattctttgaaggcttgagtaggagttagctacataaaaaaagggcagaggagaaatagctttctatagacagggaagagtatatgggacactatggtggccaaagaatatttggaaaataacaatagtatctgtcttgattctgttgagatgaaaataatacatgtaaaacacataagcactaaaaaaaatcagctgttattattctactttgagaaatattgcattgtgctatactgtttcatatggcttgggtaataaactttaatctggcatttattttttaatcattttgctatcttttttttttttttttttttttttttgagacggagtcttgctctgttgcccaggctggagtacagtggtgtgatctcagctcactgcaagctccgcctcctgggttcatgccattctcctgcctcagcctcccgagtagctgggactacaggcgcctgcccccatgcccagctaattttttttttttttgtatttttcrtagagatggggtttcactgtattagccaggatggtcttgatctcctgacttcatgatctgcccacctcagcctcccaaagtgctgggattacaggcatgagccaccgcacccggcttcattttgctgtcttttatgctttaaacttttgctatatgctctttaaaagagtatctactttaaattccccatcatctggccagaaaaaaaaagtctctgttcatctggccagaaaaaaaaaaattcccattattccttgtaaaattcctctcttactgaaacatcttggttccttttgtgtctttctttttcttccctgatttcctctactttgaggctgtccctcaaagtttagttttcagttctyacttctctcatcatttctgatgaagagatagatgctcttgtggcttcctctgtcacttttacacagaattggaccattgtaagttgggcatcgtcttgtgatttattagccctgacttttcccttaagttcctcttaattagatcttatgatatcataacatttctacttgatatattcatctgctgttccacaattgtttcatttgtttgatttcagaaataattagaagaaagccgatctagatttgtcagatttttactttgccaagctgtgatagttgaaaaacaaccaaacccaccatgtactatatttcatccttttatacagaaaaggatattttartacaaaaattaagaaaaactgtagtctcagaatttaaatatatatagctttaaaataatgtaatgagtatttcacagttgttttcttcttgctttagactcttgaaaactttatcacatagtgaaacactgctttactttttatttaaaattgtttttttggccgggtgcggtggctcatgcctgtaatcccagcactttgggaggctgaggcgggcggataacttgaggtcagaagttcgagaccagcgtgaccaacatggtgaaaccctgtctctactaaaatacaaaaattagccacgtgtggtggcagtcacctgtaatctcagccactcgggaggctgaggcaggagaattgcctgaacccaggaggcggaggttgcagtgagccgagattgcaccattgcactcccacctgggcaaagcgatactccttctcaataaataaataaataaataattttgagatgtggtcttgctatgtttcccatgccagactcaaactcctgggttcaagtcatcctcccgcctgagcctcccaagtagctgggactacagctgtgtgccaccatgcccaactagggaaacacatggctttagagtaaaccttgtactatcttgatattgatctttgatcatgttttttagtgcttaaagtgtctcaccactgccttcctgaaaaacttctaatttcttaggcctttatagtttgactcctgtcctcctttctagtcttttccctcatcacatttctccattaccaactattttcccccagtagttagtggtctttgtagtttggatccaactaatgccagttccaatcgggctctgtcgttagctgtgtgctcttgggcaagttactgtaatgagaagaaaagcagactctagtacctggggctgtggtgtgcattcctataaattcagcttgttcaactgcaggtgtattcctggtacatgggtggaggacactgatagtaactactttaaatcattgttttctcgtgtgaaaactgagggtaatttttttcagaattgttatgaagattaaatgagaaaacttaaagcatctggcagggtccttgcacttagtagatacttaacaaaaacttgtttttgtcgtagttcaattccttcatggttccctgaacggggcttataaggtccttgttttaatcctttcttgcacatggaatgcacagttctcatccttcaagactgtgtctaaaataccttcttttctgtgaaacctttacatcttctgctaatctctgctgtctctgaacttaaggtattgtttttaccattgactttgttattaaatcatactccaccctgtggcatctttgtagttacctgttactatttaatccttttttttttttttttacatacttaatgctttgttcaactaaattgttctttaagagtggggtctatgtttaaaaaggggcttcaaaaccattccaattattttataggacctgatttcttcagatttgttatcttgagtatcttgtacccagaaaatgctttgaaatgattaatgcaaaaggaagagaatgtatcatcacatttcacctctcctaaatatagtggtattgtgaaattcacgtaagccagatgcttagttcaaagctgatatattggtttgcttctgtgtccccacacaaatctcatctctaactgtaatcaccacgtgtctagggagggaactggtgggaggtgattggatcatgggggcagtttcccccatgctgttctcgtgatagtgagggagttctcatgagagctgatggttttaaatgtggcacttccttgctctgtctctcctgccgccacgtaagacatgccttgcctccccttggtcttctgccatgattgtaagtttcctgaggcctttccagccatgcggaactgtgagacagttaaacctctttcctttataaattacccagtctcaggtagtgtatagcagtgtgaaaacggactaatacgaaagctttttacaccttctttcctagacaatacaatggtgggtgaagagaagatgtctctaagaaaccggctgtcaaagtccagggaaaatcctgaggaagatgaagaccagagaaaccctgcaaaggagtccctagagacacctagtaatggtgaggcttaattttttttttttaggtgaattagtgaaatagagaacaaatacagtgttatagaataagtattgccatctctttaattctttattgtaaatgggtattgatagagttttatatgtctagtaacaaagcaattagacaataagtcctttctcgttaattaatttggtggwcatctattggtatctgctgtgttttagagaccattcattcagtcacgtaacctaccaataattgctgaggtcccccgctggatgctggggctatagcagtgatcagtacggatttgtttgccattatggagctccaagttaagtgaatgacaaaacctccaaaatcatacacataactagatttatcacagtgtaatattcttgtaattaactactttcataatagatgtaatgagtaaaatgtgagtaattagcagggtgcctaacccagttcaatactgagctataaatcttgggagaggagtagttagggagttttattagttcttgtatccacgtttgcttaatgcctgactacaaagaggaatacgatagtcctttgttgttaaggtcaaggtttatgattatgaatgatagacttgtaaacacaactctaattgatgtcatctattgcatcagggtattaatttttgcagtgacatttgtaaaggtttgatttcaacaaggatttgaaaattgaggattgtttagttaacaaataggtgcggaaccttctgagacaggttgtctttggcatttcatctcttttcataaagaaacwgttttgtttttcctacctaaatttaattaaacttaaatatcaacagctggatcccaccaggaatgtaaacattgctgcttgagttggcataatgaggtttattgataggctcttagttagctatatatgacatatttatatggcatatgggctagttttagtgtgatataaaatgtgaaatttatgcaaaggaggatgagccaatactggggagaattctccttccgtgatttagggacttagtgataacccagtttgtttcccttgcctgcattctcacgcattagaaacttcatgcttgtttgttccttccrgttcttgggacagaaaagttattttaattgaaactttctgtcactgtatatgatcattctctttatgtcccaagtttttaaaaagattctaaattcttctgatttctgtgtattttcagtgttctttattgtcctagttcattaagttttagtcagtccaggttttagtgcaggtgttaaaaattgaattggttagcttaaatcaagaagtgtaacaacctctttggtttaatgtaaataatgctaatttgaaaatgtttcttcacatattgtaacatttattcaccttggggagtaagtgctttgggagtaatcccaaagttctgggattacgggcgtgagccaccgtgcccagcctggtctaggtgccctttctttctctccttttttttttttttttgagacagttttgcttttgttgcctagagtggagtgcaatggtgcgatattggcttactgcaacctctgccttctgggttcaagccattctcctgcttcagcctcccaagtagctaggattacaagcatgcgtcaccacgtgcagataattttgttatttttagtagagatgggattttactatgttggtcaggctggtctcgaacttttgacctcaggtaatccaccaaccttagcctcccaaagtgctgggattacaggtgtgagccaccatgcccagccctttttctcctttttcttcccctcttcctccttctttgtttcttcccttttcccccatccccttctcttcctttttccttccattcctcctaattggagatagtctcgctttgtcacctaggctggagtggtgcaatcttggcttactgcaacctccacctcccaggctcaagtgatcctcctgcctcaccctcccgagtagctgggattacaggcatgtgctaccacrcctggctaatttttgtattttaatagagttggggcttcaacatgttggycagsctggtctygaactctggcaagtgatttggttgccccgacctcccaaagtgctggttttataggcatgagccaccatgtcaggcctccattccttttaattttttagtaatatatttgcataccattaaagtcaccattttaaagtttacaattcagtggttgctaatatatttacaaggttgtggaaccatcactgctgtttaatttcaaaacatttttatcaccctggaaaggagtcccattcctctcctcttagcctctagcaaccactaatatacttcctgtcactttggatttgcttgatctgggcatttcttataaggggattcgtagaacatgtggcctttgtgtgtggctgcttgcacttagcataatgttttccatgtttgtttggttttttgatttgaggtggactcttgctctgctgtccaggctggagtgcaggggytattcacaggcatgattatagcacatgcagcctcgatctcctggcctcaagtgatcttcctgcctcagcctcctgagcagtatgttttaatatgtatcagtacttcatttttttttttgtggctgaataatatttcattgtataggtatgatacagtttgcttatctgtcagttgatatttattttgggggggttatttacaatgattggctattatgaatgatgctgctatgaacatttgtgtagaarcttatggaatatatgttttcagttctcttgggtatatacgtaagagttgagttgctgagtcatggtaaatgtatgtttaactttttgargagctgctgtacttttccaaaatagctactccttcttatgttcccaccagcaatgtatgagggttccaatttctcyatatcctcaccaagacttattatctgtcttttgatgatasccttccagccaacagattaataatctggtgtcagttaagcacctttgatctaaatgtaagatagggtaccaggtttgttaatagggagcttgaagttggtgtgcataagatacccaaatagaaaaaatcctttgttataaataggagctaagtgagttatagtaaccaaatagagaccgatggggttgggggagcccttgctttagaatggaggaaagtctcactgaagtagattttgagtttggcctttgagataagaagactgggagagggctttcaatccacagaggtatgcatttgcaaagactttttaagacagtatagtgttgtgtgtgtggkgttttgtttgcttttagagaggrtgacgggtaggtagtacagatggatttgtggttggttttcatggataggagtatagagcaaattggaaaggccagaagtaagtaagaagataaggctccaacagcctctcagtgcccagccaactgccctggcagctagtgggtagtggcccttgctggggaccctccagtgggcccaggaggacaaaagtggctctaaatttgacacatgcacattgaagcaagtcaaaggacttgatatgaagcatagaagcacatartgccaaayagcaagcagtaattggtatacatttggtgattgggcagtatttccttcttttactgctgctaaggtggtggaaattagttaaattcattgtgaaatggcacacactgaaggtatttgttaatgagggttccagaagcgttaaaagtagcaccaccaaaagccaggtgtggtggctcacgcctgtaatcccagcattttgggaggccgaggtgggcagatcacgaggtcaggagatcaagaccatcctggctaacacggtgaaaccccgtctctactaaaaatacaaaaaattagccgggtgcggtggtgggcaccagtagtcccagctactgggaggctgaggcaggagaatggcgtgaacccaggaggcgaagcttgcagtgagctgagatcatgccactgcactccagcctgggcaacagtgtgagactccatctcaaaaaaaaaaaaaaaaaaaaagcagcaccaccatatgctgtcacaaatgctagtgtgacaaggcagagaggattgttgtagtaggaaataataaagacatttccttttcaaaaccagcacatctcaaactttttcagtcagctccctttaaacttctggcactaaaaatagtgccttgcatacttaatgttaaatgaaagacgactatgttttctggatttagaaagaccacctttaatacctcaaaatgaagacatctgtgcagttggcagttgtgagtgaaaacactgtttgccaaaacagacggctggtcagaaatgattgtatacctgggttgcgtgggatatctgctgctgccacttgtaatcctcatcatgacaatgttgggtaagrcatttcaaacatagatacagttacagtagttgaaggaatgtcagatgacatgactgttgtagatgcaacttcatcaagatggtaaactaaatagacatctacagcttctagaagaggagagcaaaacacatgcaagaagaaatggtcagtgtttgattactgtagcattctggatgcttaataggggctctggttttgttgtaaaggtgatgtccgttctcagaaatactgtatcaacatcttctatgtggtggcttgcatctatagtctgagctgcttgggaggatcatttgagcctaggagttggaatccagcctgggcaacatagtgagaccccatctcttaaaaaaaaatggtcttaactactggaagatttgcagacttcaaaaaaaaataggacttgaagtcttactgtatgtattgtcattgactgatgacctacctgtgtgaatgattttggacaaatcttacagcttgtcagtgcttaggttacyttttatgcaaagccaaggatagcaaatatgaaagcactttctgcgtatgtagcactgtgttcatcaaggtattatcttttttttttttttttgagatggagttttgctcttgttgcccaggctggagtgcaatggcacratctcggctcaccacaacctccacctcccaggttcaagcgattctcctccctcagcctcccaagtagctgggattacaggcatgcgccaccctcctggcttattttgtgtttttagtagaaacggggtttctccatgttggtcaggctggtctcaaactcccgacctcaggtgatccacccacctcggcctcccaaagtgctgatattacaggcgtgagccactgcgcctggcctcattaaggtattatcttattggcagtgctgtccactcttctgtcccagttcctgaggtagcttttataatctcctgttgtatatcaactgagaattataatctacatgaaatcctctaatattmctaccagaaattatctcttgatttaaaacaagataatatgatgttgtaacaatttagtggtaataaggcagattatcttcttgcatatacaggcagcctacacagttgatacagatgtggtgataaaagaaaaagaagccaaagttactctagttgagtaatatagttcccagatggccgggcacggtggctcactcctgtaatcccagcactttgggaggccgaggcaggcagattgcttgaggtcaggagytcaagactagcctgaccaacatgataaaaccctgtctctactaaaaatacaaaaatcagctgggcgtggtggtgggtgcctgtaatctaaactactcaggaagctgaggcagtagaatcgcttgaacccgggagacggaggtttcagtgagccgagaccgcgccactgcactctagcctgggtgacagagtaagactccgtccaaaaaaaaaaaaaaaaagatttggttttattaaaccaattgctcaaatatgcatataaatttttttacatttaaagtaatatatactcattgaaaaaattcaaacactatagaaagttattaagtaatacttcctcaagtaacatttttttttacatgtgggatcatatttgagatctcttctgcaatttgtttcttctrtactttgtaagtctcagatatcttttcatttagtatatgtaattctttaaaatacctgtgtagtatttctgctgtacggatgcttggcggtttatttaacttgctccttattgatggaaacttaggctgtttccaaagttgcagtattacaagcagtgctacagagagcatcattgaaacagcatcattgcttacttgtactggtatacctataggatacattctttttttgagacggagtctcactctgtcgcccaagttggagtgcagtggtgcgatcttggctcactacaacctccgcctccctggttcaagcgattcttctgtctctgcttcctgagtagctaggattacaggtgtgcgccaccatgccttgctaatttttgtatttttagtagagatggggtttcaccatgttggtcaggctggtctcgaactcctgacctagtgcgccgcctgcctcagcctcccaaagtgctgggattacaggcgtgagccactgcacctggccaggatacattcttaaaagtgaaattgctaggtcaaagggcttttgcatttaaaatttagacattatcaaatttcctttaaaaaatgttatgccaatttatattcctaactatactgtttcaccacactcttggcaataatcttaccagtcttttaaaattcctgatttgatgggtgaaaaacagtatacatatagcataaatttgttctcatgaattttaagtgaggtggggaaattgtttcatatttattgaccatgtatttttttttctttaaaagccctgttcatatcctttgctcacttttattccttatctggtggttattatttttaagagctttttctatattaaataaattaatcctctgattatgtactttgaatattttcttaatcaaactagtgatttgtcttttgactttgcttatgtatgtgtgctttgccatgttttgtttttatatatcaaatattcttttaattgttataatttttttttgtttgtttttgtttttatttttgtttttgttttttgagatggagtctcgctctgttgcccaggctggagtggagtgcaatggcgtgatcttggctcactgcagcctctgcctcccgggttcaagcaattctcctgcctcagcctcctgagtagctgggattacaggcatgtaccaccatgtcctgctaatttttgtatttttagtagagacagggtttcaccatatcagccaggctggtctcgaactgctgacctcaagtgatccacccacctcagcctcccaaagtgctgggattacaggcatgagccaccacgcctggctgcttatagatwttttttttgtcatgcttagaaatcatccaagattatgacaaaaagaaaacatgactttttttttttttttacttttgkggtgttttatattgaaatatttgatccatatgaaatttatttttgagtgatgcattcatcattggggatctaattttttagttttccaaaatggctagttagttgtttcaacattatctattaagtctctgtttctgtatgaacatgcactaatccacgtttctggctcagattccatttttctgaagtagtgcagacttgtgagtagttgagaactttgtaaagtttttgtggtcagtggagcaatagacgattacagatggattttactatcttatcttcccttttattgttaagattgaaaagtgattgactctttcaagaaatactcctaaacctaaccatactatggacataaaggtgacttttcaagtgacttttgtatcrctttgtggagaacaaagtgaagctgaaatgtaggtattataagacacggtcaatgagagttttttagaaaacaatcaggatttaaaaatgagtttgaatttctaggcaataaactagtcagtgcctacacgttagctaattctgttcttgccacaagtagatgaagaaaacayttattaaaagaactgcaacttgaaaattggttattagtcaytgcttagtattccttagtcatctttatgagtgtaatcacataggttggctgtcctttttttttcttcaatgctgcatgactaggggtcaggagacaaggatttcttcaggctcagttacttattggccatgtgacagtgtacaagatgttcaatttctttgaatctcagtttctttattttaaaaatagaaatgaggccagatgtggtggctcacgcttataatccatgcactttgagtagctgaggtggaaggattgcttgagaccgggaattcaagaccagtctgggcaacatatcaagaccccatctttacaaaagtaaaaaaarttaggtgggcatggtaacatgtgcctgtagccgaagctactcaggaggctgaggtgggaggattgcttgagcccaggagttagaggtcgcagtgagctaggattgcaccactgcactccaacctgggtgacagagcaagactatatgttaaaatttgtaacaagtttaacaaggatgcggatttagaaatttggaggccataatgtcttcagggaaaagaagagttgcagaaatgggtggaaactattggctagcaagaaaacaaagataagaagtgtaaaattctttctcagaacattttatattagaaggaaaagtacagcatgtcatgagggttaagtgatcttcaaaaggactgtttttaaaaaaaaaatcgtttctaaatttcagttattttgccattatattactattactatgtaactttaaaaaattcacttgaaaatttattctcaacctaagtaataaattgttaaatcataggtttgatgttcaattacttatttttaaaaaacaaattaaatatataataacttgataagtgttagtagaactacagattttattttcagtatcactgatgacatccatatcataatttctgaaacatgatttttaaagaacaaattgtctctgaatttaaatgtggacaatataattgactcagtgggttgaactttttgaatagggaatgattaagacaataatagtttgaagggttagtcttgaaaaagagatgggctactctttcctctgacacagaaatgttggagaagaggttgaaagacagcaaaaattaagaaacatagaagacatttaaggatttggtaccaaaactgaacaactaaaagttacttggtggggctgggacttgaaagtggaaaaggtttccaactacttttgtgaggaatgtcacagaaattcatcaagaggcagagacaaagattgcatattttcattgctggcctgcctaaggcttgactgcagcagtttagaatgggcctattttcctaactttttctgtagcgcatggcaatttggaatcagaaggcagatagcgggtaatttctggagtcggcgtgtggcatggtgggtccaggaaattggtggtggtgataagggacagatagaaataatgacagagggttagtaagtccgtgctggttaagaaaactggaaaaccaaaatgatgacttctawcagaagagaaactgtctctttccctgtctttctctttagcgatgaaaccttcgctagaaattcccctacagacttctcgtgtctcattggccagagttagattacaagttatgctggctatctaccttttgcctctccagtcttttctacgctactttgtttcctgggagactgacgttaagaactgcaacaatagtctccagtgccctgtgtgtttctggtaggcttggccagtgggagaacttcaggagatctaagagcagagagtaaggtgggtgtatttataactaaggttctctccctggtaggtaaccattgctcctttctaatatttctctctaaagagttctctctgggttccactaaccctttacccgctttgccctttctggcctcaggatggtaacagctttcctgatgtttattactagccctagaattccatatcatccttattaccatcctttgttgcttttcttaaactctgaccacacactagaaaaaggacctctttaaatttttcccagtcaataagcttgagtgggtcatctctttgctgtctgatactcaggtccatttttaaatcagtttctcgcaaaggcagtgacatgcatgtccttatttgggaagcaaccggcagtgttcaccatggctgtgttacattataaaaaataatgtgtgtgtacttgtctgttttatttgccaaccagatttacagtaaacttggccatctagaacaaagttggcaaacgtggccgtgttcattcttttgtgtttgtagtgctttctcctgttatcacagtagagttgagtagttgttacatagttgcagactatactgcccattacggaaaaagctttctgactcttgatctagaattacgttgttcaatatggttgccactagaagtacactgtttaatgtagtctggttgagcacttgaaatgtggctagtctggattgagaaacactatagttatgatatgtcagatttcagagacttactggcacccatttctttttactttttaatgtggctcctaaaaattttaaaattacacatggtgattcacattttatgtgtatgtctgtgtatatatgtgtatatatatatgtatatgtgtgtatatatgtgtatatatatatgtatatgtgtgtatatatatgtatatatatattttttttagacagagttttgcttttgttgcccaggctggagtgcaatggtgctatctctgctcaccgcaacctccgcctcccaggtccaagcgattctcttgcctcaccctcccaggtagctggrattataggcatgcgccaccacgcctggctaattttgtatttttagtagagacggggtttccccatgttggtcaggctggtctcraactcctgacctccggtgatctgcctgcctcggcctcccaaagtactgggattacaggtgtgagccaccgtgcctggccacacattgtatgtttataggacgacactgatcaggaatgtaactggtggcctagaaagtaagtagataagcttcccttaggccaaagcctattaaatacaatattgtcaagaaaagagagcatggcattaagaggcatctgactgagcttcaggcctcagaaaaatccaacaagtcttcatgcttcattccttygcctggaataatgtttctagcatttgttcaccataatttttctttattatttgagactcagttcaaatattgactcctgcaaaagcctcctacacccctcattctcccacagcgctcctctgtattgtccttttccctatttgtagttttctcctgagatcctgaagggagggtttgccctgcatgtattgggtcctcagtgggcttttacttaatgcatgagtatataaattgagtaaattagttaccaatttaacaagcctggttatttgtctcttttcttctgtgtagctttggcggtagattgactatagtaatagaagtgtacgattgttagggagaaccctgtggaagcagcctaggtagaaaggcacagctccccaggactgctgagtggggcctgattgcactccacatttccgtttttkctaaagatatcactatartagtatggtacaacaatggatctctcttacttgttccgaagattatgtagggtaaagtacatttttgttttatttttttgtagagaatgggggggtctcactttgttgctcaggctggtctcaaactcctggcttcaagtgaccctcctgtctcagcctcacaaagtgctgggatgataataggtgtgagccagcacgcctggagtctggtgttttttttagggtagcaaagcatgtcataattttacaaaaattttcatcaaaactggttaaaataagatttttgacatgtcaaggaataaattttaaacattcccattaagtatagcaggttttaaaagagatagcatttattcatgaagataagtattgcaagcctgatttttttagaaatcagaaatttaagggaaaaaatgttgaatagttttccttatggacttatgcggggttctattaagtttcagatagcaaataactgactcctagtgttagcagttagtgtgttactagagggaggcaaatgattccgaaattacatcaccctcagtcctggcttatcattgtttcagggtcagtgttttagaaattgagaagccttgagttgagtgcttgtaaatagttcttcaaatcattggatgtgggtggggatggtggctcatccttgtaatcccaacagtttcagaggccaaggcatgaggattgctggaggccaggagttcaagaccagcctgggcaacatagcgaggctctgcctttacaaaaaawttttttttaattaggtgggtgtggtggcatgtgagtgtggtggcatgtgcctgtagtcctaggtacttgggaggctgaggcgggaggatcccttgagcctaggagttccaggccacagtgagctatgatcatgccatagccactgccccctagcctgagcaacagagtgagaacctgtcttaaaaaaaaaaaagcagtggatattagcttttaggcattcttttgactttgacatctaatttttaaattttaaattgtagaaagttaagaatttctttgtaatattgtatgaagaggtattttgaaggtaaaggaaaatgaattagcattttaaaatatatttttcttccacttacttaactttgtcattttcagtggggtcttcagagactctgtgaacaaatcttttttctaactttccagtggctgcatctcaaagcctgtttgtaatgatggctgtcgtgttatttatggatagacagattctttttggaagggatgcacaagtagtgagaattaatcttttacagtctccttaccaatcctcctctcccatggtagctgaattagttgaaggaaagaagcttttgtcttcatttttttatgaaatagttcatttatgaaaccatggtctggtcatagaactaaattaaaaatatattctttaacttattgaaaaatcaaatggacatttgtcttacccttatatttcttaatcagttaccaatttgtaaatatcttaaattaatcctctgctctccattctccttgccatttacaacatcactttttgtccggatttattgcatttctctgttatgtggtcctttccatcttccaatatcagctcagtattttcctgcataaaattcttagtttcctcaaagcccttgttattatatgacctagccttcttcccagtcatcaattctgccattatcgataattgaagacattccactgtctcctggcttccattgatgttaagtcaggtatgygttgtaattgcagtacttgcgtagttgatattctttctgggtgcttttagtttttttttttaacccctgcgtcagacagtttcactgtgatatatctaagtcgattattattattattttttcttttgagatggagtttcactcttgttgcccaggctggagtgcaatggtatgatctcggctcaccgcaacctccacctcccgggttcaagcgatactcctgccttagcctcttgagtagctgggattacaggcatgtgccaccacgccagctaattttgtatttttagtagacagggcttctccatgttggtcaggctggtctcaaactgcygacctcaggtgatccacctgccttggcttcccacagtgctgggattacaggcgtgagccaccacgcctggcactaagtagattatttatcctgcttggaattctttgactttatcctagaatttgtgtctctcaacagttctggccaattctcagctataatcacctcaaatattatctctctrtatagagctctgattagatgcattttgtaccttctcattcttcatgtctttyttccaagtgacatactgtgaaaagaaatgtccaatagaagattaaattatatttctaccataaaaacagagtaatagggcagtgaaaataatatacaagaatatgtaatgacagagaaaaatgtttacaatatattaagtgaaaaaaacaggttataaagcagtatgtgtatgagtttgtttttatgtttttatggtttgtttttaagggaaggggttattaagcttaaattaccccaaatatgcctccaaagttcattttggcaaagtaaatatttctgttcagtgtattttttctgggaaattacttttataaatttgaatggcttttaatcttcctttttaggcaaaatatacaatagcaattgtcaatgctgaaataaaaatacttaagctggcctggcgcggtggctcacgcctataatcctagcactttggaaggccgaggcgggcggatcacgaggtcaggagatcgagaccatcctggctaacacagtgaaaccctgtctctagtaaaaatacaaaaaattagccgggcgtggtggcgggcgcctgtagtcccagctacttgggatgctgaggcaggagaatggtgtgaacccaggaggcggagcttgcagtgagccgagatcgcgccactaccctccagcctgggtgacagagcgagactccgtctcaaaaaaaaaaaaaaaaatacttaagctattaccatgtagagtaaataagaaaatacaaattctcaattttaaaaattcatctgccaaagtgatagttcatcatcataggttttttttttttttaacgaagatagcaaactagacgttgtggttttctgtttcacagttttcagtattcattccattctgtttcattcacttatctgtgtaggtctgtgcacataatgacgtctgatgtttctcggttcccataatataacagatgacttgacactttattaaaaggatagaataaagatatttagtatctcattattcacaaactcatttgtgaataatggcagatggcattcaaaattaactctaccctgggctaagcatggtgacacatgcctataatctcagcattttgggaggctgaggcaggaggattgtttgaggccaggagttaagtcaagcccagccagggcaacatagtgagaccttgtctctacaaaacacttaaaaaaaaattagctgggtgtggtggcacacatctatggtcccagctagcggggcggctgatgcaggaggatcrcttgagatcaagtgttagaggctgcagtgagctgtgattgtgccactgcagtccaacctagatgacagagtgagatcctgtctcaaaaaaagcccccaaaactctacccatattttattaaaagggcagagatcaattaatcccactgcttttaaaattatartggtaccatgattcagtgtgaaaataagaaactgtctctaaatctgtgacaataataaagctcagtatgcaccatacatacacaggagttatacagagcagcacattctcataaaaaatactgtcatacctttcaaatccaatttttgttataaaattacgaaaaagattctcagtcagaataccgccgttagtcaggttaaacaccaggaaattacattactgtaacttaatatacagaaaagaatatttcagaacasagaaattagaatgaaatgaattttagaatatttttagcatcacctccccaaaaccctgtacccattagcagttattccctttttgccataaccccgcgcctcactctctaggcaaccaccagcgttttgtctgtctcagtagttgtctattctggacattgtcatgtaaataggatcatacgatatgtagtcttttgtgacttcctcttttcacttggcaaaatgtttacgtttcacccatattatagcatgtattaatatttcttttggtttattgttaatccattttatggatatactacattttattaatctgtttttcagtttatgggtatttgtttccactttctattattatgactaatgctgcccatgaatattcatatacaagtttttgagagggcatgtttttatttctcttgtgtatatacctagtcctaggtcttatgttggctctgtgtttaatctgtcgaggaacttccagactgtttttcaaagcactacaccatttaacattcccaccagcaatatcctggatagttgaagtttctttcttcacattcaagccaacacttgttgtttgtgtttttgattatagccatcctagtgggtgtgaaatgatacctcattgtacttttgatttgaattttcctgatggccagggatgttgagtgtctttttgtgtggttattgggcttttttttttaaaagaaatatctgttcagttactttgccttttttttttttttttttaaaagacagagtctcgctgtgtcacccaggctggagagcaatggcgcgatctcggctcactgcaacctccgcctcctgggttcaagctattcacctgcctcagcctcccaagtagctgggattataggcatgtgccacccatgcctggctaattttgtatttttagtagagacggggtttctccctatcggtcaggctggtctcgaactgccgacctcaggtgatctgcccgccttggcctcccaaaatgctgggattacagtcatgagccaccgcacctggcgtactttgcctatgttttaattggactatttgtctttttatttttttattttattttactttatttttgagacagtcttgctctgtagcccaggttggagtgcagtggcacattcttggcttactgcaacttctgcttcataggttcaagcgattctctcaccttagcctcccaagtagctgagactacaagtgcgcatcccacgcccagctaacttttgtattttcagtagagaaggggttttgccatattgtccaggctggtctcaaactcctgggcttaagtgatcctcccaccttggcctcccaaagtgctatggttacagatgtaagccaccatgcctggcctatttgtctttttaatgttgagttgtaagagttctttatgtattctggatacaagtccctaatcagatttgcraatttttttttttcccattctatgggttgtcgttttactttcttgatggtgttctttgtagcacaaaagtgacttaaattttgatagaatctatcaatatagtttttctatattttctaatcttgattgttcttttggtgtttaagaagtcattgtctagtccaaggcctgttttcttctatatttttaggtatttgatcctttttgagttagtttctacatatggtgtgagttccaggtccatcttcatgctttttcatgtggctattcagttgtcccagctccatttgttgaaaagaagaatctttccgcatttttcttggcacccttttcgaaaatcaattattaataatcataaaggtgaatgtttatttctggactctmagttcttttacattgatcatctatgtgtctatctctaaaattgggaagtgtgagttttccagctttgttattttttttttcatgatttgtatggctattctgtgttcttgaatttctatatgaattttaggatcagcttgtcaatttttgcaaagaagccaggtgaaattttagtgagtattgctttaaatctatagaaaaattggggagcactgccatattaacaatattaaatcttctagtcaatgaatatgggatgtctttagacttatttagttcaatttttattccattttcttcatggcaccttttatttgcatcagatattataaagttgatgaactcacattcttttattttattttacttatttatttttttgagacagagtctcgctctgttgctcaagctggagtgcagtggcataatctcagctcactgcagcttccacctcccaggttcaagtgattgttctgccatcttcccaagtgtcagggactacaggcgcacgccaccacggcctgtcaaatttttgtattttttttttttttgagatggagtctcattctgtctcccaggctggaatgcagtggcgcgatcttgtcttactgcaacctctgcctcctgggttcaagcaattgtccctgccttggactcccaagtagctgggattataggtgtctgccatcatgcctggacaatttttatagttttagtagaggtggggttttgccatgttgaccaggctggtctcgaattcctgactcaggtgatccgcctgcctcggcctcccaaagtgctgggattacacacatgagccaccacgcccagccatgaactcacattcttggacataatctttgtcatcctttgcaatcatttctggttgaggaatggcatttttttttattcttggcacgttggcatakatcctctgagactttcttttgaaccattgtatttttaaaaacatttattgtagagatagggtcttgctacattgcccatgatggtttcaaacccctaggctcaactgatcctccccacttggcctcccaaagtgtggggattgcaggcatgaggcaccatgcatagcctgaaccattatatctttatcattcatgttcaccttaagactgtataacataatgatttcctccattatagtctgcagaaattccaagtcagaagtctttgttgtggaactatcctccatctctagcgcagctgtggttggctcccatctccaattggctgtttggttggacctcttctatgtcttttaacctattattctctgtcactatttctctgggctatcctctgtataatttcctttgatctatattcccatttactagtactctcttcagacatgtttaatctactgtttaatttatccattgaatttgaaacttcaatttttttttgttttgagaaatcttgtttgttttcaaatctgtttggttaaatggtttcttgttacttgcttatgttttccttctttttttctttcctttttttttttgagacagggtctcactgtgttgcccaggctggagtgcagtggtgcgatcacgctcactgcaggctcaaattcttgggttcaagtgatcctctcacctcagcctcccaggtagctgggactacaggcgtgcaccaccatgcctggctaattttaaaacttttttttgtagagatggggtcttgctatgttgtccaggctggtcttgaactcctggcaacaaataatcctccccaccagcctcctaaagtgctaggattacaagtgtgcacccccacgcccagccttccttttctatgttttcaagtttcacttttatttcccttaacatattgatcattctgatttttttgtcctaaaagtaacaattccattatctttagtttttcagatctgcatctcttggcttttgtttctgctgtttcccatttattctgcctagtttcctagtgtgttttatgaagtttgactattctccttttttttctttttttcttttttttgagacagagtctcactctgtcatccaggctggcgtgcagtggcgcaatctcggctcactgcaacctccgcctcccaggttcaagtgattctcctgcctcagcctcctgaatagctgggacaagcctcttctttttatggtaactttatctgttggaattctgtacggccttgattgatactgtaatcttccagggaggaattgcacttatgtctgccagtagcctggagacccgacttgggttagctttagaacrtatttatctcatatttttcagaccacatagatagtgtgaatttagattgcaaacactagtgagggggttatgatttcttggggcaaattttccctctctgcacagcatcaagtagagacagacagatttccttctgttttggtttctttcttatacactgaggatgtagccttatgtgtggtccctagttttacgtggcagtatcctgtyagacttcccattttgggcaggccctagactttgccattctgtaaagtattgtcctctgtgtactattctgcaaaaatactgtaccctgtgttgcttcaaggttgctaggatttgtcgagaatccttacgtttcttatatgtcccctaggattctagtttcattttcttttcttttctttctttttttttttttttttgcctctgaatttgtactagcttggcaataagttttaaaaggttttcgttttttaatattttacccagcatcttagtggtctcaactgtggaatctgttcagggaatctaatttcccatgctgtcagaatcagatctatagcattgcataattaacatcgttgtaattactgtgtgtacatttactagttttgttcttagtattttcatgtataaatttccttctagttattttgaccatgctgtcrtgttttatggttgcaccacagtttacgcagttacctttgtatttgtttgttttcaactttatgatttagacagtgctactaggtagctgtatccatcaacttwaaagtcatgtttttttcttcccgtaggtcgaattgacataaaacagttgatagcaaagaagataaagttgacagcagaggcagaggcaagtaactccctcttctagaaacaaaaatgtagagttttagatagaattttgtttggtaacatttttaatgctaaattgctcagataattatttaagccattcatcagttgctgttatcctgtggaayaagaaaataagatctgctgacttgtcatcctgcgtaaggatccagattgcctttttctctcccatctcatctatcactggcattttctgtctcttaccagcaaatcttggttttagtgacccacgttaacagttgatagcgttgaatgtctgtatgagtgctttgtgaaagtatctgtcatgattcatagtaaatagcagctctccaataaatgttgaatctgaatctagaagtagattccctgtcaaggaagtagaaataacaactcgaaaaaaaatcatgaaatcatttcaagtggggataaatagttctacaaacmagaattcttcagtaccctcaggaaattgtggagggcgaagaacacttttttaaaaaaacattataatccaatacctgggtgtaagttgacttaaaatccaaagcaaactcctgttttcccaaggagaagatcacttccaaaatttgttggccagtttgactatataaacatccggtgatgaagatgaagtagccctgttttatttatttagttacatgcatgtatgtatgtacatatgcatttatagaataatctagatttagaaatatttttgtaatcatatttcatgaaatgtatgccagattatttatactcactttgatgtcaatgtctttgttattatcagacctagtttttcagttatcatccaaggccaggggcatagtatttgtactttcatctaatgtgttggaaatcagtactgtttgagtycaaggaggatgctgtcacagaaaatttattaaagaacatatttgcttaacattaagagatctaccctgtcctccttccatcatcctgtaggcatatttgtgatgactgcaatgtaattccttatggtactgctttataaagtggtactcaaaagatgtatttactgcacttgaaattgtgggtatagactcctagttaatagggtgttaaactttatttttcctgattccattaagttacctttgtaagcctccagcactacagtgatgaagatcatttctgatgaatgtcttttccaattagtgctttgtttctccatcataagagattgtttaaggatttgttatgcaactttttatctgatgactaacttataattttggctaagaaaataacaatatttaacgtatagacacatgctaktttgtttgtttgtttgtttgtttttgagacagagtctctgtcgcccaggctagagtgcagtggcacgatctcggctcactgcaacctccgcctcctgggttcaaggaattctcctgcctcagcctcctgagtagctgagactacaggcacatgccaccacgcctggctaattttttgtaatttttagtagacatggggtttcactgcattagccaggatggtctcaatctcctgacctcgtgatcctcctgccttggcctcccaaagtgctgggattacaggctgggattaccacaccyggctggcacgtgctagttttaaacatctattcttgcaagtttagtgactaattttttttttttttttttttgagacagagtctcgctctgttgcccaggctggagtgcagtggcgcgatctcggctcactgcaagctccacctcccgggttcacaccattctcctgcatcagcctcccgagtatttgggactacaggtgcccaccaccatgcccggctaattttttttgtattttttggtagagacggggtttcaccgtgttagccaggatggtctcaatctcctgacctcgtgagctgcccgcctcggcctcccaaagttctgggattacaggcgtgagctaccacgctcggcctaaaataaattttgtttttgtggtttactagagtgtttctgaccctttttatttctctagtcaggcaggatacctacatttttgttattcctttttcaattcttcttttgtcctcttttgctcctcctcttcttatcaagaacacaaaaacatattatgttctatttgtgagggcaagtttcaaataggtgaaaagtaagtctgtctctgctatcattcctctatttaaaaacctaaagtgggaggagaacctttcccatacagaatcacaaacccaaaggcgaaagggagtttggggtggaaagtagaggttttgggggaaaggggtagaaagtggtggcaggatgaaggggggatgttccaaggatttaagttaaaactttttaaagaatattgtacttgtctgctttatatattaataaaattatgaaatcttttagcttggtcayttaggaggattagaaggagaaagtaatgaatgaaataagggaaaagctgaaagaatggtggaccctggtttagctmgtattaatatgtgtattgtgcaggtgacataagggttgcagagttgtgcaagacttgttccctgatgttaagggaagtattggcctgaacaaaggtaatggtgttagaaaacttacaccgtacatattttagggcacttgatggacatctgtgtctctattggggcacaatggcaagaaaaagttgaaaacttgaggctagattataaagcattttttctygacttttatgccctccttcatgtagctctttctatctgaaatttcctctttctccattcacaaatcaaaataatgtatatccttcaaattctaggtcaaatcttgctgcttctacagttttctgaacattgcagttgaaatgatgtcctcgctactctatattcctaactacttagtttatacccctactatatactctrtatgtattagactgtgcattgttctgaatgagtcatcacatgccatttggtgaactttaggtgatttgacttagaagttttaaaattgtcaattatttgctgtctaatgagattgaatattttaccattgtttattaattgtaatttcttttctttttttttttttttttttttttttgagacagagtttcactgtgtcgcccaggctggagtgcagtagcacgatcyctgatcactgcaacctctgcctcccgggttcaagtgattctcctgcctaaccctccccagcagctgagattacaggcatgtgccaccatgcccggctaatttttgtatttttagtagaggtggggtttcaccatgttggccagactggtcttggaactcctggcctcaaatgatccaccccacctcggcctcccaaagtgcagggattacaggcatgagccaccgcacccagccaattgcaatgtttytgaacaagatatagtaggactactgttctgatctgaaagttcaggatggcatatagagtttagagacagtgagaatagacagggagctattgtaatattttagtattctagaccgaggaaacagatgagccagtaggagaagggaactacatttagaagtcctcttacaggctaagcttttatactaggtgctttatatacacaatcttacttacttacatcatcccatttataagagatctctaattggtcacatttttttagttgttgcttagccttattggttgacatttactaacatggaaggacttgagatgataggtatgtgaacattgttcagagccatgaacttggcttgytttttcacatactaattcctcttgtgggtttttacaaataattttttttaaatgcaagttaggaatctttccggtcatttataatttgtgtcatgttcctcccagtcgtcacttcatctttccttgatctttaaagtgagagcattgcactagttgtctccaaggtcccttttagctctaaaggtttacgtcataattgtgtagctgacgaaaactttttcagaattcactgcttgttattgtataggtagtagataaatctcatccggcagctgtttcagctccacagagctagagttgtcaggtaaaatacagtacgtccagtcgaatttgaatttctgataaacaatgaatacttttttagtaatcatgcaatatttgagacagactaaaacgttatttatctgaaatttaaatttaaatatagtgtcctatattttttatttgccaaattgggcaaccaacaaagaactctgtgaaaagttagatgtgtagatagaggagctcttattaagtaaggaaaagtgtgaagaagttcgtcaagcattgagcaaaccttttagtctraagggaagaggagtgagggaagtgataacatgagtgtgttgaaattagtggtttgaactgactgaatctcttaaggtcgcctcgaggtctaacatgcttgttaaaaaaggttttcagtatgtattttttatctaatgccagtggggtcatacaaacttgtgtaactctgagttatgaccttttgaaatccttagaattgtgttgtaacaagacttaaaagatcttagaacagtccaagggagattcatatgattaagtcccaaccaacttacattaacaattaaattacctttgcttttgttgttgttgtttttaacagaaacaaggtctcactatgttgcccaggctggtctcaaactcctcagctcaagtaataatcctcctgccttggcctcccaaagtgctgggattacaggagggatccaccatccctggcctagctttgctttaacattatgttaagctatttcttttggttgcaaataacagaagcctactttggtttatttaggcataaaagaaaatatattcaaatgatattaatatatctcacagaatcttaggagaagatgaacattcaagctctgtaaagagtaaggattttagtaggaagagtttagatactttagatatttcaatataataaagttcccactcactttctttcaaagctcagaacctcagatttattataagacagagaattgaattttggccggaaggacaaggtcatatagtacagccctggcctggacattacatgcctgtccttggctctgagaatagttttcagagaaaaatgaatatgttaagaagggcaaagggaatgtctttactaattggtatttgtcaaacttttattaatgtacacaactttatagagggaatgttaggtctcatgtgaatattaaaaggatgaaaaaaattactttctatttctccttcttaaaaatacatttttgggccaggcgcattggctcatacctgtaatcgcagcactttgggaggccaaggtaggcagatcagttgagttcatgaattcgagaccagcctggacaacatggcaaaaccctgtgtctacaaaaaatacaaaaaatttgctgggcatgattgtgcgtgcccgagtagtactgctactcgggaggctgaggtgggaagatcatttgagcccagcaggtggaggttgcaatgagctgagatggcgccactgcactccagcctgggtgatagagccagactttgtcttcaaaaaaaaaaaaaaaaaattgttgcaacatattctgtttgcttcttatatagcatttcaaatattgttttttcacatcagtaccttatgctattgtccagccattaaatgatcaaactgatgagtaagagtcaggatacaaaaattagctgggtgtggtgacacatgcctataatcctagctactagggaggctgaggcaggagaatcgcttgaacccaggaggcagaggttgcagtgagccgagatcatggcattgcgctccagcctgggagacaagagtgaaactctgtctcaaaaaaataaattaaaaaaaagactcaagtgtcatgtctgaaaataagagtttctcaccatgttttttcagtcattcaagtaacgccttctaaataagtttttggtccggtcatggtagctcaygcctgtaatcccagcactttgagaggttgaggctggcggatcacatgagttcgagaccagcctgaccaacatggtgaaaccccatctttactaaaaatacaacaaaaattaggcgggtctggtggtatacacctgtagtcccaagtactctggaagcaggagaatcatttgaacccaggaggtggaggttgcagtgagctgagatcacaccactgcactccagcctgggtaacagagcaagacttcatctcaaaaaaaaaaaaaaagaagtttttggatagtgtttatctattgatttattggccgactgctggagagacaagtcttaagtattttctgcccagaaatcctgtgattattgtgtaagttaagattgggttttgctgtaatagtgaacaaaataataggggcttatacaagattagtaatttctttttctcatgtcaacagttcagaggtagcaggtccatagctgatactggctccatggtccttaaggaccctggtttggttccttccagttccctgcctcaccatttgtaattgccygttgggttcttcttaccctctgcacagacaaaaccaatggactgagacagtggtaaagcagtagagaaggagtttaatgcaaagctagccaagtggaaggacaggagtttattatacacaccagctgctgagaactcagaggctagggtttttatggtaagttggcaggcaggggacctagggagtggatgctgctgattagttggggttgaaatcataagggtgtggaagacagttctcatgcgcagagtcagcctctgggtgggggtcacaggaccagtcatgggtttagggggcaagctggtcagtcgccagaattcaaagatcagaaaaacatctcagaagaccaatcttaggttctataatagtgatgttctccataggagcggttggggaagtcacaaatcttgtgactttgggtacagtaaactattatagaaaggcaagctgtgcctacrttttagcagaattcaggtccctcccataatcctaatcttgtggcctttctttagtcttacaaaggtggtttcagttcccaacaaggaagggggtcaattttggggaggsactatttacatcaaagttgaactatgaatttctcccagagttagattggcctctgctcaggaatgagcaaggatggccagcctgtgaggctagaagcatgatggagtcagacatggtagacgtttctcactgtcgtagtctttgcaaaggcagtttcacattcataggctgtggtcctcctyattgcccacatggctctagtcattttgtctgagttccaagtggccaaattgagggaaggaaaggagtgggggtaaggaacaggtatctgtgtctgttaaggaaattttctgtggactttgacaaatcatttccacctgtatctcattggctacctaggtgcaaagagagactgggaaacttatttactctaagcagtcatgtgcccagatagaaatcagggattctagtactaagaaagggggtaggcactgatagggttracaaataacagtttctrctatggctgtccatttttctttgctgtcccaatctactggtcaaatttcacctttttgctatgcaagtgtgactatacatttttctgatattttcctttctgccttttctcatttaaatgcacgagtgtaagaatctctagtctattttgaataattttgtgaaagtcagtttattgtgctttatgatttcatcacttacaaaaggtagacaggtacmtgtcctgttgccctcgaatgtttagcagttcaatttaatgaaygcctgcttggtttctttgtctatcaggtactacattaagtgctgggattttaaagaagttktgttttctgttctcatgctaactgagaacactatatgcaaaatgcatgagcaaggggaacagtgacttaattagataccttaaaaatgttctttggccaggcacagtggctcacgcctgtaaacccagcactttgggaggccaaggcaggcagatcatttgaggccaggagttcgagaccagcctgggcaacactgtgaaaccccgtctctactaaaaatacaaaattatcagttaacaaaaagatacatcgtttaaaatcagttgggtggggggcagacagtgagatgccaaagagcatatacacttgaatatatagaatttcaagtaagtgcaatgaaggaaaagaatgagattcagtaagagagaatagaaagaactttagagtgaattatcaggagacctttctgaggagtcaatttagtgtaagtcctaagcactgtattacctgttccattgtgttacttgttttgctcagaaaggtcaggtttctggtaccatgccaccaagattaaaagattctctgtgcaaagacaggcagcaaatcagaggaagaaataatttttagactagcaatatatgaccttgtggagttaatgttctttaaaaccatttatgaagaaattgtgatcaagggacctactttttttttgagacactgaaaatattattatttactgattggtttactttgtttttttctttcagcatactttaagattgttttatgtctctgtacctttgaaagagttatttacccataaatgaccctgaccttttttcattgtaatactcagtccaaagtaatctctgcctggaagcctttttaggtagaagagttatctttctaagatgcaaatctgaacatgtttacaaatcttgtgcttaaaatgtcattggcttccagatgtctttaggataaaaaattcttaaaatggcttaaaggtccatgatctagtccctacttgcttttccagccttatctctgatcattatcatctgttcctttaactatgtgttccaaccatagggtctttgtattatggttgatccctattcttggaatcttagaggttatctaattcagctgcttatttaatacaaaaggtttccttaagctctaaaaatgtagtttactagattacctaaaaaagcaccttttttagttcctagttaactgcctcctcccttctgccgcttctcccttccttccttctctccatccatctgtcatggtgctagggctgtcagagtccactggctgcatgaaattaatatcagtagatacgagattgaaaagataagcaaattagaaagactataacctcaacattattttcaggttactgataccagacattattcagatttattagtgatcacatactgagttctaattaacaagtttcatgtgatagaagtcagaaggcagaagtggactgtttcttgtactatatttcttaatattccctcttacaaagggagtaacaataataagcagttactygttattgtcatcactgctaggatctgtgaaaggaggagattcaggaaatgtaagcgtccacagagcagagttctttcttccttgtgccccagtggcagcaccttctatcaactttaattcctcagagaaagaggagaagggcattaggaaatgaacattaggcatgtaattataatgccatgtaaaggaatgtggtaggtttagttaccttttaacaataaaaggactaaatgataggatttgcttaaattacaatttttattgtacattgttttattgttcctcataggttagctcagactgagggggagaggttggaacaatgaatacctggagagtgacaactgtgtcaggtgctatcctgtgtgttttcagttccagaccgttatccatgtgtaatagtttctatcctgccgagcttcatttatagaatcaaattgaaagggaaaacacctgtacaacctggccaatcagacagcctcacatatctttttcttcatagtatcttttaactaggatattcctcttctaaaaaaaaaaaaaacaaagtcttggctgggcacagtggctcacacctgtaatcccagcactttgggaggctgaggtgggcggatcacttgaggccaggagttcaagaccagtctggccaacatagtgagaccacatctctatttaaaaaggtaaaagtttcaggcggggcacggtggctcacgtctgtaatcccagcactttgggaggccgaggcgggcgaatcacctgaggttcgagaccagcctgaccaccatggagaaaccccgtctctactaaaagtacaaaatgggctgggtgtggtggtgcatacctataatcctagctacttgggaggctaaggcaagagaattgcttgaacctgggaggtggaggttgcggtgagctartatcatgccrttgccmtctagcctgggcaataagagtgaaactccgtctcaaaaaaaaaaaaaaaagtttcaaggaagaactcattttttgtcaagtggtgaaagcagctagctgaataatattcaggactgtcaaccaaatgggaggtcagaagctcacccagtcggctgcaaccatggcrgagccagaggggctcaaggggcctgtgctataccaaggctgcagttccttgcaatgctctagatgaccctgggcagtctattcttgagccccttcatagtcgctgtgattgtcaactaaagaaaagctttttaagaattaaagttattgtatttagaagtcttattgagaactgtagacagagcctgctgcctgggagtagtcttttagagaggttttgttagccttttctggcactgtattttagtctactgtttatgtataggtggtgggggtttcgcatatgtaaaattatgttacgtttgtttagaagttagaagttatattagagtagaatatgttaaggtttggtgtaagagtatatttggttatagattatagaagtgtaattactaactgtcatttataggaaaaggcaaggttattatcttcaaggaatatagtgacttaggcaagatatgtggggggagtgtgtgttttattttgtcttaaaagtatttggaaagctgtgtatcatcatagagtcaagaactttgtgaaattgtgttggcaagcagaaatgagtaaatatggctttttttgtggtttgttattttgtctcgcatatggatacctaaactactcacatatgaatgttacttcaagaaaagaaaatacatgaattgatcatattaaaatagttaccttataagtgacattctgtaccgtctgaggtgtcagaggttggggtcatagatgagggagattgtgaaagaaatttacaatactgggccaggtgcggtggcttgtgcctgtaatcccagcactttgggaggctgaggtgggcggatcacctgaggttgggagttggagaccagcctgaccaacatggagaaaccctgtctctacgaaaaatacaaaattagccaggtgtggtggcgcatgcctgtaatcccagctactcgggaatctgaggcaggagaatcacttgaacccaggaggcggaggttgcggtgagccgagatcgtgccattgcactccagcctaggcaacaagaggaaaactccatctcaaaaaaaaaaaaaaaaaaaaagaaagaaaaaagagaacttagaatcatggtaattataacgtggggataaggcacagtgccgcctgcctgtaattctaacattttgggaagctgaggcgggaagattgcttgagccctagagttcagcttgggcaacatagggagaccctatctctacaaaaaataaaatatttgccggcagtggtggcgcacacctgtgatcctagctacttgggaggctgaggtattttgttttatgcttacaaggggtatacattttaaaagggtataaatcactatgttgccttttaggtagctgtttctgaaacttcaagtcagatacaggaattgattttttgcttttactcctgcgaactcactatgtctttcttttgatccagctctgtttaagggagccctttagagaaatgctaatgactcacaagcatgtattagttccccatctttttctttgttttaaaattctaggaattgaagccattttttatgaaggaagttggcagtcactttgatgattttgtgaccaatctcattgaaaagtcagcatcattagataatggtgggtgcgctctcacaaccttttctgttcttgaaggagagaaaaacaaccatagagcgaagtaagtatgtgctattttcttttaatgcaaacatctactcagtatagttcaatggtgaaaatggactgcggcaaatatgcttgagttcacaccctggtgycactttctattggctgtgtgttacattgggaaagttacttaaccatttgaaggaggatggggatttctttgtctttacatataaattataacatacatgcatacctcttttaacactaatgccgggcacagtggctcacgcctgtaatcccagcactttggaaagctgaggcaggtggaacacctsaggtcaggagttcaagattagcctggccaacatggttatttaaccatttgtctctactaaaaatacaaaatttagccgggcgtggtggcgggcgtctgtaattgctgctactcaggaggctgaggcatgaggatcgcttgaacctaggaggygggggttgcagtgagcagagatcatgccactgcactccagagagagactctgtctccaaaaaaaaaaaaaaagactgactaataaggtcaggtgtggtggctcatacctgtaatctcagcactttgggagggcgaggcgggtggatcacttgaggtcagttgtttgagaccagcctggccaacagggtgaaaccccatctctaccaaaaatacaacaattagctggaygtggtcgtgcacgcctgtcgtccgcctgtygtcccagctgctcaggagactgaggcatgagaatcgcttgaacctgggaggcagaggttgtagtgagccaagatcatgccactgcactccagcctgggcaacagagaccctgtctccaaaaaaaaaaaaaaaaaaaaaaaatactgactaataaaacaacatagccaacacttgctgagtgctctacatgatgaattcatttaaaccaaacagtgatcctatgagacagataactgtagctatccgcatgttacagattaggaaactaaagcacagagtacttaattaaatgtccaaaattacatagcagggatttgaacctagagtctagctctagagtccttgctcttaatcatataatggctgggcatggtggctcacgcctrtaatcccagcactttgggagaccaaggcaggtrgatcacgaggtcaggagttcaagaccagcctggccaagatggtgaaaccccgtctctactaaaaatacaaaaattagccgggtgccatggcaagtgcctataatcccagctactcgggaggctgaggcaggagaatcactcaaacccgggggaaggaggttgcagtgagctgagatcacgccactgcacttcagcctgggtgacagagtgagactgactcaaaaaaaaaaaaaaatcatatcattacgtgcctctctatttgctatacaattgttgtaataaagtacaatgcgattagtatatacttttctaattgatggttcatccagaataatcgagtgaaggctatcaaaggctaatatgtgttaacttgccattccatgctcttctcagttttatgcccctgtttggaggcatagactgatgttctggagaatagttttgaccaattatagttaagtgctggtagtagtacgaaaagccctaaagaagataagcaagatgttaaaatgggagtttttagtaacttgcagcaacctttaagatcaggaggctgttgggagttgctggaagtcccttgatatcaggaagggtatggtaaacatcagtgcagtttcagaggacagatcagtaacagtatatatgacctggagtagagtgtgcttagaggcctgtttatgaccttaggggatctctacaagaaggaaaagtgattgccaaagtccataggggctgagtgtggcgaccttgccattctctacaagaaggaaaagtgattgccaaagtccataggggctgggtgtggcgagctttcccttcttaagagttgtgtatgtacctgcctcacagagagggtaaatgaagtaacatacataaaactgtaacacaatatttggatctgttttagctgggcatggtggcgggcatctgtaatcctagtagtgaaaaggtcattggtcaattaatgttagatggtgttattggtatattctcttgtctgtgggattagatttcttataatacttgaagtacttatatcttgttktaatttttcctcttctcagggatttgagagcacctccagaacaaggaaagatttttattgcaaggcgctctctcttagagtgagtatttttagtwgtttttaaatatgtttgatttttaaaaaactattctgatagaatcattgcttagtatatggacatgtaatgagttctgtatctgtataaatcattagtgggtttttttcttctatgctctctcttgctcctttctgatcttttggttctgtatctagtttcaaaagaggagttagggataagaatggttatctgggcttggcactgtgactcacacctgtaatcctagcactttgggaggctgagacaggcagatcgcttgagtccaggagttcaagaccagtttgggcaacacggcaagtctctctctacaaaaaatacaaaaaattagccaggcttggtggtgcatgcctgtaatcccagctactcaagagtctgagacaggaggatcgcttgagcccggaagggtggaggttgccatgggctgagattgtgcccctgcactccagcctgagcaccaggtgcaacacccagcaactccagcctgggtgacagagcaaggctgtctcaataaaaaaaagtgtacttttctttaaaaagacatcttatgcttatcaaaagttactttctgtgagtcaagttgatgtttactacttcccctagataagaaggccggttttctaagcatgtaatgtgctgttcagtgttttctaagcatgtaatgtatagtgttaagtgttctgttacactgtagtttgaaggaattaatcttttaaagtttacatctgggggaaaacgcaggcttttcacataaaagggaaaagaaaatttattttaaacattataattaggattttaatgatagaatttatacatgaaaaataaacaaaattacatattaaaaaaatttttaaccaaggaaacaaaacatgttttctatggcttagatgagtttttattagactgtgaagatccttggtccagagattgagtagtagtatattagattactcaaaatcatttaaaagattagcattatctttccaaaaacaagttaaaacaagtttaaaaacctgttttagtcagatataaaagattatttaggaaaagtcatctatattattgttatattctaaaagaaaattagaccagtcttaaatacaaaagtcaatgagaaggtaaaatctttgtaaatggttgagttttatagacgtgtagggtagtaattggttatcatcatcatcatgatcaacattatagaaactcatgtcaattttaacattttggaaataggtagtacttaatatatattaaatttagggagtagaatatgaataggattaaaaaattcttaacatttgaaatagtttgtttcctgtttttagtgactggcctttgtttacttagaaaacatccatttctggtaggttttaaagaatgtagaccattcttttttgagatgtttttggagagtggattaagcatcttctcaactgctttaagttaactgctttaagaaaagattttatggtgttttaaatttaaatatacattattaacttgttttgtttgaactacatttacagtgaactgcttgaagtggaccacatcagaacaatatatcacatgtttattgccctcctcattctctttatcctcagcacacttgtagtagattacattgatgaaggaaggtaagacaacaaaaaagatggctggctagttgatgcatgagaagttagaggttttcactaaattttggtaaagggtaaattgattaaattgcttcaggaaatcctaaagcagcagatttgagrgtgatattcctttgccctgaaaagtttaactgatggagaaaattagaagtttcattacttttatttttaaaatggtttatttgaatagaccataatcagtaatttctaggtaattttcccaaatgggagaactttatacacagttgacctacgaacagcacgggtttgaactgtgcatgtctatttatayrcagaattttttcaatcaatgtgtttagcactctgtatccatgggttctacatctgcaarcaaaggctgattgggatctagagtattccaggatgcaaaacacacatataagaatggcagatttttcatatctgtgggttccacggggccaactgtgggcctcgaatttgcataagttttggtgtctgcacagtttcctggaaccaaccccccatgtatagggagggataactgtatatgacttattaactttttgattgtctttatttaagatggttacttaaaacaagtagcttattggaattgaaggttgaaaaagttgatatttctttttaatgtgaaagtcaaattataggccaggcatggttgcttgtgcctgtaatctcagcactttgggaggccgaggcgggaggatcacttgagcttaggagttggagaccagcctgggcaacatctctacaaaaaatttaaaaattagctgggcgtggtggcagacacttgtagttccagctactcaggaggctgagataggaggatcgcttgagccagggaggttgaggctgcagtggagctgtgtttgtgccaytgcactccagcctggatgcaaaggagacyagatctcaaaataaaattttaaaactcaaattgtagcttaaaaaatgacagcgtggtaatcatggattgaattatgtactttttttgaaaattaartttggagataatggtatagtatattaacatatttttaaattgtacctatttcttctgaaaaatcatcttttgtacataagaacgattgctgtttgaatattttccatagaatattttacagttagaaaattaatgtgagaatctaatctttcagaagttcaaagtccaattatcttagatatcttaagtttgaagactgtatttatcttagggcttttagaaaatttgtttctaaagaacatatattgttratatatatatatatatatattgtaaagcagatggttagaagcagatctctaactagcagaactattacatccatgacttcagcgtattaacgttgtggtgtttcctaaggttgaaagtttggtgtttgaaacttttaaattctgtgaactcagtgtatattaaaaattcacctctatgttctttttctgtaccttttctccccaggctggtgcttgagttcagcctcctgtcttatgcttttggcaaatttcctaccgttgtttggacctggtggatcatgttcctgtctacattttcagttccctattttctgtttcaacattgggccactggctatagcaagagttctcatccgctgatccgttctctcttccatggctttcttttcatgatcttccagattggagttctaggttttggaccaacatatgttgtgttagcatatacactgccaccagcttcccggttcatcattatattcgagcaggtaaggttttaagtgttacccaaggcgatgctgtcctcggctaaaataataataatgatgatgacatactgatactattatttttagctgtattaacttggataaattttcatatattgttcttttgccattatctgtaaaattgttaaactagaatcatctcacctcttaagtttcattgtagcttccatgttctctgaattttgataaataaattacgttgaacttttttttttttttttgagacagagtctcgctctgtcacctaggctggagtgcagtggcaccatctcggctcactgcaacccctgcctcccaggttcaagtgattcttctgcctcagcctcccaagtggctgggactgcaggcgcctgccaccacacccggctaatttttgtatttttagtagagatggggtttcaccatattggctagactggtctcaaactcctgaccttacgatccgcctgcctcggcctcccaaagtgctgagattacaggcgtaagccaccgcgcccggccacattgaattatttttgatgcatcaagattttgtttctgaatactttttgtaaaagtcatttaaattataaaatattttcataattaaaaacttcacttttgaaatgtcagattcattgttttgtcatgtaactatataataaaggttttattttaatttgtttatacacttatcaggattttctgactttactggctatctataatgcatttgactaatggaaaggacacttgcaggagactttctttgaagagacatctttttcctcctgcttttgtagattcgttttgtaatgaaggcccactcatttgtcagagagaacgtgcctcgggtactaaattcagctaaggagaaatcaagtatgtaatttcttttgttcattatttcttcctcccctcccctcctctccccccaccccattcccttcccttcccttcccttctttccttctttccttccctccctccctctctctttttctctttctctttctctctctctctctttttcttttcttttctttgtgtaatttcattagtttaaaggattattggctggatatttcaccctttgttgttttctgggatgtcacattatataatgtagagattgtgttttatttcaaatatatatkatccatattgattttgaggaccacttcattgtttcctgactattccggctttgcccttgaacctacaattttaaaaaattgattatcttttgcaactttgcattatttttatggaatgttaatagcctcattacacctgtgcctgcctattctttgcaaattgttgcttcacactctagaagttatctcagtcacaggaataacttggtttaaagagattggtaatattcaattcgtgcaagaataagaagtcattccggagatcaggaaaaaagaacatgagctgataagtcattttattcttccctgttctgtgcttccttatattcccccctgtatttttgctgtgaaaaatcaaagagcctttgctctaactatagttttccttttctaggcactgttccaatacctacagtcaaccagtatttgtacttcttatttgctcctacccttatctaccgtgacagctatcccaggtaatggtactgtgaaccagaaaygtggtaaacaccaaaagtgtggcatgagtgaggtgggataggtaaacaggggccagttcatgtagggacatagaaaatatagaatgagttttcattttctgtctgacctgagaagcctcaaatggtgagtagagaagtctaatttgattatagtaattcttgacagaattataaagtatttcatatggtcataaatgatgttctgaattaattaatttttatttatttttattatttttaatttattttttattaattaattaattttagttttttctgagatgggagtcttgctctgtcacccaggagtgcagtggtgctatgtcggctccctgcaacctctgcctcctgggttcaagtgattctcctgcctcagcatcccaagtagctggcattacaggtgtgtgccaccacgcccggttagtttttttgtatttttattagagacggggtttcaccatattggccaggctggtctcgaactcctggtcactgccttccaaagtgcttggattacaggtgtgagccaccgcgcctgaccaaaaaacattaattgtgagggtctttattcaagttcaattactttatttagaaaccttatttttgtttctttctttttcaggaatcccactgtaagatggggttatgtcgctatgaagtttgcacaggtaagtttttgtaactgcctaaggtatgttgattaggggatggggattcatatttatgataataatataatctagttaaatctaattgggagctaagaatgctttctgttgacattatgcagtcttttaaactatttccagtacggtaaatggtgtttgttttgccaacatcaaaagtaattttctttaataaaagaatatattaggctgggcgcagtggcttgcgcctgtaatcccagcactttgggaggcctaggtgggcagatcgcgaggtcaggagttcaagaccagcctggccaacatggtgaaaccccatctctactaaaaatacaaaaattagcctggcgtggaggcacgtacctgtaatctcagctactcaggaggctgaggcaggagaattgcttgaacctgggatatggaggttacagtgagctgagatcactcctctgcactccagcctgggcgacagagcaagactccatctaaaaaaaaaaaagaatgtattatttataaagtaattctaattggttatttcagtaagcattaatttcccccttccttcctgtttttgggggaggtatatatgtatgtgggtatagtctgactcttacccattcctcctcccacctccatcagaatcattaatcctggaagatcccattttaaattagtgtctcaatcaaatgcccatttatgaagtaagttctttcattatgggtttttttttttttttttttttttttttttttgagaaggagtcctgctctgttaccgatgctggagtgcagtgatgcagtcttggctcactgcaacctctacctcctgtgttcaaacgattctcctgcatcagcctcctgagtagctgggattacaggtgcccaccactgcgcctggctaatttttgtatttttagtacagatggggtttcaccatgttggccaggctggtctcgaactctgacctcaagtcatccacccgcctcagcctcccaaagtgctgggattacaagcgtgagccactgtgcccggccatgttacgggttttaagcagcaggaaaacaggttccaagagtaagctcttctaaaaatatcatttggtaaagggttaggaaaagtgatggtagaaactaggcttgagtaatctccctgaaggattatagcagtcttctatactagtgttaaatggaatacatatgcgaacattactgtaagggtcacatctgtactttcttttggagagaaaaaaatcgccttccatcttattaagccatcgttattataattctgtctctgttatgttccaggtctttggttgctttttctatgtgtactacatctttgaaaggctttgtgcccccttgtttcggaatatcaaacaggagcccttcagcgctcgtgttctggtcctatgtgtatttaactccatcttgccaggtaacatgggtacttgttaatttggtcatgcataaattcacgaggtaaatagaaagctattgcctatgagcacctttgctttgcctactttttcatctaaacttctatacatctatgcccatcttgacctcttttgcatctactttataaatgaagtatccttcatccagtctcaggtcagtctttcatcttatggctttcactcaagttgtgcctttctctgacagtggacagtccacattcatgctgtgtcttcctgttcgctattaagttcattgtaatcttgctcctgattccaccaagccacttaaatgccccttgttgaaattactagtaacttgtagaaattacttgtagaaattactagtaatccatattctaatccagtggatggattaagatgtactttaccccttatccaagttgacctccatgaagcattgggtgctgctgaccacatttttaaatctctcttgtcactgttttcttgccttttttttttttgaaatcgggtctctctttgtcacccagtctgaatgcagtggtgtcatcatggcttactagcctcgacctctggggctcgagtgatcctctcgcctcagtagctgggactacaggtgcatgccaccatgcctggctaagtttttattttttggagagacggggtctccctatgttgcccaggccattctcaaactcctgggctcaagttatcctcctgtctcagcctctcaaagtgctggggttacaggcttgagccaccatgcttggccttttgccactatttcttattttcctcctgtctttccgaccataccttgatttcttaaatatatttattgcatttttttgtctattatagagatatatgagtacctagtactatgccaggtgcagaggactcagaagtgaacaagagatgtattatctttacagtctgggagcttttatagtttcccttacttttcctcttttctttactcattgaatgttggtaatgttttctgtcatcaccttccctttcttttcttctcttgcattcctcttccagtaaccctccctcaccagccccaggacttatttgaatsaactctgtatctgtccctaaaatagaatatgtgttacatacttgagtgtcttcctcamtagctgcaaagttattgagttcaaggattgtgttttatagccaatcacagtctctctcatattgtctggtacatagttgatgctctataaatatatatttttcaataaatgagtgaaagagatggacatataaatggatattttacaatatattgtaatatgtactacataagtaggataaacaaaatgcttatggcctttgtttcacattagagataacatttaatattgggtattgaaaaataggtaggtatttgcctggcagagaattggtggaaaggtcattctaggtagtgggatggatgcaagggcatggagcattctggaatggcataaacccagttgtggataatgtttacaacacttagagggtagaatcattggagatatgtttagaatgttatccatgtcactatgttaaccatgtcactattaacattttggactggttaattctttgtttggagtggcattcttctgcattgtagcataaactgttcagcagcatcctggcctctaacaactagataccagtggcacmactccctctcctccaattgtcacagcactggtgcagtagcttgcaccggtagtcccagctattctggaggctgaggtgggaggatcacttgagccccaggagttgaagttcagcctgggcaacatagtgaaaccctgtcttttaaaaacaaaaagtctctagaatttcaaatgtcctgtgggggagagggggcaaaatctctcccagttttaaacaattgtttaagaggggggtatgggggccagatttttaaaggaccttgggtactaagttaagccatatatttaggcatttcttaaaaacagactgggtaggctgggcgcgatggctcacgcctgtaatcctagcacttcgggaggctgaggtgggcagatcacaaggtcaggagattgagacctgcctggccaacatggtgaaacccggtctctactaaaaatacaaaaaattagccagatgtggtggtacatgcctgtagttccagctacttgggaggctgaggcaggagaattgcttgaaccctggaggcagaggttgcagtgagccgagatcgcgccactgcactccagcctgggtgacagagcaggactctgtctcaaaaaagaaaaaaaaaaaccagactgggtaatgtcatttgttgaacccactttgaaggaagttactgttttaaaattaagataattaactccaaaagtatatcatctctggaatgggtaaactggaataataacttatattttacaaaataatcccagctaaataaaatgatgtgatataattagttgcttggtrtgtgagctatttggaaagactgttaatattgttaatcttatttttaggtgtgctgattctcttccttactttttttgcctttttgcactgctggctcaatgcctttgctgagatgttacgctttggtgacaggatgttctataaggtagtatatacttagacttagctttctttttacattttattaacttcttcattattagtattttgacattgytggctaatgtcaccagcctttcacacaaacattgtgaaataattttcttttctacaagttttgccagtattttctgaaattcggttacagatataactagcataaccttgtgttttcttctgtctctaatatctgctcccttaacataagcacatggtttctgctggatcctgcaaggatatattggtgattccagtaggaaactgtttgttcagagcacaccatgagacttccctgagtgttcattcatttgaaatggaccgtctagttctgtaggaatgacctcagcaaattattccatttaagacaattgagcagttcatgagggaaataacttttccctctttagttttgaaaggtgttaattttgcttcagatagtatccttatgcttctaaagttggaattaagctatagaattagagtcagaatggctcatagcattctttaaccctacctaaagctctctttgagttgtttttggcaacactccaagtctaccaccttttttctcaaagaaactttaagtgtggattgcagattttagatacctgatttcattcatctgatcttaatattgggagcaagaagcatatatagggataccaggactttgaggtagccaccatctcaccctggataattttgccatttatggtaaccaccaaacagctctctagtgttagcactctctctggtcttcatgaccatagaattttctcatgacattctagtagggtaaggggggtggggcttactgattgctgtttagatgaacattagatttaaatgattctatgtgttccgtatgaacctaggaactaaatcatatatagtatgagaattcatgtcatattcaacactaataaccaaaatgcctttgaagatttttctgtcaccagtgtatgaaccaacagtttatcacagtataatttgatttttctgttacatatgttctttgggaagtcaggggggtttgctttcgggtgggatgtgtgtgtgtgtgtgtgtgtgtgtgtgtgtgtgtgtgtgtgtagttttatacctttactttttccctcaggattggtggaactccacgtcatactccaactattatagaacctggaatgtggtggtccatgactggctatattactatgcttacaaggactttctctgggtaagtagcaaggtttaagttgatattatttatgaaatggagattctttttcagaaagtatgagtattatacagctggaagaagttatatttaattgctcatgaggaaagggtgatagtatcttttcagttttcttttgagaaatttacatctagaaacctgctttgaatggtactgcttagaaaccactgtgtgtacactagtaggtctaatactgtgtcttttgctctgaattttatcttacataacaaagtaagaatgcatggaggttgttggagttgaaatgatccaccaataatggatagtttcttatgagtcttgttgccaacaaataatctccctttggtctttttcattcgtttttcatggttaaaggtagagaaacacttttttttttttttttttttgagagagtttcgctcttgttgcccaggctggagtgcagtggcatgttgtcggctcactgcaacctcctcctcccgggttcaagcgattctcctgcctcagcctcccaagtagctgggattacaggcatgcaccaccacgcccagctaattttctatttttagtagagatggtgtttctccatgttggtcaggctcatcttgaactcccgaccttaggtgatccgcccgccttagcctcccaaagtgctgggattacaagcatgagccaccgtgcccgggtgagaaacacttttctgtgagaaacacttttgtgtggattttgtatctctccaatcagtgacacctggctttgagacattctttagagcagaatatacttagactgatgagatgtaatcttgaatctcctggttgataaacaggtatctagattacagtttttattaagtgagggcaccatttggcttagtgacagcatcttatggtggaaatagcattgtattaatatttgagtgctaattctgtcattcaagtgtagtttcacatacggataaggcaagtcccttttctccttctgaaatcttagttttgttatgtgtaaaaatggagaggacagttgccccatctaccatacagtgttactctaaagactgaaattcaatatgtttcatttatataggaaaactatgttttgtcagttgtaataacttacaaacataagttattgatatttttgaaaatagactcagatatttgaacaataataagagtttgtaagtgtatatgatttgtagttattttaatagacttggattaatccaaggagtagacttagaaaattaagtacaaatacaataggtgcctttggcatataattttacatcctatataatccatgcttgctttaaatttttaaaaattactttgtagtgttttcctttttctttagtttttctccaagagattcaaatctgctgccatgttagctgtctttgctgtatctgctgtagtacacgaatatgccttggctgtttgcttgagctttttctatcccgtgctsttcgtgctcttcatgttctttggaagtaagtatcttggyatgctgtgagtactgggtactatgctaaaaaagaaaaccagatagaaaggaaactataaaatcaatgtaggagaactagatagtagtagtaacattttaaggtagtacttctttatcagatggtcagaatattgactttgaataattatacacagctctgtctcaagatatttacactttgaagtagggaaatgaactaggtaacctcatgaagaccattgataacactgatttgataggtcataaaagttatctatataaacagctttcccattcgtaaacattgtcggtatgcaccccctagaaaactgacaagtttttgagtgagtagagagggaaaagttggaatatgaatattctaattccatgaaatatatatacacatgttctgaaaacactgatttcttgtaagttactgattttaacactgaagctttatttttctttatagaaacagtgaccagaataaaaaaatatataaacagttgttgctcactgtgattattaaataacagcagatacctgaggtccctcatcttctgataaattatgttttgayacctgtatatttctttctttcttttttttttttttttttttttttgagacagagtttcactcctgtgacccaggctggagagcagtggtatgatctcakctcactgcaacctctgcctccctgcttcargtgattctcctgcctcagcctcccgagtggctgggattacaggcacacaccaccacgcctggctaatttttgtatttttaatagagatggggtttcaccatgttggccaggctggtctcgaacttctgacctctgataactgtatatttctttgttgccttcctatttttagtggctttcaacttcattgtcaatgatagtcggaaaaagccgatttggaatgttctgatgtggacttctcttttcttgggcaatggagtcttactctgcttttattctcaagaatggtatgcacgtcagcactgtcctctgaaaaatgtgagtcaccaacctggttggagtgcaaaagaacctgtttattctctgtttgtgagagttggtgggcratgttgaggagcacagtagtggagattatgatgaattagtgttaaagagagggaaatgaggagtaaaagcattagtttatcatctgatcttattgtacttgaagtttttccttttgtttagttttcttcacatttaactctcctagcttttggttttcttcttttactgccttttcttcagccccttctaatttttttttttttttgagacagagtctcactctgtcgcccaggctggagtgcagtggtgcaatctcagctcactgcaacctctgcctcccggattcaagtgattctccttcctcagcctcccgagtagctgggattgcaggagcatgccaccatgcccgctaaatttttgtatttttagtagagatggggtttcaccatgttagccaggatggtcttgatctcctgacctcatgatccgcccacctcggcctcccagagtgctggagccaccgtgctcagccagccccttctaagtattctccagggttttcctaatgccatgtatgtccctactaccaccacctaaaacatacctttttttttttttaaacctctttcttctaaataaactcttgtaaaaatattgggcaacactgagatccttccatttctcttgattctatttttgtttttggtaattcaggtttcatttattcttaggactttagtttttagctatacatgggtacagattttaggaggatggcttttttttttttttaagaattttattttcaagtaacacagtataggacataggaatttcccagcaaacactctggttaatttaattgatgtgatctggttaattagatctactagcactagctgaaagtactgcttatagttatggatagaatttcatgatggaaacaccctaagaagtaggattgccaggctttttgtgcatatagggcgtgtcctatatttaacatttttgtcctgcctcctgtattgggtttcttagaacaccccaaatgtcctatattctgcttttttcagtaaattacaaaaaatatggcagatagagctatttgtctcaagttcatctcggcatcctgtacttgtatttgctaaatttggtggccctactaataattcattcaatccctacaaccttccaggtttggaggggataccttcttgatttatttcctgggtatttctcataggcatctgtaactgaagatgtccataatgaaattaatcagtttcctctccaaagcttcccctctttctgtgtaccctatgtctgttaggctgcctcaactctccctctttatttcatattaatctcctttgttcatctgaagtaattgctcttgactgtccctggtcacctggattccacatgtcagattttattctcctatcaaaatccagtttggatgccacatcttccatgatgatttttcaaatgcttgcttccctctctttcctatttctgaacttttgtagtgcttcatttgctcctcctttgatagttcagtaattttaaaccttgtattagtcatttttatatatatgtcatttatgtatatattagtcatttatatatgtgtatatataatatatatttatatttatatatttatttatatattatatattaactaatatatactaatatttagtaccttaaaatctaaatggtggttatatataaatatatatatatttatatatataaatatatatatttttatatatatatatctatttgtcgtccttaaccaccatttagattttaaggtactaaaagtagggctgtgctaaaataaagatacagaaagaaatagtgcctatttagaaactggtcaaagtccacacaattgtgtatagtttactggactttaaaagctttatgtgaagcacctaattgaataaatctgtgttatagataaaagtactgaacatcttttgaattagtgagctgcttataccttgagggttgttgaaatggtgggaggcattttagagatgtacaatgtatcatattaacatccctgcctatctccacacctcctctactctgtacacaaattatttttccattcttatttttccccactgcagcccacatttttggattatgtccggccacgttcctggacttgtcgttacgtgttttagaagcttggactttgtttcctccttgtcactgaagattgggtagctccctgatttggagycagctgtttccagttgttactgaagttatctgtgttatttggaccactccaggctttacagatgactcactccattcctaggtcacttgaagccaaactgttggaagttcactggagtcttgtacacttaagcagagcagaactttttttgtggggctgggtggggggagaagaccgactaacagctgaagtaatgacagattgttgctgggtcatatcagctttatcccttggtaattatatctgttttgtttcttgactctgtccaatcagagaataaacatcatagtttcttggccactgaattagccaaaacacttaggaagaaatcacttaaatacctctggcttagaaattttttcatgcacactgttggaatgtatgctaattgaacatgcaattggggaagaaaaaatgtagaatgatttttgctatttctagtagaaagaaaatgtctgttttccaaagataatgttatacatcctattttgtaatttttttgaaaaaagttcaatgttcagttttccttagtttttaccttgttttctctataggtcatgatttctgtgaagcaaaaagatgccttttaccatgaattcttgagtttacatcaataatattgtatattaaggggatcagaagtaggaaggaaaaaataagagatagcagaggaaaaagaaaaacatttcctcttataacttctgaagtaatttgtaaaaaagatttgtagagtcaatcatgtgtttaaattattttatcacaaacttaacatggaagatattcctttttaactttstggtaacttctttgaagttatttagaaatatcctttggaacaattattttattgtctaataaatattgacttctcttgaattattttgcagactagtgagtctgtamcataagtattaatcacctccactcatattaaagtgatcattaagaatccagaagctggcttctgcatttgctcagttatacttttaatggtagtatgtttttaggtggaataaattaatatgtgattggtttcaaggaaatgtactctattatgtaatacttccattttataagatgcccrtttctaatacaatgtgtgtaggaattatttgtatgtatgaggtatgattgtaaagattgagcattggaaggggtatcagagaccatgtagttcaactttccactcaaagtaagatttatgaattatttaaatgatagttgttacttggaacagccacttgagaggctctcttggtattgtttggaattgttttaaagtcagtttgagtctcacaagaaggtaagtagagtttcttaatagtcacaacttaatttgaaccacaagtatccagcttaatcacgtatcttactcacgataccactggtccagatgagtttaggtaattttcaaacattaaatccaacttcaacggaaacaaatacactcaagggaagttatttttaaaaaggtactctgcatgttcccgcagtaatgttctgcacaacagtattgtaattgtaatggaatcataacctgctaactagtttgctttaatatggcttgtaattcttgacatttttcttaaaattaaaacgaatttttattttgaatttataactgcattttaaatatattggggacagattgcgctgagacctggttatgagcaagccartcttttgaatctagagaatggaattcttaggtttatatttctgttaagaaatactataaatatgactcttatgagaagactttgttgctctgtagtgtttctgaatactgtatttgttggattgatcaaggctatttttcaaaaagctctctgcttcctgtttgtttgtttgtttgtttttgagacagagtcttgctctgtcgccggggctggagtgcaatggcgtgaactcagctcactgcaacctctgcctccctggttcaagctattctcctgcctcagcctcctgagtagctgggattacagggccacgcctggctaatttttgtatttttagtagagatggggtttcaccctgttggtcaggctggtctcaaactcctgaccttgtgatctgcccacctcagcctcccaaagtgctgggaagacaggcgttagccaccgtgcccggcctctgtttcctgttattagtgattttcctgcccaagattgcaacaacaaatatgtagaactacagactgtttagaatgctgagactgttctaagaaactttcaaaaacagtagcacttcaaggaatggtcactttctatgaaagaaactggtttgatagccataatcttattgctagctgcttttagcaaaagtcttttcttgaaaccaccacctatactctttaaacaaataaaaactaaaatctcttgctaatgtttcaggaagatttattttttctattttgctattgtggcgaaaattattttcagttataggatacttttttccttctgaaaagtaataagcttaaagtttttgtttctgtaagatgtaatgatagtaactattattttgggcatattaaccaacagaacaattatgtagtatgtatatcactttctcattagatctctaacttgaccttctagtacctttatgtgtgaggataaatttgttagatccttttattctcaatcttggataatgatgcaaaatggaattttgttttgtttgttggtagattcacatactaaaactttgcaggtaaagttgcttgcctcatgttagaatttaattagaaaactgaggctgcctttttttttttttttttttttttttaagacagagtcttgttctgtcgcccaggccagttttttttttcttgtacagatggggttttaccatgttgctcaggctggtctcaaactcctggagtcaagggatctatttgcctcagcctctcaaagtgctgggattacaggtgtgagccacggctcctggctccttgctccagaatcagttttttaatggaagatagctcatactttgtttttgtttttaaagagacagggtctcactctgttgcccaggctggtagtagcgtgatcatagctcactgcagtctcaaactcctggactcaaatagtgctctggagtacctagaactacaagtgcctaccaccacacccagctaatttatttgtttttttttttttagagatggggggggtctccctatgttgcccaggctggtctcaaactcttcacctcaagcaaaactcccactgcagaaagctttgggattacaggcatgagccaccatgccaagcccatacttattgttaataaagtttcagtgacttgcttactaatcttatgcaaaatttcatgtaatttatgtaatactacataacaatgctacatatggtatgtatacatacactgtatacacacaaaggtctgttctgggtattttatgtatcttatctctaggctttatggctctgaaatggagggaactggacataaatgtttcaaggaataaagtgaatgttttgtttgtttgtttgttttgagacggagtctcagtcaccaggctggagtgcagtgctgtgatctcagctcactgcaacctctgcctcctgggttcaagcgattctcctgcctcagcctcccgagtagctggcattacaggtgcctgccaccatgtccagctaatttttgtgtttttagtagagatggggtttcaccatgatggtcaggctggtctcgaactcctgacctcatgatccgccagcctcagcctcccatagtgctgggattataggcatgagccatgctcccggccaaagtgaatgttttgggtgaagtttatataaggatttgacttttgtatcattattaaagtttctgtcaggtaatacagtgttggccctctgttgaaataaaatgttacatatcgctgggtgtagtggctcatgcctttaatcccagtactttgggaggccaaggcaggaggattgcttgagctcagaagtttgagaccagcctgggcaacatagcaaaaccttgtcactataaaaaatacaaaaattagccaggcgtggtggtgcacgcctgtagtctcagctactcagtcggctgaggtgggaagatggcttcaagccgggagatggaggcttcagtgacctgtgacctgtgatcacaccacttaattcctcaaaacatttatgtcccagttccctccatttcagagccatgggcaacagagcgagaccctgtctcaaaaaaaaaattacatataagcccggtttaaagagaggataatatgcaaccaccctagttgaaacagagtgtatcacttctttctcaccctaaatttaatgcctagtttgaaaatcagtagacaataataaagttgataagctttaggttggtaggaaagctatgtaatctatatagtgtactaaatccttatatgtttttggtaaaaaaagactttaatagctaatttggacttcagaaaatgggttaatttcacgagtgcatatcacttttgactatattagtcaagcatattattaaagtttaaaaaactctaaaacttctgtactgtttttttcttaagtgctctcttccttatttctacattactacattcacatttctgctgtcaataagccctaatggagtgataaactttaagctagtagatactgcaccatgtcttgtggtggtgttttcttaatgaaatggaagctgtacttcctgtttgtttttaaatacttttgaaacagacagttcatgtaccccatcatttagagatgcagtttgaatttccatggaaaaaggtgccaattttggattgggaaaggagctgaagccccagtcaagactttgccatttggggtaatgcagcagattcctgtgtctgtatctttccagtgtgtgtgttaatccatagtgttctgagcaccagaagggtcatgtaaatctgaagttgttattaaaggtttttctatagtgaaagatgtcttttctgattcattcttgtatgttactttcctgaattgctattccctctgccccctgcaagtccttgtctgatcactggtaccaatactttgtttagtatgagttgtattagcattaacttaaaaatttttaggccgggcgcagtagctcacgcctgtaatcccagcactttgggaggttgaggtgggtggatcacaaggtcaggagttcgagaccagcctggccaatatggtgaaacctcgtctttactaaaaatacaaaaaaattagccaggcatggtggcacatatctgtaatcccagctacttgggaggctgaggcaggagaattgcttgaatccgggaggcagaggttgcattgagccgagatcgcgccactgcactccagcctgggtaacagagcgagattccatctcaaaaaaaaatttttttttaacttaaaaatatacaaaaaaggcaaaatactgcacatgtaaatgtgataaatatatttggaagaaacctagtctattttttatttttttatgtctttgagacagtctcattctgttgcctaggccagagtacagtggtgtgatctcagcttactgcaacctccccctcctaggttcaagtgattctcctgcctcagcctccccagtagctgggattacaggcacacatcacatgtctggctaatttttgtattttttagtagagatggagtttcgccatattgcccaggctggtcttgaactcctgacctcaggtcattcacctgcctcggcctcccaaagtgctggaatagaggcatgagccactgcacccggccagaaaccaagtctcttttaaaagtaacttcaagtgtatttagtattaactctatggttcatgttcataaatgctgttcatcttgataccaggcaactttatatgctgaatatagccaaaagagaaggcaaacaactgactaggactttcttgtccagtctaatgaaggggaactgtgttaaaggttacaaataaattgtggggcccaattgtgactttgtatttgcatcaagaaatgcagtgacagtgactcttctgctgcctctctctcttgaggccgttatttgttgcttaattccttttgctcttggccttttaaaacctgtgaaggggcctggtgtggtttcttacgcctgtaatcccagcactttgggaggctgaggcaggtggatcacttgagcttgggtgttcgagaccagcctggccaacatgataaaaccctgtctctattaaaaatacaaaaatcagctgggcttggtggcgcacacctgtaatcccagctacttgggtggcagaggcatgagaatcgcttgaatctgggaggtggaggttacagtgagccaagatcgtgcttctgcacttcagcctgggcggcagagtgagactccgtctcaaaaacaaaacaaaaacctgtgaaggtatctaagaaagcattgctctacctctgatgggtagaaatggactttaggtttttaatgaaaggtgaaaagcggttggctaggaggtatgcctcttaagactaagggaaaccagttttggagcaagatagggttgcttcctcctgctatcgtttgaatgtgtctcctccaaaattcaggtattgccaatgtgctgttactgaggcagagcctactttttggagacagtgtctcgttctgtcacccaggctggagtgtgtggcgtgatgtgggctcactgcagcctccgcctcccagctttacatgattctcctgcctcagcctcctgagtagctgggattacaggcaccggccaccatgcccagctagtttttgtatttttagtagagacggggtttcaccatgttggccagtatggtcttgaactcctgacctcaagtgatcaacccgcctcagcctaccaaagtgctgggattacaggcatgagccactgcactcagccaaatttctcttctttataaagtacccagtcccaggtattctgttatggcagctcagatgaagatgccctttctccaaagaatctactcgtaataggagcctattatgaggaatacttgacattgcaacactttgttggtggaagcacatatgatagcaacagtcaaggaatactctccagttactcttgatgatctagctatacccacctggctctgcagtgccaaaggagtgggaaaggggaaatcctttcagaagttaactctgcccctgtttcttggacccagtggctgttgttcattgctgctaggggcaaagccatagtgttggaattttttctgatgaatttatgaaagcgtagagttgtgtcactttaggcttggataactatcatttggactcaatcaaattcatgcatctgatttataaaacatataacttggtaaatttactatgagaaatcactcagtagcatcctcaaggttggcatgatcattgaatttgctctgtagaagcccaacttagtgtacaatgagaaagatgaatttattctcacagactgcataatcatttgtcagatactatgccatgcactgaagacacatgaacaatacaaaagcatatttcttcctgtaggcatgcccgtgtgtgaactgaatgataaagtcagacatcattcagttttagggatgcccttcttgtgtggaagcaatactagaagctactctttcccttggaaagtgtttggctgagtagtgcttagatttccttctcagtgtctgcttttaaaagttgctaactggaggccctgtgtggtggctcacacctgtgatcccagcactttgggaggctgaggtgggcttatcacttgaggtcaggagtttgagaccagcctggccaacatggtgaaaccccaactctactaaaaatacaaaaattagcagggcatggtggcacgtgcctgtaatcccagctattcagggggctgaggcaggagaattgcttgaacctgagaggtggtgagcctagattgcaccgctgcactccagcctgagtgacagagtgagactctgttaaaaataataggaagaaaaaaaatggaagtttctaattggtaccttctttttttagctacattaaatacaaacactggcccacttcccctgcagattcctttagggagctttgcatgctctaagtgcctgcagatgtgtttataaatccctgaccacacagttagaaaatgagttgataggccaggcatggtggctcatgcctgtattcccaccactttgggaggccaaggcgggcagatcacctgaggtcaggagttcaagactagcctggccaacatggtgaaatcccctctctactaaaaatataaaaattagctgggcatggtggcgggtgcctgtaatcccagctactcaggaggccgaggctccagagaatc

SEQ ID NO: 95148 - DNA, 22958 bp, Homo sapiens
tcattttccaggtgaagaaaccgaggcccaatgagaaatgacttgctctgggtcctgcagagagcaagcggcaatgcatggccagcagaccctcagcactgccacccttgcttccccaaatgaattggcacaactgactctcgggcaatgtaaagaaatgaagaaatactcctctcaccagcaagccttgtacagatgtccccctctgactagaacaccctcccctttcatctgaaacctttcagcgcttatccaggaagccatccctgtacccgtagcctggatcaggagcctgttcgggtccccaggtacccctcttttccccatcatggctgggtctctgcctcacttgcctctcactgtcttggtcattctgggctgtcactggtgtgcctccttcatggacttacgcgatcattttcagtaagctaggtctggagcttagaaaattgtttagttgccaggcgcaatggctcacgcctgtaatcccagcactttgggaggttgaggcaggtggatcactcgaggtcaggagtttgagaccagcctgcccaacatggtgaaaccctatctctactaaaaatacaaaaattagccgggtgtggtggtgcgcacctgtagtcccagctacttgggggactgaggcagcagaatcgcttgaacccaggagacggaggctgcagtgtgtggagatcgtaccactgcactccagcctgggcaacagagtgagaatctgtctcaaaaaacaaaacaaaacaaaacaaaaaaaataaaaacaggttgggcgcggtggctcacgcctgtaatcccagcactttgggaggctgagccgggcggatcacctgcatttaggagtttgagaccagcctggccaacatggtgaaaccccatctctacaaaaaacacaaaaaatcagctgggtgcagtggtgtgcccctgtaatcccagctacttggaaggctgaggcaggagactcacttgaacccaggaggcggaggtcatagaggagccaagatcacgccattgcactccagcctgggcaacgagcaaaactccgcctcaaaaaaaaaaaattaaaaaacagagcttggattgcttcttagtcttctggctaagaatcaagtgtaaaacagcttggccagtgtgccggggtagggtcctgggagcccctggctgtgtcaagagaccccctttgggccaggtgcggtggctcatgcctgtaatcccagcactttgggaggccaaggcaggcggatcacttgacgtcaggagttcaagactagcctggccaacatggtgaaactctgtctctaccaaaaatacaaaaattagcccggtgtggtggtgcatgcctgtagtcccagctactcaggaggctgaggcaggagaatcgtttgaacccgggaggtggaggttccagtgagccaagatggtgccactgcactccagcctgggcaacaagagtgaaactccgtctcaaaaaaagaaaaaaaaataggagacccccttttactttccagactgtgggagggaggaagagtgttgtcccaggcagtaactaggggctagattattaacaaactagtattttagtgcctgctacacctgaacagtgcttctggctgaatgttagccctgggaatctgaagatcagagaggtggggcatcctacctgaggatgcacagcctggatcctcattttgccctgatttatccagatctgctgtcctccctgcaccctacagagcagggcaatcacagcagggggccccttcagtgtcctcagacagctgctgtgatttgaataaccaggcaggctgctggatgtcccctggtgactgatttgcctggcaaacagaccctcaacccctgggagacagtccccctggggccttgtttcttcttcctatcctcaaaagctccccaggcccatctccccttgcctggctctgcttggtggtcctagtgcttgtccacccctggaggctggatggttccctccaaaacctgggagaagatgggcaggtccccaggcaggggtaacctgagccagcttagtccactcccagggccagccaggaaatttgcatgaagagaatgaggttcctcagaggcttcccctcctttcccaccagggatagtcatcctggggctgaggtctgacagcaggtggaagcagcccctgtgtgtggagagccttccggagggcatgccccgcgccttcctggtcaggagtcggcgtccacagccccccaactggggccatctgcctgaccagctccggggagatgcctatatcccaggtgggcccctcactgtgcctggaggtaaggggcaggagagacgcagtgtcaccatctggcttttctcctcagactgcagcagcctgggggggccaccggcacaacagtcgtccagtgtcagggatccgtggacagcggtgagtgtgtaactggctagcaaagccagctgtttcgctcctgcctgctctcagccttaatgaagctgacagccccttgctcccccgacccatctgcacacgccctccagcctcgggacctgtccgcccctacttctctgtgttgggaatgcctctcctttcctagtagtgagctctctactgttaggtctcaccccaggcaccagggccggcagccacagggatctcttccagcggggcacaagattcatccccacatgtggatgatccgctttatgtcagaacatgggacaaggcaacaggagtgcgatgggagataagggctttttcagctgtgcatgcattggaggaaggaaagcgccagccggaatgtaatatattcatgaaagcaagccactgttctaggcatgggctgttatattcagcgggaataagacaaaaatccacaattttatggagcttatattctggttggggctgcatgtatagacaataaaattagtcagcctgtaattccagcactttgggaggccgaggcgggtgaatcacttgaggtcatgagttcgagaccaggctggccaacatgttgaaaccttgtctctactaaaattacaaacattagccagacatggtggcacgtgcctgtaatcccagctcctcaggaggctgaggcaggagaatcagttgaacctaggaggcagggcagaggatgcagtgagccgagtctgcgccactgcactccagcctgggaaacagatctagactccatcccccctcaaaaaaaacaataaaattagaaaaatagaccgggcatagtggctcatgcctgtaatcccagcactttgtgaggccaaggtgggtggattgcttgaggtcaggaattcaagaccagcctggccaacatggtgaaaccccatctctacaaaaaataaaaaaattaactgggcatgtggcgcatgcctacaatcgtgtaatcgtggggaggctgaggcactagaatcgcttgaacccgggaggcggaggttgcagtgacctgacatcataccacttcactcctgcctgggcgacagagcaagactctgtctttaaaaaaaaaaaaatgtgtatgtcacatcagaagatgggacttggcatagagaaagtaaggaccatgggatagtgagggaaggccctggagagtgacaggcacacacactaatcactgtctcccacctgccttcctaatcctccgtggtggctcaggacactctgtaaatactcatttgcagagtaacaaagggtggatggggtccagccagagaggctaataactcctgcatccctccagcagcccacacagggcaacctgacctctgctcccaggggcccagggacgctgggctgcccgctctgccctaaggccttccctctgcagcgcatgctgacaaggcacctcaagtgccacagccccgtgcgccgccacctgtgccgctgttgtggcaagggctttcatgacgccttcgatctcaagcgccacatgaggactcacactggtgagcagtggcagggacagggaaaagttgctgggccccaggtggggatggaaggaaatggagagaggtgctgggctgtggagtgtccatggtttgtgtatgtggggtatggagaatcaagacatgatgtctctcggaccccagtgggtgggtgtaaggtggcaccaaaataggggcctgtcacggaatgcagagtgcagacggatgccggttatacgattcaggctccagatcgaaaggcaagggaaggcctccctctccatcccccaggggagggagcatcctggtgagggagagtggagacacaggtgtctggcccatgtctgcactgggtgacggtagcagatggtgggtcatgggcggaagagtctgaagagcttggaataggtaccagaaatgctcaacactggaaagcagggtgggggcgctttagtccagagcccattgccctctctgtccagccctcccctctgcgcccatctgtgcagggatccggcccttccgctgcagtgcttgcgggaaagcgtttacgcagcgctgctccctggaagctcaccttgctaaggtgcatggacagccggccagctacgcttaccgtgagcgccgcgagaagctgcacgtgtgcgaggactgcggcttcaccagctcccggcccgacacctacgcacagcaccgcgccctgcaccgcgcagcctgatacggtgtgccagcgtcctccccacgaggcaaataaacacagaaaactcacgcatggaatctggtgtttattacactcgggggagagaggaggtcactcggtccagcggtggccgcagtgtggggctgtgcacacgtagtaaaggcgcatggcgtcctggcagaaatgatgcatggttaggaaggatttggacccagcagcgccttaccccaaaagaacaggcaagagaacttcaccaataggtaagggcccggcagagttccaagaagcgcagggtcacccacattgatatccccgcccccagaaaggaccaaacaagccccagatacttagaaagccctcgcgccacttacctcggcccgcgcactgtgtgactggaagaacacagcctccttgtggccgcacctgagagggtaggggctcggtcaccggaggcttcacacccttccctcctcccttcgcccagtgaggagacgagcctcactttacctccccagtaccagctgaacgctcacttttggcacgggtggtcctcggtccgcggcaacgtggggtcctgggacacgtcggcgataatctgggtcagttcgctgcagggacgcgggggtgcaaaattacgctcagacccagcctccagagccaacacccccgcccccagctcagggcccgccactcactccacttcgtgcgtgatcttgttgacatagatgcagctgttgtcggcctcctgctggtaatcacagttccggcactacgagagggcgagtgtgggggaaagggggtcacggaaggattccagacaagattgggaggagagggcagggtgatcccggaggatatgacgacaggactctctttggggatgggcaggacatgagagtcaggatcacttgaggtgcagcggagggcgaacagggagtccgatcacagaggcagggggcagggcggggccacgctgggaacaggtggacctgccggggaagaccccggcgctcaccgcgtagagcagaatgcggttctccttgtcttccttggggtacagcatgttgttactgtggggagggggaggtgccaggggttagtcctggagccattcctcgcccgccttctaacatcacccgctccctccgcctcaccattcctggcagaagcgaatacccacgaagcccggctcgtaagtcccgtcgggctccatggcgacgcgcagcccgcgcagccctcccagccttccgcgcttgctccgccgcgctacaggtcgcgggaggggccaggcctaggtgcttcgccaaaagagggcggagctgcgcacacgtgctggctccccgccgcctcgggctcggctctctccgcgcagaggtttcatggcttgcttcaatcttttgatatcttagagtaattgcttccaatttttgggcatcgccgcctcagtttacagaatagtatggatctggtgccagagccgggaaaacgatgcgcatcgtaaaccgcaaaacactgagcatccaggacagaagccaaggygcttggcttggttgaaggccagtgcgcatgcgcgagtttacccttcgcggactgggcgarctcttgccactcctacctcsgggcttcagtcttcgccgcctgttctggtcctttcccgggccgctattggaagaaccgtgaactatggaaggcccctctggattggctgggctggcccaagagtaaggagagccctcttcctgscggtggggaagggacggcggcgattggcggacgctcctggcaggagagcgcggattggtcaggcacggagcaggaggcggggctgatagcccagcagcagcagcrgcggcggcggctgcggagcgggtgtgaggcggctggaccgcgctgcaggcatccgcagggcgcggcaagatggaggtgacgggggtgtcggcacccacggtgaccgttttcatcagcagctccctcaacaccttccgctccgagaagcgatacagccgcagcctcaccatcgctgagttcaaggtgtggccatgggggcggggtccggaggggcggggcgaagaaattggggggttcccggaagggggaggctgggaggggccggggagtgactgggcgggcccggaggtgatcccaggctgcggaggctggggacccggtcgcggcggggcgggtccggagagaactcgagagtgcagagatgagggccgggtccagcgaaaaatccgacggtccagagggcgggggcaagaggcgaggggctggattgcggccccgtgcgtcctgactggggggtcttttggaggmaaagggacgtggcgatggtcattgatgcaaggggcggggcctccgtggcctccttcttctcaccctgcctcctcctcacagtgtaaactggagttgctggtgggcagccctgcttcctgcatggaactggagctgtatggagttgacgacaagttctacagcaagctggatcaagaggatgcgctcctgggctcctaccctgtagatgacggctgccgcatccacgtgaggactctctatctgggacactcccccaccccacctttcatttggttattcaacagacacttgctgggctttgccctcagtcatacccgagataggtcctgccttcgtggagcctccagtgcagcctgacgagagacagacccatcattagacagggacagcctagagtggtctgggctgggatcaggaaatcccaggggactggagccaccaagaagaggtgcctgactccacctgggagaatcagagagggcttcctggaggaagggatgtctgagctgagggatgaggaaagggtgacttaagagaaagaggtggaaaggagggagcagggtgtacagaggcctagaatgtgaggtaggtcacagtgagcgaccaggctggacagcttgggagaaaccagaacacaggatctctttgtgcatccactcagtacatcctttctgtctttttttgagacagagtctcactctgtcacccaacctggaatggagtgcagtggcactatcgggctcactgcagccttcacctcctgggttcaagtgatccttgtgccccagcctcccgagtagctgggattacaggtgcccacccagctaatttttgtatttttagtagagatgggtttttgccatgttggccaggctggtctggaactcctgacctcaagtgatcagctcaccttggcctactaaagtgctgggattacaggcgtgagccaccaagcccagcccctttctgtccttattccctcccgacctcactcagtctgtagcagccacattgctccttgcacagtccaggtgagctcggcctctggatcctgggcctgaatggttcttttgtcatatgcctgcgtgcctcacccttccttcctgtcttaatttaaagtgtcagtattctagtgaagtcttcaccggcctcagtgttaacgtttacctcattcctttccccttctttgctttattttagatttttgtgtttacaagtaattctcctctgacacactctggatttctctcatctggtttatttactctctgtctccctggattcgagtgccctgagggtggaaattttgatcactataattcactactgtgtccccagtacttggaatagtgcctgggacagggaggatagtccgtgaatcgttttttgttttgttttgttcgagacagagttttgcccttgttccccaggccggaatgcagtggtgtgatctcagctcactgcaacctctgtctcctgggttcaagctattctcctgcctcagcctcccaagtagctgggattacaggtgtgcaccaccacgcctggctaattttgtaattttgtattttaagtagagttggggtttcaccatgttggccaggctggtcttgaactcctgacctcaagtgatctgcccacctcagcctcgcaaagtgctgggattacaggcatgagccaccacgcccagccctgtgaatcattgttgaatgatgaattgaatccataaagtaagaccacaaggataatgtaattatccccattttgcagaagagaaaatttagcttcagggtggagtttatttatttattttttattttttttgagacagagtcttgctctgtctcccaggctggcgtgcagtggcatgatctcggctcactgcaacctccgcctccccggttcaagcgattctcctgcctcagcctcccgagtaggtgggattacagatgcccgccactacaccagggtaatttttgtatttttagtagagacggggtttcaccatgttagtcagactggtctcgaactcctgacctcaggtaatccgcccacctcggcctcccaaagtgctgggattacaggcatgagccaccgcacccggcccagaatctactttcttaaggatgaactgtcagtagcattttggccccagtctacatgactctagagagaactgcttcttttttctctcgttgattaactgttcattccccatctgtgttgtgccaggggtttcattatgactgcatctgagaagttctagtgtatgaggcagatgttggctaaatggccagaggactgaatgtgaagggtcaggggagacaagggttgtgtaggagatcatgaagctgggagaccctatcctggggtacctgatgcatcagtgacgtctgggaggacatcctggaggtggtgctgctggagcagagacgagaagaataaaaagaattggtcgggcatggtggttcacgcctgtaatcccagtgccttgggaggctgaggtggacagatcacttaaggtcaggagttcgagacggtgaaaccccgtctctcctaaaaatacagaaattagctgggcgtggtggcagatgcctgtaatcctagctactcaggaggctgaggcaggaggatcacttgaacccaggagctggaagttgcagtgagctgagatcacaccactgcactccagtttggatgatagagtgagatcctatctttaaaaaaaaaaaaaaaaaaaaggttaactgaagatggggaaggggtgccctaggagtggggcacaacccagcaaacactccaaggtgggagggagcgcggtggggattaagacaggccacttctgtggccaaacactgtggaagctggggaggaccctgacctggctcaggtgttcacaggccccctctggctgtgtgtggggaacagrtggtggaggacaggaagagtagggagaccaggaaggggctgctgtgagagtcctgatgaggggacgaggtctggagctgtgggtcaggcctctgctgggtgcacaggactgagcctttgggccaccctgggcagctgaagctaaggggtgcgggtgttcataggcacctcataggcagtggcatctttgagcaggtttcataacaggcggttcaggtacacacagacctcccaggccactcaaggaaggtgttccagagtggagccactggggaatttttacattttctaaaattctttttctctttataaatatcacccatattcattgtttaaaataacagaacttcaaatttgtgaaaattctcaacagaaattctcagtgacgcttcatccggagrtaaaggccattcctattttgccatgttagcccagtggcttaggccagacacctcagggtgttccttgggcccgctctctccctcacccccacatccactctcatcaaatcctctcggctccacctacaaaaacttccctgaccctggtccagcctccatccttcccccaacctcgccatcccggcagcttcctccctggcctccccgctccccatctcagccagagggagcctgggaccacctgagtcaggccagggccctcctagctcagagccctgccctggtggcacttcgctccagataaaaaccaaagtctaggccaggtgcggtggatcgtgcctgtaatcccacccagtacattgggaggctgaggtgggaagatcacttgaggtcaggagttctagaccagcctgaccagcatggcaaaatgtcgtctctacttaaaaatacaaaaattagccgggtgtggtggtgtgtgcctatagtttcagctgcccgggaggctgaggcaggagaatcacttgaatttgcagtgaggcagaggtttccgtgagctgagatcacaccaccacactccagcctgggtgacagagcragactccgtcaaaaaaaaaaaaaaaacccaaagtctccagcagtcccttgtgtcttccactctccctctggctcgctccaccccacccgcaccacccactctagagcgtgaaggacatttctacctctggccgtctgcacctgccgttcttgctcatctttccagccttggctgaaacatcccctcttttgggaagcctaccctcccatgctccttaagcctcttccctgtcatatttttctccatagccatcctccagtgtttcataggtacctgttcctttgtttgtggttggccttctccctgcacaatgagcacagcctgagggcagagtgcgtctgtgtttacactgagtccccagcatgaggcccagctgggcccctgggagctcggaaaccaatgaatgaatgaatagtgggggcagaacaggaagagatgctctggggcctgaggttggggccagcttaggagagtcycagaggcccatcgaggagatgcrctgtgcacagggctgtgggcaaggcctgagctctgccggttggactctgtgactttggggcccttggcgatgttgatgccagcaagcggggaacttctggggacagaggcagcctctgggagcttggatgggggtgaggaaggggaggtggccagtgtacgtagctacttctcccttccgctgggctcaggagagaagagaaggctgcagtacaggcgagggagggagatgcgtttttcccagatggagacactgaagtccctgcacccagcacccaggcctccctggccagaccctgatccccacggagcccctcccctcacacaggtcattgaccacagtggygcccgccttggtgagtatgaggacgtgtcccgggtggagaagtacacgatctcacaagaagcctacgaccagaggcaaggtacgggcaggtgggcgtcgaggggtkcgtgggggccagagggagtatgtgcaggtatgagggcgggcaggttagacagggcccctgcagggaggccagtggtgtagacggggggccgagagcttgggaggatataggggtgaggctgggagtggggacagacggaggcctggggtgggaatgagggccgggaggtgtcaggggtatgggcagtcagacgtggtcgggggagggctgggaaagtggagggagttgaggggtaggtgtgggggctgggtgttgtcagggtcagatgggggcatggggcggtcggacggggtgtggagggcaggacaggtggaatgcgagtggacagggtggcggtcagtgagggcgcctgggacggatcgagtgttgggggagaccgggggcctcagggccggaggagggcggaggaggaaggcggatgatgaaggcagatgtgcgctgaaggggtgagagaccatgggtcctgtagtgaggggtgcaggcggcacccyttccatttacgattgtggagttggggggcctaggagtcctgggagaggctaaggctgtggtgggagacctggggcttgggtgacagccctttgtcacctggaagagagagttcctccgtgaacgtgggcccctcgtgggtggagcgtcatcctgttaggcccggccgacrccccaactgaccccagccccctctgcccacagacacggtccgctctttcctgaagcgcagmaagctcggccggtacaacgaggargagcgggctcagcaggaggccgaggccgcccagcgcctggccgaggagaaggcccaggccagctccatccccgtgggcagccgctgtgaggtgcgggcggcgggacaatcccctcgccggggcaccgtcatgtatgtaggtgcgtggctcgcgggcccggtcccrggctccagggctccaaggccgggaggaaatgttgggggcacagtggagcctcggagaccacgctctgcctaggggcgcggggttgggggggactcgaaacgatctcagtccctggaggtgacggaaccatctgccgacactgacggcccagagtgtttgtggagggaagtgggaggcgcaggcggagtgatctgtccagcgagggaggaagcagaagccagaggcacgcggcctgtgcgcttcgaagcgtggggcagtgtcagtcgcrgtggggaaacrggcggcgtgaccaaggcaggagtgagggaacacagggggctgtgtgagcccagaggaagcacctggaggctgggagcatctgaaggaaaggaggcagcagccaggtgaaaagggaggaagagttcccgccagaaggagtagcgggtgcaggtgagcagagcgcaggaggtccacctggggaaggggagcgggaggagaggggagaagtgtagtcaggggcatgggcagggcggcgtcacagtggagagcagtgtggatttttttaaaaagaacaggctaggcatgatggctcacgcctgtaaactcagcactttgggagaacaaggtgggaggcttgcttgagccccggagttggaggttacagtgagctatgattgtgtcattgcaccctagcctgggcagcagagaaagacccagtctcaaaaaaaaggctgggtgcagtggctcacacctgtaatcccagcactttgggaggctgagacaggaggatcacttgaacccaggaatttgagaccagcctgggcaacataatgagaccctgtctctacaaaaaaaaaaaaaaaaaaaatcccacaaaacttttgtcagttgtggtggtgagcacctataggtgccccagctacttgggaggctgaggtgggaggatggcttgagcccgggagttgaggctgcagtgagctatgatcgcaccactgcactgcagcctgggtgacagagggagaccctgtctccaaaaaaaaaaaaaaaaaaagatacacggggtacatatatgtattgttacatgggtgtgttgcctgctagtgggtggggaccgggcttctagtgtacccatgacccaaattgtgaacatcgtacccaacagataatttttcaaccctcaccaccctcctgtttctggcatccccactgtctggtatttccgtctttatgcctgtgtgtacccatcccccagtcgtcttcagccactaatttacgtctgtctctaatttgccgattctggatgtttcataggaataggatcatgcagtctgtggccttttgtaactggcggcttccactgagcagaatgctttcaagtttcatccgtggcatgcctgtgtcagtgccacactgttgccaaatagtcctgcattgagcgcctagaccacagtgtatccagtcaccagttagtggacattagggtcatttccactttttggctattatgaataatgctgctatgaaccttcttcttttttttttttttttttttctaatttgagacagcatctggctattgcccaggctggaatgcagtggcacaatctcggccatttcagccttaacctcttgggctcaagccatcctcccacctcggcctcctgagtagctgggaatacaggtactcatcaccacccccggctaaagttttgtggttttttttgtaggatgggatttcgccatgtggcccaggctggtctcaaactcttcccgctcaagtgatcgtcctgcttcagcctcccaaagtgctgggattacaggtgtgagccaccatgctcggcctgaacattcttttataaatttctgtgtggctgggcatggtggctcatgcctgtaattccagcactttgggaggccaaggtgggcagatcacctgagatcaggaattttgagaccagcctggccaacatggtgaaaccccatctctactaaaaattcaaaaattaactgggcgtggtggcgggtgcctgtgatcgcagctacccggaaggctgaggcaggagaatcgcttgagcctgggaggcggaggttgcagtgagccaagatcacaccactgcactccagcctgggcaaccatgcaagactccatctcaaaaaataaaaaatacatttttatgtggacatttgttttcatttctctgtgcctaggagtggaatccctgggccacatggtaacactgtgcttgacttttttgaggacctgccacactgcttcccacagccgctgcagcagttttcattcccgccagcagtgcagaagggtcccattttgtcctcatcctcaccagcactttagtctgtcttttgcttacagtcatccactgggtgtgaagtggaacatcatcatggttttgatttgcacttctttggcagctaatgatgttgagcatctttgcatggccatttgtgtatcttctttggagaaatgtctattcagatcctttgccttttgttttttgacacacagtctcactccgtcacccaggctggagtgcagtggtgctctcagctcactgcatcctctgcctcccgggttcaagcaattctcatgcctcagcctcccgagtagctgggattataggtgagcgctacaacacctggctaatttctgtatttttagtagagacagggttttgccatgttggccaggctggtctcaaactcctggcctcaagtgatccacctgagctggtggatctcccaaagtgctaggattacaaacatgagccactgcgcccatcggtatgtcggggtttggttttgttttttttcttttgagacgtaatctcgctttgtgcccaggctggaatacagtggcatgatctcagctcgctcgttccaacctccgcctcccgggttcaaacggttctcctgcctcagcctcccgagtagctggaactacaggcgcccgccaccacacccggctaattttttgtatttttagtagagacggggcttcaccgtgttagccaggatggtctcgatctcctgacctcgtkatccaccctcctcagcctactaaagtgctgggattacaggcgtgagccaccgcacccggccagtatgtcgtcttttgagaagtgtgtgttcatgtcctttggccatgatcgtggctcactgcagcctcaacttcctgttgcccactttgtaatgggattttttttttgcaaagtgggtgttctttgagttccttgtatattcttctgctcagtttttcattgggatgctgtcttttgtcgctgagttgtgtattagtttgctaacaaagtaccactcactgagcaacttaaagttatttctcacagtaatggaggctagaagttcaagatcaagctgtcagcaggttggatttattctgaagcctctctctctggcaaggcagtagtgccatcccccttaggtttttacaaagccctcactggctggtgtcttcacccagtgaatgggggacaggggtggaagcagggacaccagtgaagtggctaccatattagtcccggcaggagctggaggtggtcctagtggtagcaatagaggtagcaagaaatggttttcaccaagacaggcttctactcaatgggtaggcatggatccagggtgatcctgaaatttcatggggatttcttctatgtccagaagcttcacagggatttctcttctgttggcaggtctcacagatttcaagcctggctactggattggtgtccgctatgatgagcmactggggaaaaatgatggcaggtaacaagaattcccactcaggtgtctgtgtgtgcatttgtgtgtaagtccatgcgtgctgcttgctgagctgcccatgccagcttctagagtggagccatgtgagggtcctctgaccacacccacccctrtcctttcctgcagtgtgaatgggaaacgctacttcgaatgccaggccaagtatggcgcctttgtcaagccagcagtcgtgacggtgggggacttccyggaggaggactacgggttggacgagatatgacacctaaggaatkcccctgcttcagctcctagctcagccactgactgcccctcctgtgtgtgcccatggcccttttctcctgaccccattttaattttattcattttttcctttgccattgatttttgagactcatgcattaaattcactagaaacccagaaagtatttagaggacttcatgatttggggacccactgggtaaatagtggcccttcggtatcaggggccagcctctgtctcctcatatcttgctgttcccccatcttctcatcattcccacctcatctgctgtagctaccaggaagaaagggaagggaagggaggggatatcctttgcctttaaaaatgatgtacagccagctgggcacggtggctcacgcctgtaatcccacactttgggaggccagggcgggtggatcatgaggtcaggagatcgagaccatcctggctaacacggtgaaaccctttctctactaaaaatacaaaaaaattagccgggcatggtggtgggtgctgtagtcccagctgctggggaggctgaggcaggagaatggtgagaacctgggaggcggagcttgcagtgagccgagatcatgccactgcactccagcctgggcgacagagcgagactgtctcaaaaaaaaagatgtacaactctggctggatgtggtggctcacacctataatcccagcactttgggaggccgaggcaggcggatcatgaggtcaggagatcgagaccatcctggctaacatggtgaaaccccatctctacaaaaaataaaaataaaaaaattagccaagcatggtggcaggtgcctgtagtcccagctactcaggaggctgaggcaggagaatggcgtgaacccgggaggcagagcttgcagtgagctgagatcacgccactgtactccagcctgggcaacagagcgagactccgtctcaaaaaaaaaaaaaaaaaaagatgtacaactcagccaggcacagtggctcatgcctgtaatcccagcactttgggaggccgagctggcaggtcgcttaagcccaggagtttgagatcagcctggacaacatggtaaaacttcatctctacaaaaatgcaaaaaatgagtcaggtatggtggcgcatgcctgtagccccagctacttgggaggctgaggtgggagaatcacttaagcccagaaggtcaaggctacagcgagttatggcaccactgcattccagcctggatgacagagcaagaccctgtctcaaaaccaaaaaaaaagaaaagaggccaagcacggtggcccacgcctgtaatcccagcattttgggaggccgaggcgggagatcgagatcatcctggccaacatggtgaaaccctgactctactaaaaatacaaaaattagctgggtgtggtggcgcgtgcctgtaatcccagctactcaggaggctgaggcaggagaatggcttgaacccaggaggtggagattgcagtgagctgagatcgtgccacttcactccagcctggggacaagagtgagactccgtctcaaaaaaaagaaaaaaagccaggcatggtggcttatgcccataatcccagcactccgggaggccgaggagggcagaccacttgagttcaggagttcaagaacagcctgggcaacatggcaaaaaccctgtctctacaaaaaatacaacaacaacaaaaattagccgggtgtggtggcacgcacctgtagtcccagctacttggaaggctaggtggtaggatcacttgagccttgggaggtagaagctgcagtgagctgtgttcacaccactgcactccagcctgggtgacacagtgagactccatgccgtgacaccagcacgtggcgtgtcacattattaaggattatacagccaacagttactgggctggtttcctttaatcctcacagcaggccctgtccgcaagtctttcaccgtttcccgtcaacactccacctttcctgcccaaagtttggggttgggagggaattcccaggggttcccaggacttgggctcgcctcccagatcccgcaacctttgcgtgcctagcctcggcaatgaccgcccatctgccacgagggggcggcagcgcaccgttcagacgctgcgcccctggtgcattatgggtcgcgtagtctcaaaagtggcataagcatcctggaacgcaaacggcatttcccagaaaactacgcgacaatctgagcctggtcttgcccagagctggaagctgaggtctcgcccctcccggcgttgcgggggattgtgggatgtaggcatttggctccgcgctccgcgaagggcggtgcagcgcaggcgcgggcatccggtacagacagccgagcttaatctgaggcggggaaccagcgtcccgggggaggcgccgaagctgactttctggccgcagtggaagtgaggcgagcgagctcccttagtggctggagccggctgggcctccttcctgtcctcctgctttcctgcatctctacttgtccctttccccgggctcctggtccgctcccaagcctgttcaagcacgaggcgtttccatctaaaaaaagaaaagaaatctcttttgccgggcgagatgtcagagccccgggagcgaaagtgttggtaatgttagacagaatgagttcctcttcaaaaatctaacttccttgtcctttgctctatgaactgcccttcctgcagaaactgcccttaccggggaaactgcccctccccgccgctgcaacccataccccgcctctattagaaataggcaatcggaatcagcttagattgtgaggtccaaccctagccaacgggggttaaaaacccctgctctcctttattaggtgtgcttttggtacaggtctgggcagcacgcttctgcagaagtaaactttgccttgctaagaaacttttctccgagtgctggtctctctctgtggcaccaagaacttatttctaacagtaagaagaatttactgaggacagcgtaggcttgaaaaagaaaagttttactagaaagaatgctgccgggcactcacgcctgtaatcccagcactttgggaggccgaggcaggtggattgcctgagctcaggagttcgagaccaacctgggcaatacagtgaaaccccatctctactaaaatacaaaaaactaactgggcatgccagcatgtgcctgtagtcccagctacttgggaggctgaggcaggagaattgcttgaacccaggaggtggaggttgcagtgagctgacatcatgccactgcattccagcttgggtgacagaatgagactccatctcaaaaaaaaaaaaaaaaaaaaaaaatgaaggaaagaatgctgcaggccaggcagggtggctcacacctgtaatcccagcactttgggaggccgaggcaggcgaatcacctgaggttgggagttcaagaccagcctgaccaacatggagaaactactaaaaatacaaaattaggcgggcatggtggcccatacctataatcccagctacttgggaggctgagataggagaatcgcttgaacccaggaggcggaggttgtggcaagccaagatcacaccattgcactccagcctgggcaacaaaagcgaaactccatttcaaaaaaaaagagctgatttttttgtttgttttttagacagcgtcttgctctgttatccagcctgtgtgtgatcccggcggtgtgatctgagctcactgtagcctcaacttcccgggctcaagtgctcctcccacctcagtaggccccatgaatagctgagactacaggcacatgccaccacacccagctaatttctgtattatttgtagaggtggggtttcgccatgttgctcaggctggagtgcagtggcacaatctcggctcactgcagcctcaggctcctgggctcaagcaatcctcccacctcagtctcccaaagtgctgggattccaggtgtgagccactgcgcacggccaagaataaagattttaataaagtaatgtgaaattaacatgaaaagccaataaggaaactgggcaaatatttgaaaagacaatacataaaagaaacaccaatagccaaaaaaccatgaaagccaagttcacccccattcatatttgaagaatgttacataaaatattgagacaccaccttttgcctgtcaaatcaggaaagatgtttatttttattttttatttttgagacagggtctctctgtcatccaggctggagtatggggcacaatttcgtctcattgcaacctcaaactcctgggctccagcgatcctcccaccccagcctcccaagtagctaggagcacgggcacaccactatgcctggctaattttttcaaaacacttttttgtagagatggagtcttgctatgttgcccaaactggtctcaaactcctgagctcaagtgattctcccacttcagcctcccaaagtgctgggattataggcataagccgccatgccacaaaattttacaagaaaatttcagccagcatttgacaagattccaggggacatgaatgaaatacctaaagataaaagagttccttgaggccagttaaggtggctcatgcctgtaatcccaccactttgggaggccaaggcagtggatcacaaggtcaggagttcaagaccagcctggccaatatagtgaaaccctgttttactaaaaatacaaaaattagcctggcatagtggcgggcacctgtaatcccagctactcaggaggctgaggcaggagaatcgcttgaacttgggaggtagatgttgcagtgagctgagatcacagcaatgcactccagcctacagagcgagagacccctctcaaaaaaaaaaaaaaaaaaaaggagttccttgacaaaagaaatgtggaatttgctgccttgaactaagttaaattagctgctttgttgcaggaattttcgttaatatgctagtccatgataacctgtataaaaggatcctcttgggcattactttctgggttttttgtttgttttcagaaacagggtcttgctctgtcatccaggctggagtgtcatggtgtgatcatatatcatatctcactgcagcctcgaatttctgggctcaagctatcttccagcctgaacctcctgagtagctaggactgcaggtgtgtgccaccatgcccagctaattaaaaaacttatttttgtacagatgaggtctcattatgttgcctagagtggtctctattcctgggctcaagaaatcctcccctctcagcctcccaaagcactgagataacgtgtgtgccactgtgcttggcctgaattttttattttaaaatacattttgtgagctgtgcttagtaatgcacacctgtagtcctagctacttaagaggctgaggcagggggatcgcttgagcctaggagtttgagaccagcctggacaacacaggaaaaccccatctttacaaataatcaaaaaattagccattactcgggaggctgaggcatgagaatcgcttgagcctgagaagttgagctgcagtgagctgtgattgcaccactgcactccagtctggctgggtgacagagcatgaccctgtctcaaaaaaaaaaaaaaaaggaaaaaaaattattcaacaacagttgttaaagcacaggaagggctgggcacggtggcttccgcctgtaatcccagcactttgggtggctgaggcaggcagatcacatgaggtcaggagttcaagaccagcctggccaaaatggtgaaaccccgtctctactaaaaacacaaaaattagctgggcgtggtggcccacacctgtaatcctagccactggagaggctgaagcatgagaatctcttgaactcgagaggcagaggttgcagtgagccaagatcacgccactgcactccagcctaggcaacagaacgagactccatctcaaaaaattaaaaaaattaaaaatagaataaggcacaggaaaggaaggctttattcagagccattacgatagagagaggggccacagtggcaggggcttgcagtgagggagacaggttgggctcaactccaaatactgcatggggaagtgggaattcatagcccaggatcgggtggggcgcagtggattgaaagttactaagaggaaacatcaggggtaagggggga

SEQ ID NO: 95149 - DNA, 13948 bp, Homo sapiens
gccagaaatctgaccaccaggccaaggaatgcctgcagtccaggattcctcctaagccgtgtcccatctgtgcaggaccccactggaaatcggactgttcaactcacctggcagccactcccagagcccctggaactcttgcccaaggctctctgactgactccttcttggcttagcggctgaagactgacgctgcccgattgcctcggaagccccgtagaccatcacagatgccgagctttaggtaactctcacagtggagggtaagtccgtccccttctcaatcaatacggaggctacccactccacattaccttcttttcaagggcctgtttcctttgcctccataactgttgtaggtattgacagccaggcttctaaaactcttaaaactccccaactctggtgccaacttagacaatactcttttatgcactcatttttagttatccccacctgcccagttcccttattaggccgagatattttaaccaaattatctgcttccctgactattcctggactacagctgcatctcattgccgcccttcttcccaatccaaagcctcctttgcatcctcctcttgtatccccccaccttaacccacaagtataagatacctctactccctccttggtgaccgatcatgcaccccttaccatctcattaaaagctaatcacccttacccggctcaatgccaacatcccatcccacagcatgctttgaaaggattaaagcctgttatcactcgcctgctacagcatggccttttaaagcctataaactctccttacaattcccccattttacctgtccaaaaactggaaaagccttacaggttagttcaggatctatgccttattaaccaaattgttttgcctatccaccccatggtgccaaacccatatactctcctatcctcaatacctccctccacaatccattattctgttctggatctcaaacatgctttctttcctattcctttgcacccatcttcccagcctctcttccctttcacttggactgaccctgacacccatcaggctcagcaaattacctgggctgtactgccgcaaggcttcacagacagaccccattacttcagtcaagcccaaatttcatcctcatctgttacctatctcggcataattctcgtaaaaacacatgtgctctccctgctgttcgtgtccgattaatctcccaaacctcgatcccttacaaaacaacaactccttcccttcctaggcatggttagtgcggtcagaattcttacacaagagccaggaccgcaccctgtagcctttctgtgcaaacaacttgaccttactgttttagcctagccctcatgtctgcgtgtagcggctgccactgctttaatactattagaggccctcaaaatcacaaactatgctcaactcactctctacatttctcataacttccaaaatctattttcttcctcacacctgacgcatatactttctgctccctggctccttcagctgttctcactttttgttaagtcccacaatkaccattgttcctggcccggacttcaatccagcctcccacattattccggataccacacctgacccccatgactgcatctctgtgatccacctgatgttcatcccatttccccacatttccttcttccctgttcctcaccctgatcacrcttgatttattgatggcagttccaccaggcctaatcgccacacaccagcaaaggcaggctatgctatagtacaagccactagcccgcctcttagaacctttcatttcctttccattgtagaaatctatcctcaaggaaataacttctcagtgttccatctgttattctactactcctcaaggattattcaggccccctcccttccctacacatcaagcttgagcatttgccccagcccaggactggcaaattagctttactcaacatgccccgagtcacaaaaactaaaatacctcttagtctaagtagacactttcactagatagggagaggcctttcctacagggtctgagaaggccaccacagtcatttcttcccttctgtcagacataattcctcagtttagccttcccacctctatacagtctggtaacagactagcctttattagtcaaatcagccaagcattttttccagctcttagtattcagtgacagactaatggtctattaaaaacacacctcaccaagctcagccaccaacttaaaaaggactggacaatacttttaccactttcccttctcagaagtcagacctgtcctcagaatgctacaagctacagcccatttaagctcctgtatagacgctcctttttattaggccccagtctcattccagacaccagaccaacttagactgtgcccccgaataacttgtcatccctactatcttctgtctagtcatactcctattcaccgttctcaactactcatacatgccctgctcttgtttacactgccagtttacacagtttctccaagccatcacagctgatatctcctcatgctatccccaaactgccactcttaactcttgaagtaaataaataatctttgctggcaggactatgctgaatctccttaggcactctctaatcagatgtcctaggtcctcccaattcttagtccttttatacctgttttgctccttttcttattccatttagtttttcaattcatacaaaaccgtatccaggcgatcaccaatcattctatacgacaaatgtttcttctaacatccccacaatatcacccctttccacaagacctcccttcagcttaatctctcccactctaggttcccacgccgcccctaatcccgcttgaagcagccctgagaaacatcgcccattctctcttcataccaccccccaaaaattttcgccaccccaacacttcgacactattttatttttcttattaacataaggcaggaatgtcaggcctctgagcccaagccaagccatcgcatctcctgtgacttgcacgtatacacccagatggcctgaagtaactgaagaatcacaaaagtgaaaaggccctgccccgcattaactgatgacattccaccattgtgatttgttcctgccccaccttaactgagtgattaaccctgtgaatttccttctcctggctcagaagctcccccactgagcactttgtgaccccttcgcccctgcccaccagagcacaaccccctttgacagtaattttccattaccttcccaaatcctataaaatggccccatccctatctcccttcgctgactctcttttctgactcagcccgcctgcacccaggtgaaataaacagccatgttgctcacacaaagcctgtttggtggtctcttcacacggacgcgcatgaaataaacaaataaagaaaatgaaagaaaaacaggacaggcacagtgggtcacgcctgtaatcccagcactttgggaggccgagacagatggatcacctgaggtcaggagttcgtgaccatcctggccaacatggtgaaacctcgtctctactaaaatacaaaaaattagccaggcgtggtgtcgtgcacctagtcccagctacttgggaggctgaggcaggggaatcacttgaacccgggaggcggagactgcagtgagcagagattgcgccattgcactccagcctgggtgacagagcgagacttcatctcaaatagaaaaaaaagaggctgggcgtggtggctcacgcctgtaatcccagcactttgggaggccgaggcgggtggatcacgaggtcaggagattgagaccatcctggctaacacggtgaaaccctgtctctactaaaaatacaaaaaaaaaacttagctggacgtggtggcgggcgcctgtagtcccagctactggggagcctgaggcaggagaatggcgtgaacctgggaggcggagcttgcagtgagccgagatggcgccactgcactccagcctgggtgactgagcaagactccgtctcaaaaaagaaaaaagaaaattaagacagtcaaaaccatagtattaacttgtttgttttgttttgttttgagatggagtctcgctctcttgcccgggctggagtgtaatggcgtaatctctgctcagtgcaacctccgcctcccaggttcaagtgattctcctgcctcagcctccggagtatctgggattacaggcacccaccaccacgcctggctaatttttgtatttttagtagagacggggtttcaccatgctggccaggctggtctcgaactcctgacccaggtgatccacccacctcggcctcccaaagtgttggaattactggcgtgagccacagtgcctggcccccatggtattaactttgtgttagagaatctgtgaatacttggtattttaagaatttgtaatatttaaggtaaactggcctattcaaataacaggtcaatcttgtaattccattgtaaaatgtggaattcagctggtgactaagacttacttgaaatctgtttatgtacagtttatgaattttttattcataaaagttatttaagaattgaagaaagagtcatctgtttatctggtaagtcagctttttttttttttttttctgagacagaatctcgttctgtcacccaagctggagtgcagtggtgcaatcttggctcactgcagcctccgtgcctcttgggttcaaacgatttttgtgcctcagcctcacaagcagctgggattgtaggcgcccatgaccacacctggttaattttagtatttttagtagagacagggttttgtcatgttgaccaggctggtctcaaactcccagcctcaagtgatccacctgccttggcctcccaaagtgccgggattacaggtgtgagccaccacgcccagccctacttgtggctcttaaatggaaaaacctaacattaaatttacaagcatagtttgaaagtgttaggggaatttaataatcataaaagccctctttaaaagagaccgtggctggaagcggtggctcaggcctgtaattccagcactttggaaggccaaagtgggcggatcacctgaggttgggagcttgagaccagcctggccaacatggtgtaaccccatctctactaaaaaatacaaaaatgagctgggtgtggtggcgggtgcctgtaatcccagctgctcaggaggctgaggtacaagaattgcctaaacccaggaggcagaaggtttcagtgagccgagatcacaccactgcactccaacgtgtacaacagagcaagactctgtctaaaaatataaattaaataaataaataaaagagattgttaaaaccttttacaagctgggtatagtggctcatgcctctaattctagcactttgggtgatagaggtaggaacattacttggaggagttggagaccaccctgggcaacatagcaagacactgcctcaaaaacaaacaaacaaacattgtctgctggctgggtgcgtggctcacgatgaggccggcaaatttcttgagctcaggagttcgacaccagcctgggcaacatggtgaaacccagcctctacaaaaaatacgaaaattagttcgagcatggtggtgggcgcctgtagtcccagccactcaggaggctgaggcaggaggatcgctgaacccaggaggtcgaggctgcagtgagctatgaccgcaccactgcactccagcctgtgcaacagagcaaaaccctgtctaaaaaaaaaagaaaaaaaagaaaagaaaaagaaaaccttgtagactaggccaggatctttcctggttgctaaaaccattaggacaactgtgctgcaccccgttgactgccagaattagagagctataaatagatatgatgtgtttcttagggtaacataaaataccgttttactcccaaagactttagcttgtgtttcctaaaaacaaggtcatttaatgtctcaacaaatctctgagaaagatcctgccttagccctcacgttacagatacggaaacaggctcggaggtgcaatctctggctgtgtagacagaacagggagttggaacacggccttmtgcgtttcctcactctcacataccagcgggcagggagagatccggggaggagttgcacttgcccccggcggaaatctccaaaaatctgcaaaaatgtattccctggtaccgctttgggctccggtgggaccaagcgaaattccgagaccgaaacggatgcgcgctgcggcccagggtgcgggtctggaccgcctcctccgtggtggacgaatccgaggagcaggactccccgcaacccagccccagccccagccccagccccgccgcgtccccagctgtcacgctgcgcgcagcgggtggggcctggggttcctggacagaggaggactacgcgtgtccttgggcggagaagggaggtgactccggcggaagaggacaaggcagaatgcaggcccttcgggtgaggcccccatgggctgggccggagccccccacccagaaaaccccgccctaatacgcgactctccaagtgcccccgcatctagggccttggaacgtgagccaccttcagggcctgggactccccgctaaacagcctgggtcccttcccccacaatccactcttcggagacaactggggacccccaccccggcccaaagccccgggtttgaacttgacatctcgggaacccttaacactggcctcacccgggccttctcaggcagcctggacgctcccggggacctccattccggtccccacgttcccgggacctggtttcctccctttaatccaggaaaccctcccccaacaaaaatctcaggacttaggccccccagaacaaagtccttctgggtcctctcccttccaggaccctctaggcagcccggtcacccccaggccagactccagggcgagtcccctcccaacccagctggcagttcgcgggtaacagaatccaagctattaccctcctcgcctttgggacgctcgctagggatggggctgtccccacgtccaggcctcagagagcggggtcccacttcaggacacccctccaggtgcctccaatacccgcccacctcccaccccgcaggtgtcccaggcgctgatccgctccttcagctccaccgcccggaaccgctttcagaaccgagtgcgcgagaaacagaagctcttccaggtggggggkcggggggsgtggggatccgacgcgccagccgggagcgcgccgagccggggcaggcggggcgcgctctaaggagcagccagcacccctttctcatcagacacccccacatccaggaggacaatgacatcccgttgtacctgaagggcggcatcgttgacaacatcctgtaccgagtgacaatgacgctgtgtctgggcggtgagcgcagggcccgtctgggctgcgggggaggcggggctggacccagagtargaggtggctggtttctgggcaggactgaccaggatctgggttgggggttggcgtttaggaagggggtcgagtactgagctggagtcaggcctgcagggaggggagtaactagggtttgggctcttgtcccaggacgggggctgggttagtggtggggctgaggcccagggaggagtcggggasaaagctcccagcccggtctagatcaaagccagggggctttacaataggagtccaatctgggaagggagctggagtccgaactagagctggrgtccaggctgggaaccagggagcctgaaggccttaaaagcctgggatgtccagggaggggattaggtctcattctgtctccaacgcttcccctttctaggcacygtytacagcttgtactcccttggctgggcctccttccccaggaattaagaccaagaagcctggggggcctgagagacttgaacaagtgtcaataaacgctggcctctgtgtgtgtctgtgtttgtgtccacccctccccaccaagcccatcctcccaccagccagggatctctgccctgtggactgcccactgcccccagccctcggtgcctcatgctggaccagggatactcctaggatgttgctacctctcagccctctgctgagtaccccaaacagcacccataggctccccctcgggacccggggacgtggggtggtgtcctcaagtgggaaggaagacactgagcatggtccatgacacaacagaggcagaggccaagtgtggatggagaagctgcaagaggggcaaacatggccttgggggacagggccaggagtggcattgagacctccctccagcccagactctggaagcagaagcagagatcactggggcttctgggtcctgtctcagcctccacagctcaggatgagacaaaaaatgccgacgagaaaaagacgaggaaatccacggatccagccctggggacgaatctactacctcccctgctccccaggacccagagcccgagccacccctcctctctcgggtcagatcaggaggcagatcccatagagatcagcaactggggcatgtttatttcctcctgggcctggcaggctgggagcagaatatagacaaaggcactggggcacctgggtctggcacggtctggagcttggccgcctgggtagcaaccgtgaagggtgtgccagggcgtgcagggactggagtcatcctcccaraactgararagggccctcggggcatggaggcatcacaagtgctaggcttggcacaggtacaggggagaggttacggagtgggtgtgtgcagggcctggtgggaatggggagacccgtggacagagcttgttagagtgtcctagagccagggggaactccaggcagggcaaattgggccctggatgttgagaagctgggtaacaagtactgagagaacaaaagcttgtgggtcagcaggccccasaaagatgtgactgcagacaggatcggccctgggagagaccgaggctccaggtgactcctatagcaaggcrgtgarggggcgggtctggggctccagttcaggaatacatagtcagctgcagccactggggagaggagggtggagagtgaggacagggaaccccaagagcaccagcccctttgccctcacccagggayggctggcaaaataggaggaaggggactgcagctcagagctggtatgaagggctgaggggtggggtcctcccaggcacccataccccaatatgggggtccttacctcctggatgttcacctggatttgtccagtgccatctttgtcaagagatttgaaggcacctggaggaggagatgcagaggtttggcggcagggaaggaaggagactggtttttggcataataacattacacaaatacatgggatgacaatcatagcagctggcacttcactgagtatttactgtgtgccaagcatggggtaaagtgctttccaggtattggctgatttaatccaactctgtgagataagtgtcattttaaaatgaggcacaggctgggcgtggtggctcacacctataatcccaacactttggaaggccaagatgggaggatcacttgagccgcccaggagttcgagaccaacctgggcaacagagacctcatctctgctttttaaaaaaactaaaaattaaaaacaggaaaaaaagaaatgaggcaggaagggaggggccatgccccaggtcacatagcaagaaagtgaagaaatcaggattggaatccaagctgttaccctcctcaataatggcctctgtgtactgatatcacctctgcccagccccagcctcctactgacatctatgctccatcctctccagttctaagcctaacaggctactagagggaggctctgcacactctacttcctgcccctagagtcttacaggtaggtccccacgcctgccctgaaacttgactccatgttccccacccacagggaatctagacatgatgactacactatctccgctcagttaccaccaccctcaggtgtccatacccacagcgtcctgcacaccctggctgcctttctttctttttttttttgagacagagtcccactctgttgcccaggctggagtgcagtggcacgatcttggctcactgcaacctttgcctcccaggttcaagtgattctcctgcctcagcctcctgagtagctgggactacaggcgtgcaccaccacgcctggctaatttttttgtatttttagtagagacggggtttcactatgttggccaggctggtctcaaactcctgacatcaggtgatccgcccacctcggcctcccaaagtgctgggattacaggagtgagccaccatgcccagcccttttttttttttttttagacggtgtctctgtggcccaggctggagtccagtggcaagatcatagctcactgcagcctcaccctcccgggctcaagtgattctcctacctcagcctcccgagcaactgagaccacaggcatgtgccaccatgcccggctatgtctatatacatatatttttttttttttgtagagatggagtcctactacattgcccaggctggtctcaaactcctggactcaaatgatcctcccgactatcagccttcttgctggtagatccagtggctatttcctggcccctcttatgtgacttgtggcatcaaccttgtctgtccactcccttcacctccctgctatctcacatacctgcttcttttcctctgttacttttcatgcattgtgggctctctggaggccaagggatctttttttctttttttttttttgagatggaatctcgctcttgtcacccaggttggaggctggagtgcaatggcatgacctctgctcactgcaacctccgcttcctgggttcaagcaattctccctccctaaacctcctgagtagctgggactacagacacgcccccacgcctggctaacttttgtatcgttagtagatgcggggtttcgccatgttggccaggctggtcttgaactcctgacctcaggttttacgcccacctcagcctcccagagtgctgggattacaggcataagccactgcacccggcctggaggccaagggattttttttttttaagacggagtctcgatctgtcacccaggctggagtgcagtggcagatctcagctcactgcaagctccgcctcctgggttcatgccattctcccgcctcagcctcccaagtagctgggactacaggcgcccgccaccacacctggctaattttttgtatttttagtagagatggggtttcactgtgttagccaggatggtctcgaactcctgacctcgtgatccgccctcctcggcctcccaaagtgctgggattacaggcgtgagccaccgtgcccagccgaggccaagggatctttctaaagccaaacctgaccctgtcctccctctgcctagaacctgccatggctccccaatgtctctggtagagtttgagcacccccaaacttggcacccacaatcctgcatgacctaatcatgctcactgctcctaccttctcttacttagctcagatctcagatagatccaagttcaaattctggctttacaacttcctagctgggtgactatgagcatgaaaatttgcctccttgaatcctaagttcctccttcacaaaataaggacagtaatccccacttcccagccatgtcttcagcattcagtacactaacactcagaaggccacatgcaatggctcatgcctgtaacaccaaagctttgggaggctgaggtaggaggattgctggagcccaggagttcaagaccagcctgggcaacatagcaagaccctgtctctacaaaaaattttaaaaattagccaggcatggcggtgtgtgcctgtactcccaggtattcggtaagctgaggcaggaggactgctggagcctaggagttgaggctgcagtcagccatgatcatgccactgcactccagcctgggcaacaagagcagcagactctgtctcaaaaaaatagaaagaaagaaatctaacaaaaagcatcagaagccccatcttctttcccttctaggcctttgcacaggctgttccctcagcctgcaacagtattccctaccttctcactaagttctctcctcatcccctcaggtctcaacgttccctctccagtgagccctccctgaccccttgggctgcatcaggttcctcctggattggatttgccctctaggcttccccaagcacaatctgagcacgctctgctcactcttcccctcaccagagccctagaccctcggcctgtgctgcccccatcacaacccatcactctgccctgagcttcccctctcccagccatcaccagtctgaactgtcactrtctggggacttgtgtctcctccaccagactgtgagctccatgagggcagaaactggaactgattcaatcaccactgtgcccctagcatcgcccacctcaaagtcaggcttagaggagaccttggtccatagaggtcataggaatccccacccaggaagacagctgggttgtcactcacggaacatggcgtccagcctgaccaagcagctgatgaagttgtcaaaatccatgttcccactttcatctgagtagcgtcggatgatcatgttatagagatgctcattcaggtggaaccctaagatggatgtagtccttcaggtgcgggggccacatggcccaacccactcccatgcccaggagtcaggcccagaccagctgagtagaggttttctcacccatcccactcccagccccagcatgtccctgccagccatacctgctgcctcaaaggcacctgggagttcactactgcaaatggtccctgatcggtcagtgtcgaactgtttgtatatggcctgtgaggacagagacattgggtccaagtgagcattgtggggcatagtgtctccatggcttgggggtctgggtgccagggatttcagaggtttctacacacctgccaccttttgatgttgttccacaagtacttgaattcctcaaagcccagcttgcctgtggtgtcgctctggtgggagggtgttaagaagagtgacagctacacccagatgcatgcatcacatgcactgtggacacgatggtgatacagcaagcagggcagccagggctgaaactccagctcccgcttggtcctagtcatatcacctggtgtgcggttttatttttcattttatccatacatattgtcacttacatttctaaatagggattctctttaaacataaccatgaggaattatattcaactactctaaagtacaaattccttgcctgaagagttgttaattgctcattcagaaaattcttaataggccacgcacggtggctcccgcctgcaatccagcactttgggaggccgaagcaggcggttcacttgaggtcaggagttcgagaccagcctggccaacatgatgaaatcccgtctctactaaaaatacaaaaattggccagctgtagtagcgcacacctgtaatcccagctattcaggaggctgagggaggagaactgcttgaacctaggaggtggagttagcagtgagccaagatggcaccaccgcacttcagcctgggaaacagagtgagactctgtctcaaaaaaaaaaaaaaaaaaagagaaagaaaagaaaattcttgacagtaactcaatttcataaaaatgttaggatatgtgaaaaacaagtgtgtgaccaggcatggtggttcatgcctgtaatcccagcactttgggaagccaaggcaggtggatcgcttgaactcaggatccacctgatgtccactcaggaacatcactttctcactaaatccttgggacaccagttctaccaggactatttccagagaagaaaacattcaaagctgaaaactctacccaagatcatagttaagagctaatgt

SEQ ID NO: 95150 - DNA, 22532 bp, Homo sapiens
gactcctgggtctaacagaggaagagagctggggtccctcactcccaggaccaagattttaggctcctggggaaggagggagcggaggcctggactcctggctctgagggaagctagggctggggcccagactccagggcctccaagtgtcaccagctcacccattgccatctggacttttcccgacccagaacattcagaaggccttcatcgcatccatggacctgtggaactgggatgaggcatccccacaggaagtgcctccagggaacaagctggcagggcttggtaggctgccgaggctgccacaacgtgtgtggggagggtgtccaggtggggcctctgctgaccctaaccccttatcgcctgcagaaggagccaaaktaggcttctgtttccctgatctggcactccaaggggacacgccgacagcgacagcagagacatgctggaaaggtggctgcgggctgggacccctaagtgctggagaagaagcggggaggctgggatcctagggcaaagggaggaggggggcgtgcctaggttcctgggactgggtggggaggggccgcgtgcttgacccctgagggtgaaggaaaagggggcgcggggtgctgaaatacgggctggggggccataactcccagtccctgacaagtagagactagagagtgggtagttgaggggtctctttcattgctcacagtcctccctaaactcaggtacaagctcatccctggcaagcttcccacagctggactggggctccgcgttactgcacccagaagttccatggggggcgggtgagtgtggggagaggcggtgggaggtggggactggggtcccgaggcaccggggctagaggtgtagactccctgatctttgaggactgagaacacctgcgccctcaaggtggcatgacctggatccgggtcagccgggccccaagtgccagggttgagagcttagaccctagagtttttgagggggcacctgggctcccctcactcgggatccgttactcctcacagagcccgactctcaggctcttccgtggtccgggractggacagacatggcgtgcacagcctgggactcttggagcggcgcctcgcagaccctgggccccgcccctctcggcccgggccccatccccgccgccggctccgaaggcgccgcgggccagaactgcgtccccgtggcgggagaggccacctcgtggtcgcgcgcccaggccgccgggagcaacaccagctgggactgttctgtggggcccgacggcgatacctactggggcagtggcctgggcggggagccgcgcacggactgtaccatttcgtggggcgggcccgcgggcccggactgtaccacctcctggaacccggggctgcatgcgggtggcaccacctctttgaagcggtaccagagctcagctctcaccgtttgctccgaaccgagcccgcagtcggaccgtgccagtttggctcgatgccccaaaactaaccaccgaggtgagagggccgcaaagactgcggggagggcgaagctggagtcctgagccgggacccaggcacctaagggggcggggcccgggagactgacagtgagggggcgggggcttagggaccaggggctcgaaggaggggccggtggcccgcactccaggtccttggggaggagagggctaagaaactggtagtcttatagggaccaaggggatgaggacccaggctcctggattatataaaacgaaagcgataaaggcccagattcctgggtctccgagatggggaggccaaactcctaaatctctgagactggggccctggacgcttgagtctccaaggctgactgttggatctcagagaagggggggcggatccccttctcgggtcctgggtcccgagttgggaggacccggacctctagatcattgaagtggtgtgatctagggccgggaagactgagtgtgcccctcccttcatcccgcaggtcccattcagctgtggcagttcctcctggagctgctccacgacggggcgcgtagcagctgcatccgttggactggcaacagccgcgagttccagctgtgcgaccccaaagaggtggggcagctcccctgcccagccaaatcctgccccgtctcttctagttcaatttagctccgcccaagggctaggttcaaccgcgtagccctcggccccgccgctccccggcccactcgaggccccgcccaacccttctcaaacccaatctcccgcctgtactcctgcctcaaccaacccagtctccaccgggctctgcgaggcctcgcccaggtctgcactgcacaccgcccccaggcccggccctccccactatcgccaagccccgccccttcccactccgaccgagcgggcctctgtcctaggtggctcggctgtggggcgagcgcaagagaaagccgggcatgaattacgagaagctgagccggggccttcgctactactatcgccgcgacatcgtgcgcaagagcggggggcgaaagtacacgtaccgcttcgggggccgcgtgcccagcctagcctatccggactgtgcgggaggcggacggggagcagagacacaataaaaattcccggtcaaacctcttcgcgcgtgctcctctgcagcattcttcccgctgatactgactacagcagctagggagcctaagtgtgcagctccacatgttggaatttggcctccccacctcggagacccaggcgtctgggccttcatctctttcctctcacatgatccagaggcctggatccttgctcgctaaaagactgcagtgtcttagtcctcttctccctgaagaccctgaagtgcgggccaccagccccaagtcccttaagctcccaggtccctaagccccgccccacgctgtcagtttccccggtcccgcccccttaggccccgcctctcgactccgccttcactccctccgcaatcttcgcggacctccctcctcggtggttagttttgggatgaggaaccacccacctccagtgctgcgcaatgatcaaaggagacccagactcagggagcctgccatgtgcccgccctgtgatgagagaggcaaagaaactaaacccaaagcccatagggcctactgtgtccctgccctgtgtcgggatttgtaaaggaatcagacccaatcatgagagtatatctgctgtgtccccttgaagagaagactcagaccctgaaaagggcttactgtgctgtgtgtcctcccagtgcaagggatcatcaaagaattaaaactagtgcttgcaccccaacaccactcactctttccccactccaagctggaggacacaggactcagacctacactgtaaagagagcctacgccattctgagagccactgagcccctaaagagagcctgctgtctgtgagcgatgcgggggatacagcagggaccaagacagccctggaccctccccttaaggagctcacagtccagtgggaagacagacccatcatcagagtgttttgacctgggatgagaagactccaggggactgagggaggccaaaaggagagacctgatctagcccaggaggagaagggtcaggggagactccctggaggaggagacagctgatttgagaagtcaggtaggcaaagaatgtttcaggcagaaggaacaacaagatsaaaggcccagaggcagacgatctcataccactgctcaaaactatcagtgtgggccaggcatagtggctcacacctgtaatctcagcactttggaaggctgaggcaggaggatgccttgaggccaggagttccagaccagcctgagcaacataggggagacccccatctctatttaaaaaattaaaaataaacgtggctacagcagcaacagggaccaattcataaaggatctgtgggccgtggtgaggagcctggactttgtctccagggctcctggggagccatcaagggttttgtttgtttgtttgttttttgagatggagtctcactctgtcactctggctggagtgcagtgatgcaatttcagctcactgcaacctccgactcccaggttcaagcaattctcctgcctcagcctcccaaatagctgggattacaggtgcacaccaccacgcacagctaatttttgtatttttagtaaagatggggttgcaccgtgttggtcaggctggtcttgaactcctgacctcaggtgatccgcctgccttggccacccaaagtgctgggattataggagtgagccaccgtgcctggcccccatcaaggggttttaagcagggaaagggatttggattttaggaagatctcattgcaggggatgaatacatgcatgtaaacaggtaattccacaaataatcacaatgttgatggacacagaatgtgtaagaagaggtccctgacccaattccatctggacactgcaccccagatggtatgtgagaggctttagaggccagatgggggaggaaggaaagcagttctctttcatagctccctctcctagtccctagatgcttccttcatttccacaagaaattcttgcattcagcaaatatttatagaccacttcctgtgtgccaggcactgctttagatacaatggtgaatgaataaggcagacaaaaattcttcctttatgataattcttttctgttgagggaggcaaaaagaggtaaacataatgtaaaagaacagatatagccgggcacggtggctcacgcctgtaatcccagcactttggaaggccaaggcgggcagatcacctgaggtcaaaagttcaagaccagcctgaccaacatggacaaaccgcatctctactaaaaatacaaaattagccaggtgtggtggcgcatgcctgtaatcccagctactggggaggctgaggcagaagaatcgctctagctcgggaggtggaggttgcagtgagccaagatcacaccactgcactccagcctgggcaacaagagcaaaactctgtctgaaaaaaaaaaaaaaaaaaagccaaattggccaggtagggcagctcacgcctgtaatcccagcattttgggaggccgaggtgggcagatcacctgaggtcaggagttcaagaccaacctgaccaacatggtgaaatcccatctctaccaaaaataccaaaattagccgggagtggtggcgtgcgcttgtaatcgcacctactcgggaggctgaggcaggagaatcgcttgaaccgagtagacgcaggttgcagtgagccaagttcgtgccactgcactccagcctgggcgacagagtgagactccgtctctctctctmtatatatattttaagggtagggatttttgtgttttgtgcagcgtgctttctcaacccgtaaagtgcctgatggctggatacggtgggtcacgccggtaatcctaacgctttggaaggccgaggcgggaggatcgcttagagaccaggagttcgagtccagcctgggtaacacagcaagaccccatctctataaaatgcatatatatatccaggagtagcggtgcgcatctgtaatcccagctactcgggaggatgaggcgggagaatcgcttgaacccaggaggcggaggttgcagtgagctgagatcgcgctactgcactccagcctgggccatagagtaagaccctgtctcaaaaatttaaaaaaaagaaaaaaaaaatttaaagaaaagaaatacctgacacagaaaaagcgttcaataaatatttcttgcatgaataaaagtactttcgctgggacatttttctccacacctaccctccagccagccccgggatctataacactctctccgagtgaagacacagaggtgatgagatcgggtaacccacgggcgcccgagccccagccgcgcaagctcacgattgggccagaagtgaggatgaacaagcatttagcccaatagaaagtcgtagttctcttgctgggcgtggcttgaatgacttcagtggcctcctcctgggagggagctgaagccgctcgcaagactcccgtagtccccacctctctcagcttccggctggtagtagttccgcttcctgtccgactgtggtgtctttgctgagggtcacattgagctgcaggttgaatccggggtgcctttaggtgagtgtggagggttctgtaacctgggaccccagtctagcgggctgaggagccggaccccagcttccctgagaacgggttgaggcttccggctggcggcgtccggcctccctggaccccggggccctgttctgttcatcgtaagagctaacaatkatacggttcttccttgatgccaggcaacatcccaaacaactttaattaatttatttaactctcccaccagccctatgagatagggcctgcgattatccccttttgtcagtaaacaggctcagagataccaagcgacctagctgaacctacacagcgaccaggatttggcccaggagtttgtcctccagggctcttcatggctaattcacaggcgtggcctctcgcggcttgcctgggccgcagcctggctcccgggtgtccagtccatcctcccttttggacgttggaggggccgcagcgtcatctccgatgcaccctcatcctcagataccgggtagagatctcgccggtaacgatccttcctactgcgtctgtgccccagcagctggtgttttacaccccacttccccaccgaaagactgttttagtgctccagacccccaccaccaccttgcgtcgcttgaatttgacactgctctgcaagtctctgtatagccccacgactcctaggattccctggaatatagatacttttctctcaggctcccgacgaacactgtcacttcttcagagacattatattaaaggtgtttaaccctgggtccgcagagttggtagaattcaaggaatgctagtacttgaattggggtggggggtggaattgcatctgtgtttttactaaccttttgaggcagcaacctcggtagtactagcagcagcggtgattttgttagcaatgaaaatcatagacattccttttttttgtttttctccttttttgagacagggtcactgtgtcacccaggctggcgtgcagtggagaaatcttggctcactgcaacctctgcttccctgtgcaagcgatcctgcctcagtagctgggaccacaggcacgcgccaccacacctggctaattttaatttttttttttttttttgagacaagatcttgctgtatcgcccaggctggagtacaatggcacaatctcggctcactgcaacctccgcctcttgggttcaagtgattctcctgccccagcctccctggtagctgggattacaggtgcacgccaccatgcccagctaattttttgtatttttagtagagatggggtttcaccatattggccaagctggtcttgaactcctgacctcaggtgatccacccacctcggcttcccaaagtgctgggattacaggcgtgagccacctcttccggccaattttaatattttttttgtagagatgagatggggtttcaccatgttgcccaggctggtcttgaactcctgggctcaagcgatcctcccacctcagcattccaaagtgctgggattacaggtgtgaaccattgtgctccacccaaaatcacaggtattcttataccacattataacagcaaatgtcacaaaatactatattcattcatgattacttcaaaattgtatttttttttttttttgagacagtgtttttgctctgttgcccaggttggagtgcactggcacaatctcggctcactacaacctccgcctcctgggtttaagcgattcttttgcctcaacatccagagtagctgggattataggcacctgccaccacacccagctgatttttatatttttagtagagccagggtttcaccatgttggccaggctggtcttgaactcctgacctcaggtgatccacccccctggcctcccaaagtgctaggattacaggcgtgagccaccgcacccggcgaaaattgtattccttaatgaatcctcagctggatataactgcttttctttgtgatgctgtgcaggtttttttcacttcatgtactcatggagcctatgcaatttttaaatacatttaaacatattcaggccgggtttggtgtctccgttctgtaatctcaacattttgggaggccaagccgggcagatcatttgaggtcagaagttggagagcagtctgaccaacatggtaaaaccttgtctaaaatacaaaaaaattagcagggcatggtggcaggcgcctgtaatctcagctgttcgggaggctgaggcaacagaattgcttgaatcttggaggcggagtttgcagtgagcctaggtcgtaccagtgagcctgggtgacagagcaagactctgtcttaaaaaaagaaaaaaaaaaacattcagcgagaggtttctgggattcatcagactgctgaggagtttgtggcaccaaaaagattaagaatctttgcagtgtagattatgccaacaacggaggcagcccaccagttatttttatgccgtttaaccgtaggaagtcacttagacaccctgttccttcctcgtctgggcaatggtgatagtaatagttcctaccttttagagtggctataggagtaaagtgtgtagaacagcgcctggcatgtagtaagcactcagtgagtgttagctcatgttatttggggaccaggcttgattttgctgaggagttgtaccccaaccctgccgcgacctcgacactcagatgtgtggattcgccctgcccctcatctctgtgtatgttgagaggcaggaacttgttcacacccagcccrttgttccgtgcctgccctcttccattgatcctgggtagtctggcttgctcagggcccctggggcccctgctgacacccactcctttcgcctccaggattcagcaccatggcggaagacatggagaccaaaatcaagaactacaagacygccccttttgacagccgcttccccaaccagaaccagactagaaactgctggcagaactacctgggtaagcaggacctttccctggccacatacctcgagtcactcaccgcttgcctcttcctaggggacccatccaccccagcctcctcccttttattctgaacatccttactctggaaggcccatgcctctcatcacctgctgttcaggtccaggctagggttacaaactttagttcctgcaatgattttttttttaatttaaattttttattattattatggtttggttttgtttttttccagagatggggtctcactttgtcacctaggctggagtgcagtggtgcaatcatagctcactgcagcctcaacctcctgggctcaagaggtccccctacctcagcctctcgagtagctgggaccacaggcccacactactgtacttggctaatttttttgtagagaagaggtctcagtttgttgcccaggctggtctcaaactcttggcttcatgcgctcttcctgcctcagcttctcaaagtgttgggattataggtgtgagccaccgtgcctggcccctacaatgatttttttttaagctgtatgtgtgtgcgtactgtaacatgtacagaaagcacataacaaacatgtacagctaaatgaataattctaaagtgaaccccttgtgcaaccataacctggagagaaaagcagacattgcccacactctcatctccctgccttcttttttttttttttgagatggagttttgctcttgttgcccaggctggagtgcaatggtgcaatcttggctcactgcaacctccgcctcccaggttcaagcaattctcctgcctcagtcccccaagtagctgggattacaggcacctgccaccacacccagctaattttttgtatttttagtagagacggggtttctccatgttggtcaggctggtctcaaactcctgacctcaggtgatccacccgcctcggcctcccaaaatgctgggattacaggcatgagccaccgcgcctggcctccccaccttctttatgtcctgtctggaacacagcaccccgctctccccagtagagaagtgacgccactaactgggggttatcacatctttgtttttggttttggtttttgtttttgagactgagttttttgttttcgttgcccaggctggagtgcaatgtcacgatctcggctcactgcaacctcttctgcctgctgggttcaagcaattctcctgtctcagcctcactagtagctgggattacaggcacccgccaccatrcccagctaattttttgtatttttttttttttttagtaaagacaaggtttcaccatgttgatcaggctgatcttgaactcctgacctcaggtgatccacccacctcagcctcccaaagtgctggaattacaggcgtgagccactgtgcccggcctcacatctttgttttttaccaccatgtttattattttattttattttatatatgttatgttgttatgttattgatggagtctgtttcttgttgcccaagttggagtgcaatggcacgatctcagctcattgcaacctctgcctcccgggttcaagtgattctcctgcctcagcctcctgagtagctgggaatacaggcgctcgccaccacacccagctaatttttttttttttttttttttgagacggagtctcgctttgtcgcccaggttggagtgcagtggtgcaatctcgactcactgcaacctccgcctcccagcttcaagcacttctctgcctcagcctgccgagtagctgggattacagtcgcctgccaccatgcctggctaattttttttttttgtatttttagtagagacagggttttaccatcttggccaggctggtcttaaactcctgacctcgtgatccacccccctcagcctcccaaagtgctgagattacaggtgtaagccaccatgcctggccaattttatttatttatttgagacagagtctcgctctgttgcccaggctggagtgcagtggtacaaccttggctcactgcaacctccgcctcccgggtttaagcaattctcctgcctcagcttcctgagtagctgggactacaggcgcgtgccaccatgcccggctaattttttgtgtttttagtagagacaggatttcaccatgttggccaggctggtctcgatctcctgacctcatgatctgcctgcctcggcctcccaaagtgctgagattacaggcgtgagccaccgtgcctggccaattttttgtattttttttttttttttgagatggagtctcgctctgtcgcccaggctggagtgcagtggcgtgatctcggctccctgcaagctccgcctcctgggttcacaccattctcctgcctcagcctcccgagtagctgggactacaggtgcccgccaccgcgcccagctaattttttgtatttttagtagagatggggtttcaccgtggtctctatctcctgacctcgtgatctgcctgcctcggcctcccaaagtgctgggattacaggcatgagccactaggtccagccacttttttgtatttttaatagagacagggcttcaccatgttgtccaggctggtctcgaactcctaccctcaagtgatccacctgccttagcttcccaaagtgctgggattacaggcctgagccaccatgcccggctaccaccgtgtttagattcacctctttgtgaactttatacatactgtgtgtattcttttgtgtttggattttttcattcagtaccttctcagatccatacatgctgtggcatatagcttgctcattttcattgctgtccagttttctacaatttattctatgcctgtacacttgtgtgatttccattttggagttcttacaaatggtgtggctgtaaacatctttataaatgtaattttgctgggtgcagtggctcacgcctgtaatcctagcactttgggaggccgaggtgggcagatcaagaccagcctggccaacatggcgaaaccctgtctctactaaaaatacaaaaattagctgggcatggtggcaggygcctgtaatcccagctacttgagaggctgaggcaggagaatcacttgaacccaggaggaggtagaggttgcagtgagctgagatcgcaccactgcactccagcctgagtgacagattgagaccctacctcaaaaaaaaaaaaaaatgtgttccaactcttgatctgggctgacttgaacccctttcttcacagacttccaccgctgtcagaaggcaatgaccgctaaaggaggcgatatctctgtgtgcgaatggtaccagcgtgtgtaccagtccctctgccccacatcctgggtatgtgcctcctgccagggcccttgggatgctggggtggggtcttagcagaggggagtgtggtggcttggtgggagctcatctgtgaggggcagagggaggacagggcaccacactgtcccaggactcagtgcctttcctcccgcctagaattacctccctgtctccttctgctgatgcctctcaaccagtcagggctctcagctgaggcgaccagggtgctttgctagatgtagctcactcatgcactctccaaatacacactcagcactgggctcccatccctgtgtagctcacaattctgtgcagtcctgtccttttttattaggaacatttttttttctttttttttttctttttttttttttagacaagggtcttgctgtgttgccaggctggaaaggctggagtgcagtggcgcgatcttgcctcactgcaacctccgcctcctgggttcaagcgattcccctgcctcagccttccaagtagctgggactacaggtgtgcaccaccatgcccagctagttttttgtattttaatagaaacggggtttcaccatgttagccaggatagtctcaatctcctgacttcatggtccacctgcctcggcctcccagagtgctgggattacaggcgtgaaccaccgtgcccggccctattatgaacattttcaaagcagagataataattcattgacctcaaatacatccatcacccaaagtgaatagttatcaggatttatccacggtttcttcatctaccccttttcgttttcttctttcctttgctgaagtattctaaagcaagtcccagacacgtcatttcacccctgcctacttcagtgtggacttctaaataatgacacagtaagacagtcctttcagccctgatctgaccaaatctgtcgtcaatatttaatagctctttgctatgcccctgccctttgtttaaaaaaaaaaaaaagtttttaaagacaaggtctcatgatgttgcccaggctagactcgaactcctgggctcaagtgttcctcctgtctcagcctcctgagtagcttggactacaggcatgtgccactgtgcctgtctctctctctctctctctctctctctctctytttgtcgccctctcgctctctcttgctctctttctctctcgctctctctttctcactctttctctctttctttcctttctttcttttctttcttgagccttgctctgttgcccagactggagtgcagtagcatgatctcagctcactgcagcctcagcctcctgaatagctgggactacaggcatgagccaccacacctggcccaatttttgtattttttttgtagaaatggggtttcgccttgttgcccagactgktctcgaactcctgagctcaaagcagtctgcctgcctcagcctcccaaagcgctgggattataggcatgagctaccgcacccagctgaatctttcaaaataaaaaaaattaccctttaacttggcaattccacatctagggatgctacaaaaatcttcatgtacaaagatgcccattgcagagttgttcgtaatggagaatatttggaaataacccaagttaaaacattgatcttgatagtctttatggagactatggtgatctacatgctagcacacagaaagaatgctaagacacaggaaaagtaagttgcagaacaatctatatagtaggagtcaatttgcaaggatggagtttttatggtgtggtrtgtgtatgtaaataaagtaggcacataccgctggcacttattatgggccagctatgttgttagacctttttttttttttttttttgagatggagtcttgctctgtctcccaggctggagtgcagtggtgcaatctcagctcactgcaacctccgccttccaggttcaggcgattcccctgcctcagcctcccgagtgtctgggattacaggcgcctgccaccatgcccagctgatttttgtatttttagtagagacagagtttcaccatgttggccaggctggtctcaaactcctgacctcaggtgatgcacctgcttcggcctcccaaagttctgggattaccggcgtgagccaccacgcccagccatgttagcactttacatcacataaggtcaacatgctaacacaaccgtatgaggtaggtactattgttagtatcctcattttacaaaattggaaactgaggcccagaaaggttgagtaacttgcccaaagtcacacagctaggaagtgatggagcagggattcagattcagcctctctgttatccatgctttcatccactgttcgttcttgcaccagtggtcctcaccctttttggcaccagggatgagcttcatggaagacagtttttccacagacagggttggggatggtgtaaggatgagtccagcatattacatttattgtccactttatttctgttattattacattatataataaaataattatacaactcaccatactatagaatcagtgggagccctgagcttgttttcctgcaactagatggtcccatctgggggtgatgggagatagtgacagatcatcaggcattagattctcataaggatcatgcagcctagatccctcacatgcgcagttcacaatagggttcgcactcctaagagaatctaatgctgccgctgatctgacaggaggtggaactcaggcagtaatgcgagcattagggagtgcttgtaaatatagttgaagcttgtctcgctcacctgccactcacttccagctgtggggcccagttcctaacaggccacagaccagtacctggtaggcactggttggggctcggggacccctgccttatagcataaaatgtgagcgtgtatgtatataaaaacgtttatgcttgtaactgcttgtgaggtccacaaagagtagagtgttactttcagggagtgttaacttgacataggccttatatgggccttttcattttttttttttttttttttttagagacagtcttgctctgtcaggctggagtgcggtgtgcagtggtagcatcatagctcactgcagcctcgaactcctgggttcaagcagttctcccacctcagcctccctagtagctgtgactacaggtgcatgccaccatgcctggctaagttttgtattttttgtagagacagggttttgccacattcaccaggctggtctcaaactcctgrgctcaagcgatcctcccacctttgcctcccaaagtgctggaattataggcgtgagccaccatgcccggcttattttttattttttgtagagatgggggtcttgccgtgttgtccaggttggtctcaaactcctgagctcaagcagtcctcccacatcggccccgcaaagtgctgggatgacaggtgcgagtcaccacacccagcctccatcattgtttatactgagcatcgcctgtggtcagtggtgggattgcactgtgtattgtttggcaccttttttgcacttgactatgtatcttgaagatccatccattcatgccagaacataaatcagcctcgttttttttcacagctgcctgctattccatctcccctgtttggacaaacagcatagtgttgacttgaggttttcaaagcagggcccacccttggagctctgtacagtgacacatctccccatcgacagctctgcagtgggcctggggttttcctgcccattactctcctcccagcatgtcagcttgttcagaacagtgatttctgtcttttggggtcactgctgattccccggcctctagaatagaggttggcacacagcaggtacctgtggatattggttgaacaaacaggtgggcaaagtgaggaagataagaagtccatcygttcagtttccccactgcggagggaataacactgtctttccacaggtcacagactgggatgagcaacgggctgaaggcacgtttcccgggaagatctgaactggctgcatctcccttwcctctgtcctccatccttctcccaggatggtgaagggggacctggtacccagtgatccccaccccaggatcctaaatcatgacttacctgctaataaaaactcattggaaaagtgagactatgcgtgtgaacgggccaggcagtggcaagaagctgggctggaatcagtgccctgaccagggaggggcttgartgagtattttctctgttttgtttttatttatttaatttaatttaattttttttttttttatgatggagtctcgttcttcacgcaggctggagtgcaatggcacgatctctgctcactgcaacctccacctccagtgttcaagcgattctcctgcctcagcctcccgactagctgggactacaggcacaccccaccacacctggctaatttttgtatttttagtagagatggggttttaccatgtcggccaggctggtctcaaactcctgacctcagatgatccacctgcctcggcctcccaaagtgctgggattacaggcatgagccaccatgcctagcgttttttaacttaattttattgaaccttggccaccctctctgtgccagtcaatgagtcaaatagttgattatacagaataacctaagttcctatgtgtgcaaccaccctacataattttaaagcaaattatatagattataatataatataaaatacataaagattatattttatccagaaataagaaactatatgtatctcttggagatacaatttttttttttttttttttgagacagagtctcaatctgttgcccaggctggagtgcagtggtgtcatctcagctctctgcaacctctgccttctgggttcaaactattctcctgcctggagatacctatttttttaacataattatttacacctaagaaattagttcttaatggccgggcacagtggctcatgcctgtaatcccagcactctgggaggctgaggtgggcagatcacctgaggtcaggagttcaagatcagcctgggcaacatggcgaaacctcgtccctactaaaagtacagaattagccaggcatggtagcacatgcctgtaatcccagctactcgggagtctgaggcaggagaatcgcgtgaacctgggaggcagaggatgtggtgagccgagatcatgccattgcactccagcctgggcaacaagagtaaatctccgtctcaccaaaaaaaaaaaaaaaaaaaaaaaagagttcttaatatctaataagcaatctcctgcacaatgtgtaacttctccccgtgttgggacctgctctttcatgctgatcatgatggtagttggaagtcatttaagtaggccaagttgagagctgttcttcatggtgcccccaaaagaattgccacacaataacagcccagaatatccccaacagactcgtcaacagggacctagctagcatgaccagccggaacactcttatggctgaattggtgtgtcctcaaaacctttcaaatggccggggtgtggtggctcacacctgtaaccctagcactttgggaggcccaggcgagtgggtcacgaggtcagggattcaagaccagcctggccaagctggtaaaaccccatctcttctaaaaatacaaaaaaaactataaaaatacaaaaattagccaggtgtggtggtgcgtgcccctaatcccagctactggggaggctgaggcaggagaatcacttgaacctgggaggtggaggttgcagtgagctgagatcacaccactgtactccagcctgggcgacagagcgagactccatccccaaaaaacaaaaacaaaacttcaaatggttacaaacttgtctgatgcattcacatgagcagggatgattcttgtatggagaaaaatggccccagagatagatcttgtgaaatagctgctcatgaagaaaagtggctgtaggggccgggcgcggtggctcacgcctgtaatgccagcactttgggagaccgaggcaggcagataacctgaggtcgggagttccagaccagcctgaccaacatggagaaaccccgtctctactaaaaatacaaaatgagccaggcgtggtggtgcatgcctgtaatcccagctactctggatgctgaggcaggagaattgcttgaacccaggaggtggaggttgctgtgacccgagattgtgccattgtactccagcctaggcaacaagagcgaaactccgtctcaaaaaaaaaaaaagtggctgtaaacaggaccttagtgcacacacagggagcttgagggatcgtgggaggttatggcgtgggttggaagtagcaaagaacttaaacaccatgaaaaaaaaattttttttttgaaatggagtcttgctctgttgtccagactggagtgcagtgatgtgatctctgctcactgcaacctccacctcccggttcaagcaattctgcctcagccttccaaaacgctgggattacaggcgcttgccaccacacccagctaattttttgtatttttagtagcgatttagagagtagtttcaccgtgttgaccaggctggtcttgaactccgtgacctcaggttaaccatccacctcggcctcccaaagtgctgggattacaggcatgagccaccacacccagccaacaccatgaaaatttcaaatgaaacaggacggccagtgaaaagtcaaggtgctggactccttgagtccagctgcctgattctgcccagggtttgccaccagtgccagtgtttcctgtacattcctttagagatagctcatgcatctagaagtatttgtaaatatattgatctgattggatatggtgcccttttgctcacacagcccctgccacactggcctcttcagtgcacaggaactgtgagcaaatgtatttcgacacaccaggctggctccaaccccggatcctttacacttgctgtttgctcgacctggaatgtttggccaccagctgtccacaagctcacccctcactgccttcaggtcttcatttagcgaggccttctctgaccactcagccttcaccttcagctcctccatctttgtgccccttcactccttttgtttctttctcttttttcaatttttatttatttttttagtttttggagatggagtctctctgtcaccaggctggagtgcagtggcgcaatctcagctcactgcaacctcagactccctggttcaagcgattcttctgcctcagcctcccaagtagctgggattacaggcacgcgccaccacgcccagctaatttttgtatttttagtagagacggggtttcaccatgttggccaggatggtctccatctcctgactttgtgatccacccagctcggcttcccaaagtgctgggattacaggtgtgagccaccacacctggccttgtttcttaagcacttaccgctaacatgccaaatgttatccttcatcattgcaccactggaatgtaatttccatgcgggcagatttggaaatatatatttaattccccttttcagctttttttttttttttgagataaggtcttactctgtcacctaggctggcatgtagtggcgtaatctcagtttactgcagcctccgccgcccagactcaagccatcctcctacctcagcctcccaagtagctaggaccacaggcatagaccaccatactcagctagttttttgtttgtttgtttgtttttgatagagacggggtttcaccatgttgcccaggctggtctcaactcctgagctcaggtgatctgcccgccttagcctcccaaagtgctgggattacaggcctgagccaccgcacgccagcctgcattttttccaaatgttctaatctttctcattttattatttttttttttttaattttttttttgacacaagacctcactctgtcacccagcctggagtgcagtggcctgatcacagcttactgcagccttgaactcccaggctcaagagatcctcccaccccagcctctcaagtagatgggactacaggcatatgccaccacacccagctaatttttgtattcttttgtagagatggagtttgcccatattgcccaggctgatctccaactcctgggctcaagtgatcctcccgcttcagcctcccaaggtgctgggattacaggcatgagccaccacacccagcccagctgttaatcttattgatgattaattatacgtgatgggtcacttgtcagttgctgctttcaaggttctctttttatcgttcaataatttgattatgatatgtctggtgatggatatctttgagtttatcctatttgaagattattgagcttcttggctctagattgatggtttttttcatcaaattttgggagttttcagccattctttcttcatatattcttttttacccctttctttttgtcctctccttctgggattcccattatttgatgatgtctcacaggtctctgaagttctgttcacttatcttcgtgcttttttctttctgttccttagacttgatcatctcaactgatctatactcacgttcaccgatcttttcttctgcctactcaaatctgttgttgaaccctctattcctctattgaattttttcttttttttttttttttgagacggagtctcgctctgtcgcccaagctggagtgcagtggcgcgatctcggctcaccgcaacctccacttcccgagttcaagtgattatcctgcctcagcctcctgagtagctggtactacaggcccataccaccatgcctgattaattttgtgtatttttagtagagacagggtttcaccatgttagccaggatggcctcgatctcctgacctcgtgatctgtccacctcggcctcccaaagtgctgggattacaggcatgagccaccacgcctggcccatttgaattttttcattttagttactgtacttttcaagtcccaagtttctgtttagttcttttaaaataatttctgcttttaggccaggcatggtggctcacacctgtaatcccagcactttgggaggccaaagtgggaggttcacttgaggtcaggagttcaagactagcctggccaacactccatctcaaaaaaaaagacagtattctttagcattagttccgctaatgattggacaaagatttccttagcctccaaaaaccaataatctcctagcctttgctgaggcatggtgggccatgctttcgacattcagccaggcaattgacaactctgccttcgccactacttctcccaggaaggcacacatcctcaaggtcagcccaatgtaagaagactgggttctcatctctggtctttcttgagcctgcatatactcctgggcatgcacacaaccctatgcatgcatgtgaccttctagatttccaagaatattttggagtttttcaaagccttctcattccccagctttatcttttaaactgtttcattagcctattattggcctcaactgttattcattgcttaggcagctgcctagttaaacaattgcatgcaattgtgtttcacaaatgcccctggggaaataattttgacgatgtatgagctctaagttaggtcaaatacagacaacattgcaagtaggggcttccagggaaccataagacgaatcaaataattctgactttctgggagtgaggcttttatggagtttcatcctcttctgccccgtttggtgtatgccaggctgctagtttccactgagaatgctggcagttaatattcaaggctaccatggagctggaatgggggaatggaactaggccaattaaaaatgtcacaaagtataaaaattagccgggcgtggtggcgggcgcctgtaatcctagctactcgggaggctgaggcaggagaattgcttgaacctgggaggcagaggttgcagtgaactgagatcgtgccactgcattccagcctgggcgacagtgagactctgtctcaagaaaacaaaaataaaaataaattttaaaaaagtcataaagttcactgctcttactaagattcagctgcttttcttgaataaacactttacagatttttgttgttgttgtggagacagagtctcactctgtcacccaggctg

SEQ ID NO: 95151 - DNA, 24069 bp, Homo sapiens
ccaaacttctctgcctccttcccaacctgaccagcagtatggtggaccccctggccaaacttctctgtctccttccagccctcactgagaccatggtggaccccctggccaaatctccctgcctcatttccggcctgccccgcagcatggtgggccccctggccaaacttctctgcctccttcccaacctgaccggcagcatggtggatcccctggccaaacttctctgtctccttccagccctcactgagaccatggtggrcyccctggccaaayctcccagcctcatttccggcctgccctgcagcatggtggactccctkgccaaacctcccagcctcatttccrgcctgccctgcagcattgtcgactccctggccaaacttccctgcctcacttcccgcctggttggccccgtgatggaccccatgatggatcagtttgtctgcctccttcccaacctgtccagcagcgttgttgaccccatggccaagcttctctgcttcctttcctgcttgtccaataccatggttgatctcatgggcaaccttgtccatgccgtggttgagcccctggacgcctttgtccaactccttgccggtgtggctccccatgttgctaagtccgttgaaaaccttctccacttcccttccggcatgcgtgattccactgttgatgccatccagggccttgcccacctctctctctgcattgctcagccctcggttgatcccttcaatgaccttctcaatggggtcatcgctggcygcccatccagacagggcccccagtagcagaaggagggagcaggagcygaccagacgtgcaagatgcatattgctgggaaggtcgggaaggatgsagagaggagccagggaagccacgctgctatttatcctctctccctctcgccctcttctccacccctcatgactcaattacccctgtgaggcactgagttggtcttcagtcaaggaggtgtttcccagggagatttggagttgagcaatggagaggaggaggaagagagggtgagtcatggatggagaagaactctggcatctttgctccttgccctccaccccagagatgggtgtctgcccttccaaccacctcctctttcattcctcacccactgtccaggcctcctctctcgcaaacccaccttccaccacgctccatccctgggatgcaggcaattcttcaacacctcactcctctcaggcatctaagcctccagctccccaggcagtgaggggctagaatgatgggaggcaccgtctggagaggggagaacactaggtgggatgaaggagtcatcagacctcgttcttgtgggccagcccctgccctcactcattccattccagccacacaggccttctccctgttccacaaacacaccaagctcattcctgctgcagggcctttgcacatgctcctctctctgcctggaatgcagaacccagatcttcacgtggctggctcctcctcatccgtacttgacttaaatgccaacttcgcaagaaaacctctcctgaccataacatggcattaattatactctgtagtatcacccttttgttttcacagaaaaaaaaaatctgaaattacctttattttttattgcctgtctcacctactagcaatgtaaattggtcgtgttgatcactgctgtattcctagcttcttgaacactgcctggggttcagtaaatatttattgactggacaaatggatggattcgaacaggccaaggaaagagactccgagcccgagtctgggtctcacagggtgctggagggaagggcgcctgggtcgccagggcagcatagagtcccttgtggagtgccgcagattttggaggcaggatcccattcctgtcgcagaacccagacctcctgcctcccagcccttgggcaagggcagggggctgattgccacgagctggaacaggacgcagtgtctcctgaaaagccggttgaggcagccacggggaggggccgaagacccagggcagcaggagcctgtgagccagaacctgggctggggccaggccctcatccttcctgccctcccgacatggggcctcctaagccccaacctgaagccccaagtgttgacatattggctcgggttggaggggaaacagctgagagtctggcctcaggcatgaaaagggcatcggaaggaagggcaggtggtggtgggcaggcttggggcagcagatgcatctagaagccagttgggagggaggctaagaccagaacgagagccagtgggtgggtacagtaggtgcaggggtgaaagatatttgggttttggtgccaaggggagagactgagagaggggtggaggtgggattgctggtgggaaggccaggcaggaacaatgtgcagggtgtgagcagctggaggtggcagagctatgtgtgtgggtgcccaggtgtggcgagaatctgcacgtgttttcaggctttgctcaaacaaaggcgccaaggcccactcccctcagaggacccggggttcctctccagctcctggacacttgactccacccaaagacaggcatcccaggacagatatccagaagcttctgccttctctgggctctgcctatagagggtgactaagtgtgccacctctccaagcttgagctcatcaaatctgtttcccggtttcacactccagggacaaagccaaattcctgggcaaactcaggtgtggtttttctgccctggtccagggccgaaatgatggagtttcccataccaggaggtggctgggcagagaagagtgggtgatgagtgtcagaatcctaacccacccagagatcaagaggtgggatttctcccactttgaactgtgttccatcttctttttgtgtttttggagggagagtctcactctatcccccaggctggcatgcagtggcatgatctcggctcactgcaacctccgcctcccgggttcaagtgattcttctgcctcagcctcccgagtagctgggattagccgggcacctgccatgatgcccagctaatttttgtactttcagtagagacggggtttcaccatgttggccaggctggtctcgaacccctgacctcaggtgatccgcccacctcggcctccccaagggcagggattacaggcgtgagccactgtgcctggcctgaactgtgttccatcttctctatccctctccaccccatcctttcatcttctgccagcctcagtccctctcctctgtctctctattcccatgtggcacgattcgattcaggacttcagcatctggctccataactgagaatggcctggagttgtcctttctttattttatttattttttttatgaagtatcactctgttgcccaggttggagtgcagtggcaatctcggctcactgcaacctccgcctcccaggttcaagtgattcgcctgcctcagcctcccgagtagctaggattacagatgcatgccactacacctggctaatttttgtatttttagtagagatggagtttcaccatgttggccaggctggtctcaaactcctgacctcaggtggtctacctgcctcrgcctcccaaagtgctgggattacatgtgtgagccactgcacccagccaaaatcagccccttttgaatcctggttttgttgaggttatatttttcacctccttgattgtacaccaaaatgtagctccctttgtttaattaatcatctgtgttttggtctcggttcgttaaaacctcctcacctgtacacttagtttactttcttctcccaggccatcaaagcaggagagcctcaccctgccctggtcccatggcaggtgcttggcaaatgaatttctcatggatgttggcggaaggaagaggttatgtcattctgccccttcttgcatccatccctctctgggatggtgactccttcctggcacaaacccccactccccctgaaccttggtcacagctgcgtgtcaacctgctgtgcaggtgatggtgcctgcctgtgagtcactgaggtgcaagcaaacccctaccccggggctgcaggggagggagctgtttgtccacttgttctttgtcagacgttcattgaaaacctgctttgtattgttctaagtgctggaggcacagtcgtgaacaaacaaacaagaacaggagccctgtgaggggcttagagcccaagggggagacatcgaacaaataaaccaatcagtagatcatgacaaactacatgaaaagctacaaggaaaagaatgggtgctgcgagaagatataacgtgaagagtttgataagattggcgatcagggccgggcgaggtggttcacgcctgtaatcccaccactttgggaggccgaggcagatggatcacctgaggtcaggagtttgagatcagcctggccaacatggtgaaaccccgtctctactaaaaatacaaaaacaaaaaaaaaattagctaggtgtagtggcgcacgcctgtagtcccagctactcaggaggctgaggcgggagaatcacttgaacccaggaggcggaggttgcggtgagctgagatcgcaccattgcactccagcctaggcaacaagagcgaaactctgtctcaaaaaaaagaaaagaaaagaaaagattagcgatcagatgaaacctgaggaattgacatttattcattcaggtatagtttattgggctaacgcctttttcagacagggtcttgctctgtctcccagctggagtgcagtgacacaatcacagctcactgcagccttgacctcctaggctcaagtgatcctcccacctcagcctccctaataattgggacaacaggcatgcaccaccacacctggctactttttttattttttgtagatacagggttttgccacattgcccatgttggtctcaaactcctggactcaaatgatcctcccacctcagcctcccaaagtgttgggattacaggcatgagccactgcgtccagcccacaaacacctttcaggtgccaaacacttttcttgtcaatgggatacagaagtgacatagatgacgtccctgtcctctcagagcttacagtctggtggacagagacagttggcaagaaaacaaacaatttttagagagacatgtgctctaaggaaaataaaaacatagacagtgtagccctagagaaattttgcacactgaagcataactcagaatggagaagtcagacaaggcttcctggaagatgggcagaaattgggaagggggtgacggctgacagtgacagagaaaggagggaacttagatgcagagtgtagaaagcctctcttaaagggtgggaaaccaagaggcagccaagggaagccctgggtgggccttccaggcatacggaggcagcaagagtcactccactggagaatccaagggacagcatggaacctgtgtgcttcaagagacagagaagaggaaagggctttcaggaacagtgtaaaaggtgggattccaggctgggtgtggtggctcgctcctgtaatcccagcattttggaaggccgaggtgggaggatcgcttgagcccaagggttctagaccagcctgagcaaaagagtgagaccctctctctacaaaaaaataaaaagtaaaaatagcctgcagtggtggctgcacatgtagtcccagctactcaggaggccgaggcgggaggatcgcttgagcccaggagttcaaggctgcagtgagccatgattgcaccactgcactccagcctaggagaaagagtgacaccccgtctcaaaataaataaacaaatgataattttaaaaagtgggattccattccagacggcagtgcgtggccgtggaacggtgatgcatagcgtgctgacgtcccatgcctctacggggatgggatgcgatggtgtcaggcctctggcttgggcgccgcccctcggcgacrtcactgggtactgtgacgtcactgggtgctgtgacatcagggcaattagcccaggacccacagccctggcsctccgcacgcacctcggtaacatcacagcaggtccaggccaatgataaccttataagaggccatgtcgaagcgcgacatcgtcctcaccaatgtcaccgttgtccagttgctgcgacagccgtgcccgggtgagggaggcagcggagggcgcgggggaggggtggaaagggtagtggggagcgtctgcaccctcacacctgtgccgtatccctaccgcccttcctggcgtgtgcaccatctagggaccaggggatcagccgctctccctccctccacacccgccagtgtgctggcagagtggggtttactgccatggcggggagaccgggcctccgcccccagggctgggtgggcttcgcgccgctatcacgcggtagaaagagcagaaacgagggccatcggaggctgcagcctgaaagtggcgggaagtgggcgggcttaggaggggcttagggagaacccaggggtgctgggcttccatgtaaaagtgatgttcatggcgcttcgcgtgaggtgagctttgccctccctgtgatgcacaaaacaaggacacttgsaaccttgccggggacgtgctsaccacttcgcaggcgagagctcagggaagcctcaccaccacctgagaaggccagagtgtgcccgcagtttacagagcggccaacagaggttaagagagggcaaactacttccttagtctctcaacaagggcggcgcgcccgcgmgygcgcacacacacacacacacactcactcactcactctagccggaggaaccaggtcttccggtgggctgcctccattcccacactgttccctcacttcccaagggcgggggccgcaggggtaggtggggctggggctttggtccaggagaccctggaagacacaggagcagacaggcttaccagcctcatgagacttgaacccctgccctgcgcatcactgctccgtggcctcaggcttcattttcccctctgtaaagtgggtttatagcgcatgcctctcgggattcagtgggaggacgcagtgaggagctgggggcagcacccagctagcccccaggcttttctccaaccgggggaccccacccctacagtggaggggaagagagtgcaaggctgggagtgctgggagaggaggaccatctgagttttcttcggaagggtcacccattgggctcagattcccacctgaaccaggtggacaaatcccctttctcccatagcagaaacaacccccaaggatgcaaacatcctcaagttcaccaataaacactaacaccttcatgaacttggacagccactggaaacacctatagtccagcctcaggccacaaggtctgtggcaacagggagaggtcagggagacagacaggccagctggcccccggctcccagccccaccaccccccaggtgcmtttgatttggtgccaaaaacttggactcccactacccccttccagcccttctccaccccctgctgtctccctttcctcaggaatctgtgtaggatcagacttccctcctctattaaaatcagctcctatgtgtgggcctcgagatctcactgcgccctcacagcagcccctaggtgggggatcagccccaagaggttcattaacttgctcaaatccacagagcagcaggtctgtgtggactgagccaggcttgactttccagcttgaaactctctgccaccaggtcccctgagtctccacttctcccctcttctcaagccctcctctgtagctcaggcggctgctacctccaggcgcaggtgtttttaagtgcagtctgggagcaggagtgtgtgtggagaggtgggagccaatgtgagcttccatgggtttcacagagtatgatacacrgtactctctaagcttccctgaggataagaaatgcctggagtgcttattttattttttatttttttttgggagatggagtttcgctcttgttgcccaggctggagtgcagtggcacgatctcgcccaccacaacctccgcctcctgggttcaagcgattctcctgcttcagcctcctgagtagctgggattacaagcatgtgccaccacgcctggctaatttttttgtatttttagtagagacggggtttctgcatgttggtcagactggtctcaaactcccaacctcaggtgatctgcctgcctcggcctcccaaagtgctgggattacaggcgtgagccaccgctcccggcctggagtgctgattaaaaacaggatttctgggcctccatacagacccactgagtccgatttttctaggaagagccctcctcaggtgatttttttttttttttgagacagagtctcactctgtcgcccaggctggagtgcagtggcgcaatctcggctcactgcaccctccgcctcccaggttcaagagattctcttgcctcagccccccgaggagctgggattacagtatttttagtagagaacaggtttctccatgttggccaagctggtcttgaactcctgacctcaagtgatccacccaccttggcctcccaaagtgccaggattacaggtgtgagccaccacgcctggccactccgacgactcctatcatggaacagtttggggaccactgggctaaatcaattattggacaaattcggggaacaatctacaaaatactaatgcatgtcaaacatttcctcggcttggtcataagcaatccatgtattacctcatttaatcctcacaacaaccctctaagaaaagtactattatctccccttacagaggaggaaactgaggcacagagaatgtcaccccaagcgatctatgttgaaagtacataccccggccaggcgcagtggctcacacctgtaatcccagcactttgggaggctgaggcgggtggatcacctaaggtcaggagttcgagaccagcctggccaagtgaaaccctgtatctactaaaaatacaaaaattagccaggcaccttggcgggtgcttataatcccagctactcgggaggctgaggcaggagaatcacttgaacccaggaggcggaggttgcagtaagccaagatcagtccactgcactccagcctgggtgacagagcaatactctgtctcgggaaaaaaaaaacaacggaagtacataaccagtgaattagaatctccaggaaagagcccttgggattgacattttaaacaagttcattctgtagagaaagtgggtttgggaaacactgggctaaatggttggtcacgaggggccaggagccagcaacagattctgggcagcaaagacagtttgttctctttcactttggtggtcatgcaacccattccctcccttcccccgyatagtgaccagagcaccgcccccacctgagcctaaggctgaagtagagccccagccacaaccagagcccacaccagtcagggaggaaataaagccaccaccrccaccactgcctcctcaccccgctactcctcctcctaagatggtgtctgtggcccgggagctgactgtgggcatcaatgggtgagtctactccagcccctgatcagtctgaagccttagagcccagcccctcctctggctgctaactgggggcacctccacatttccccccatcaatgctttcgttccgacgaccctggagaaatagcccggagcaaggcagacagggccccatgctcagcagcatgctggtggggaagacagtaatcaaataaagaaattagattgttcagtagagtgtgctgggaacagtgtagaatccagtggaaaagtcaggctggagagggcagcctttgccagtgatcagggaaggccttggggagaaggtgtcattggagcgggaccagagtgatgagacacagccagctcccagggcaccttgctggggaaggagtcttccaggcagcgggacaagcaatgattctggggcagaggcgagctcagtatgttcagggacagccaggaagtcagagtggctggtgtccaccaagcaaagggaaaaggagggaggccagtgagaagcccggagggggctgctacaccacagtaaggagtgtggatcttgttttactgatggacagtcgtggatgttttcatgccaagagacgtaatctgtcttgaagttttaagatccatccaggctctcacacctgtaaacccagcactttgggaggccaaggtaggagaatcctttgagaccaggagtttgagaccagcgtgggcaacatagcgagactctgtctctacagaaaaaaattgttttaattgtttaatgaaaaaataaaagatccatccagctacaaggttaagaataggggttaggagccaggcgcagtggctcacgcctgtaatcccagcactttgggaggccaaggcgggtctatcaacttgaggtcaggagttcgagaccagcctggccaacatggcaaaaccccgtctctattaaaaatacaaaaattagccaggtgtggtggtacgcgcctgtagtcccagctacttgggaggctgaggcaggagaatcacttgaacccaggaggcagaggttgcaatgagcccagatagcgccactgcactccagcctgggcgaaagagctggattccatctcaaaatatatatatatatatawgtatatatgggttagggaacggattgggagagggagctgaaaaagcagttaaaggggctggtgaggtcatcttggcaagagatgcccatggccagcacagaggttgttgccttcttcccctggattaaggattcccaaccaggctccttgagggagcctcctctccattacccccttctctcccatcccttcctgtctgtccctggccagatttggacgcatcggtcgcctggtcctgcgckcctgcatggagaagggtgttaaggtggtggctgtgaatgatccattcattracccggaatacatggtcagtagctrgcagagggcaggaacagcagggtgggactggggtgggaaagggactcagggaagctgtatggaaggctctcagctgtaatgtgagaccttcaccaaagaggggactctctagggatcctcaccctgccaccccaagactaggagccattccatcccccacaggtgtacatgtttaagtatgactccacccacggccgatacaagggaagtgtggaattcaggaatggacaactggtcgtggacaaccatgagatctctgtctaccagtggtaaggaaagcatctgtctgatgcacggctgtgacatattgaggcagggcatgtggaggtggctaaaatgggattccagcctctcacatggggtgctgaaaccacccccaaaattgcgtgtgcatgcctctaggtactaatttgaagagggaagtctcaggtccttcacccctaaaatgattaagaagcactaatctaaaaagatgcctcactgtactgaagaatgctttttctttatattttttttagggacggggtatcactctyttgcccagtctggagtgcagtggtgtaatcatagctcaccgcakccttgacctcccgggctcaagtggtcctcccacctcggcctcccaagtagtgggcaccagccaccacacctggcaaattttttgtagagatgaggtcttgccatctggcccaggctggtctcaaactcctggccccaagcaatcctcccaccttggcctcccagagtgctgggattacaggcaggagccactgcattttgctttaacgcacatttgcatgttttctcgtgggcatatcaacatgtccagaactcaactcttgattccccttcaacccacacctattcagctcccattgaccactgctggtcaactatgcctgaattccaaagggaggaaggtataatgaggcttgtgcgaacatccgaacatccgttcccatcatggcctgaaccagtgtttcagttttactttagaatgccctgggccgagagaagggctacattcagttagttgggggagtttagaattttatttttggctgacattcacctttctaatgtaaactattagcgactcctggctctgtggctgcctggggcttttacacayacacacccacaggcccacacacatgcaaatacacacaggcacactagtgaaccctgtcygggcccaggcagggtctgcagcctccccagcgcccctccccacagatctaatctcagcccttctccttgtacttactgggggtagggtgagtgataaaggggcagggatgggtgcaggaagtttgtgggcagggggcagagactggagagtcagtgaaaattgaagaaagctgcttaacccaagtttgaaatcatgacactagaaacaactccagcaccatagttatcacgcagacttcamcgtggccaccaccattaccgccacttggagtcatccctcttccccacctagctgccccctccgtccacggtcccgactcaggtcttgccttctctggtcacttgtgcaatgcagttccccgcccctccagccccctctccatccccgcactgttgggctgcacaagccaggctgtgtgcctgcactctgccctgcacctccgctagctagctgggtgaccttgggcaaggaaccaaacttgcctgagcctcagttccccgctgtatctgatggggatgatgagcaaacccaccacagcggtagctgggagcacgaatggagtgaacatgtgtttgtggacacttaaacgggcacttcccacaaggccatggccttgcacggagggctctgtcaactggtaccaccactgttgctctggcattagcaggtacaggccctgatagccattcagaacttcctttgaatgaatgaatggaatcctcaaaacagcctggtgggcaggaggctggggcccatgacagccttggggagggcctggggtcttctgggggcacagtctttgcctcaggccaactcagcaattgttgcagaggaatcgcaagtgtccctaatttggaaggcaggaaatggggggtatctgagaagagctcgttgggccagatgatggaaagtggactgacagagcaggagacaggaagaggataaccatgcatgtgtgatggctttgcagggcagcccattcattcattcattcaggcagtggaaacaggagtgcagacccgaggtgggaccagccacctgcactccagcaggctctccctctcactcccctcccctctgccctgacagcagtaaaaaaatgcaaaaaatgacagcggtagcacttcctcatcgggttgtgaaggttacatgagtttaatgcaggtaaggcacttagaatatgggcacaggacaggtgttcagtaaacacgtataaaatggctaactaaaaaaaaaacacgaggccaggtgcagaggctcatgcctgtcatcccagcactttgggaggctgaagtggggatcacctgaggtcaggagtttgagaccagcctggccaacagagcaaaccccgtcaccactaaaaatacaaaaaacaacaacaataaaaaactagccaggtgtggtagcgcatgcctgtaaccccaactactcgggaggcggaggcaggagaatcgcttgaacccggaaggtggaggttgcagtgagccaaaatcgtgccactgcactccagcctgagtgacagagtgagactctgtctcaaaaacaaaacaaaacaaaacaaagaaaacccatgaggccaggcacggtggctcacacctgtaatcccagcactgtgggaggtcaaggatcacttgagcccaggggttctaaagcaccctgggcaacaaaagtgagaccccatctctacaaaaaaatttaaaaattagcttggcatggtggtgtgcgcctgtagtcccagctactcgggaggccaaggcaggaggatggccggagccaggaagatcaaggctgcrgtgagctctgattgcaccactgcactccagcctgggcgacagaggaagaccctgtctcaaaacaaacaaaccccacaaacattgattgaaccccccattgaggggagcaggctcaatggcaaaggaaacagaccgacactggccaagaatcacagaagcaaagcacccggttactcatgataaacctgggaaggaagaaagtggaacagtttattcacttaatgcttgtttgctaaagccaagtagaaaacggcaatactagatgtttagtgtgcttcaaatacaaatgtttgtcaaaataccaagtaaaaacataaatttataaaacaggaaaccagaaacctcccttacctttccaatgtaaaccatgagccactgctgccccaaggctgcctcaggcttcaggagtcctccaggagctttttctttaatgcagtgtctgttttcagggaccctcctggcctttggcagccagcttcctattgcaggagctgagggtctaggagggttcatggcgaggttgtcagagctgggaagcagaaagcagccgggcaggcctcacagtcacagagtccacgtcccgggcagcatatggagaaagggtctgggctggctgacagcagtcagcattggcgcctctgaggaggttgagggctgagttggggaggtcaccacctgtacccaggcataacaggggtggtgcaatcagcaaagggaaagtggtctgaagtggggcagtggtgaaaagctaggccagcggggtggagcccatctggaacaagtaggtgtgtggggtaggggacgcaggtggttgcaggtgggccggtacctgctcagcctgtcaaatggtgaaagccatggactatgaaggtggggctcaagcaggggagactgactcagccctgccacttccccacagcaaagagcccaaacagatcccctggagggctgtcgggagcccctacgtggtggagtccacaggcgtgtacctctccatacaggcagcttcggtaagctggggagaggtgcccagggctagctggggggatgatggtgccagaagcccctgacacctgcgcttcctccccaggaccacatctctgcaggtgctcaacgtgtggtcatctccgcgccctcrccggatgcaccaatgttcgtyatgggtgtcaatgaaaatgactataaccctggctccatgaacattgtgaggtaatgtgggcagtgacatcctgcaatgtgtggaagggagggtagactcgtcctccccaccctcagccccactggattcctggtcgcttggcttctgcttctccttcccgaaactatctgctaaaaacgcatgacttccagaggacaagcttggggagcctccccagctgcacctcagtgcctccttcagtctgacagtgtccccacagatccctctcaccctcatcctgacgtttcataaaaccaagtctgcgtgcataccccaagaggggtaagggtggaggggtggctctgcgactcacctcacagtgtccrtgcacaccttggctgtttcagcaacgcgtcctgcaccaccaactgtttggctcccctcgccaaagtcatccacgagcgatttgggatcgtggaagggttgatggtgagttgaggatgaggggctggggcaggaaggatggcagggaaacccaacttcttcccgggccttgcttactgtatggagttaagagggagagactggtttcgggaggagaggcccaccagtgcagaagtcacttaaaacactgtgcaaccctcaggcaaggctggaccctggcctgcacacatcccctcctgtggtctgtggtggtggccccaccagcctycacacctaggccaccaacttagtcctggaaaaaagaggcatgggagcttaggagcatgaaggcctcatcttggtccttctcttccccaagaccacagtccattcctacacggccacccagaagacagtggacgggccatcaaggaaggcctggcgagatgggcggggtgcccaccagaacatcatcccagcctccactggggctgcgaaagctgtgaccaaagtcatcccagagctcaaagggtatgaggacaagaagctgcaaccagggtgggggcatacgccaggaggactggactggcccggccctcagtccttaagaggaaagcaggggcctggcccagccacagggaaagggggaatggagggcaacgtccctaagttctgactcctgttcctcatgggggattctccaggaagctgacagggatggcgttccgggtaccaaccccggatgtgtctgtcgtggacctgacctgccgcctcgcccagcctgccccctactcagccatcaaggaggctgtaaaagcagcagccaaggggcccatggctggcatccttgcctacaccgaggatgaggtaggggctgaggagaggagaccctgggaggagccctctgggaagggacatgatttccacttgccagggagctgctctcaatgtgccaagtcagaaactgcagggcaggaagggagatctccctgcctcagggcctttgcacttgctgttcctttagtctggaatgcttcccttgccaggtgaccatacagtctgtccttacttcctccaagtctctggaggaacctccctcttcagcaaggcamcccctcaaaatatgttctttttgtggccatattcctcacctgaaatttcatttcatagtcactgttggccccagtggtgtgtgcactccaagaaaacagggatttaggggctgccttttcacttttgtggctccaacctggcatacagcaggtgactaatacatgcttagtgaacaaaagacaacagctcccatttttttcaatacttgctcagggccaggccatggccagatgccttctctgtgaggagtggatgccatggtcatggtggacccctgtacatccaccttggtgctgtctccctgcattaactcctgcaggtccactttcccacagtcactgggatcttttgttttaatggaatcacattgcatcacccgttttcaggattgaaaacactcctgtggcctttcatgacactagggctaaaaccctcaggtcctcccttcctgcagctccttctacctcagacactgtgctgagggccccagccggtcagatctttctagtcatctagacccaggctsatggccacccctcagagaggccctccatgctggcccattccaaacgcttgcattattcctaggaaagggatgtactggtacagcatgagggtgtttgtgacctgtgccctttggccagaccctgacacagtgccttggtcataccctgcacttggtcataccctccagtccagagactggacacagtagggctacatcaaatattatagatgaatgcatggatgggcgatagagttaagagtcggggcctcagctcctggaggtccttgctctgccggacacacttatctttgaaattctgacttccasgtcgtctctacggacttcctcggtgatacccactcgtccatcttcgatgctaaggccggcattgcgctcaatgacaatttcgtgaagctcatttcatggtaagggggaaggagctggagacttagagggaggggaactaaggggtggtcggaaggaacccccttgaacctcccgacccctcctccacaggtacgacaacgaatatggctacagtcaccgggtggtcgacctcctccgctacatgttcagccgagacaagtgaaacgggaaggtcctttctttccttcccaggggccggggccggaacatgtgcctcccgttccagcatctggctgcccgggggaggaaggacacccggggcgggcgccccacgccgatgggtccatggtgaaataaaaaacagtgctcacggctgcgtcccgtatctctgcgccggtcagggcgggttctgatccgggtttgaggcccgccccacccttactcgatcgcctgcgcccacgggcgaggggtcgcgctcgactccaagccgggttccacttcaggagaccgggaccgcgatggcagcggtagaggccccgcatggccggaagtcactccccaaagcgctgggccggcagcggtgggacccagggccggccacgggctctctgacgtcactgggcgcgacgccccgcgccgggactactgctcccagaaggtcgcgcgcgggcccccgccagtcaggtgggtgccaggccctggccgtggcgaaagagccggcggagccggagacccgctcccggagacgccgcctcgcgatccccgcgcgggcgggaccgggcggccggcatcatgaccctgtttcacttcgggaactgcttcgctcttgcctacttcccctacttcatcacctacaagtgcagcggcctgtgagtgcgggaagggcgcggggcggagagggcgcggggcccgggccgaccctcacctcccgcttctccaggtccgagtacaacgccttctggaaatgcgtccaggctggagtcacctacctctttgtccaactctgcaaggtgagggccaccgggaagccacgtgttctggcccccaggctctgcagacccagggacccgcccccgttgcctatccgcgcccccgccgccccacggtgggaccgccctcgggactccgcactgggaggcgtcaggatacctagagaggatggactttaaagagggcacgacctgagaagagacctagaagcaacttttgcgtagcacttagtaaaactgagaaaacctcagtagtgtggttggctaacaggttttttttggtgcggttaagagtgatcactgattccgtacgtgctgctaacactgcccaaggagcagcaccttcagacctgactcagatgccctgtgatcacccagaactcaaacttccagccccctcggggacccggggacctatcctctatctccccgattcctgtaattttgccaccatctggtggttcctcttccagatgggcccccagaacctgtcctgccctcttcctacccacgaacttcccacaaatcccacgtggtttatcttgatcccctcaccttgaagtgacctctttctgctttctgttctcagatgctgttcttggccactttctttcccacctgggaaggcggcatctatgacttcattggggtgagaggggccagggaagggaagggagttcaggaatggggctccctgtccccctgtgcttacttaagcctcaacctgacccgcaggagttcatgaaggccagcgtggatgtggcagacctgataggtctaaaccttgtcatgtcccggaatgccggcaagggagagtacaagatcatggttgctgccctgggctgggccactgctgagcttattatgtcccggtgcgtacagcagcctggagcccagacccctgagaagggacacctgggttccacgggggtgctggagggcaggggctcaaagcctggtgctgaaggtgtctgagtactggagaatcccatcctttgccttcctcagctgcattcccctatgggtcggagcccggggcattgagtttgactggaagtacatccagatgagcatagactccaacatcagtctggtaggcagtcgtgctctcccacatacacatttctgctggcggccatactcctccccaaggcctggccccgactttctgcctccctctaggtccattacatcgtcgcgtctgctcaggtctggatgataacacgctatgatctgtaccacaccttccggccagctgtcctcctgctgatgttcctcagtgtctacaaggcctttgttatggagtgagttgggtggggtttagggctgggtccaaagtggggtgggttatctagtctcccttccttattgtgacattttcctgcaggaccttcgtccacctctgctcgctgggcagttgggcagctctactggcccgagcagtggtaacggggctgctggccctcagcactttggccctgtatgtcgccgttgtcaatgtgcactcctaggcttggtgtctcagacattgatgtaccttttccctgcctcactccaggttttagtgaagtaaacagtatttggaaagttgttgctgcctccatttctctctcttgggaactgtctcccaataccgtgtccacctgggtctcagaggccctggttctgtctcaggagccaggtagacaagctggaagctagccagtcactgacttgtcccatgtcttgttcctcaggctcctggtttgccaggagtagacagaaggtttggatgatctttgagcagtggcagaggccagggccctcagggaacagatgatagaggggagctagaatccaagagaaggcccttggggggctcttcctcctcacagccccaacctgggcctcctcacatgggcccttcccgggctggttgcctctgaggctcctggccccagtgtccccctccaatccatcctctgtatggcagccaggggatctatctgaaacccgtctaaccaggtcatcctcccacttgcagccacttgcggccccttgttacacagtggacagtccaattgcttggcctttggttttacccaaccagcaaaaccagcttttctgaaactgctccctagaataatttgtccagccagattcttaacatcgttcaagccatggggtcagcatggggctggggggagagttgtgactgtgagctcctcagttctatggccctcagatcagatcccagcctgagccttctcagggtggagtggagagacagctgcagccaagaagcagagcagtggggcccccagcttggacattgtcctggatgcccccctccaccctcagccttccttggtccactgaagccggctccccgcctttctctgagggggatgtgtcagaagttttgaatgtcatgtttaagctccactttgatgtacaccctccccactcaggaagatgctccccatccttggtgttcccagtggggtaccccagggagtaggatagcaccattgcccctcctcctccaccaggccgttgaagttccacctgattttttttaagcttaggcctaggaaagctcactatgaccatctcgatgtttccagagggagcatttgccttcagacggcagctgccatctaggccactcttcctcattgtttggagtaaagacagggtccatgggtctcttgggagctggaagtgattgatcaccttgactttgatgtagaaaggaagtagatggggcagtctatctgggtggacttgtgacaaggtcactttctcccacacttccatgccccacatagctcttcacacatattgagacaagtgtaggatgcaaaattaccaactggaataatcccagcttacatggggttcagggagagagactggagtggctgggcctgagttggcagaggacggtgaagcctgggcggttggactgtggggagccaggcttcaggtgatcggggttatgatgggaaaaccccgggttatggggacccagaggagccgcctggcctgccgtggaagcagtgcgggctcccctgagcagaggacatgtgagctgagacctaaagaatgagtgattggggcaaggcagaggtaatggtcttgaggtcagagagggggcctgtttttcccaagggaacataactggttggaatgagttcaaggggacttgtaagactacagaagctggcaggggtcagatcacaggaggctttgggaaccaaggagagctctaggcagaggaaggacagggtcagatttggctttaggaagctctgcatggctgttgtctgaaatgggaaagctgaggccacgaggccagggctggaccagggcagggctttgtggggttaggagagtgactagaagccaagcccaggtgttggtgatcagtggctgtgtgtatttatttaccggcagggggcgctaacaggtaagggaggagcaaagagttccaggataactggagtttggggcttgtaagcccgagggctcaccacgtttccaagggagaagggaccacactgatgggacagtgggactatcagattgggtcagtgcatgggtacaggcatggggggtgatgaagaggccagtgtaggtcaccaacactgggggaagctggggacagaggtgggtctcactgcagaaacaactgaagccatgggggactggggggctgtggtcacaaggaaggagaagcccaggccctagccagagaaagccacataagaaagaggaagagaggtgaacagaggggctgggaaaggagcggcagagatgggaggtagggggatggggttaacctttcaggtgaggggtgtgaggaggggacctccaggagttgttcaggaactggccattgccgggacagaggagtaagcaggtaggctcagaaaggagacaccgctggggggtgggggatgcttgatgtggaaatgacttgggcccccttgtgtctgggagcctccaggagggagaagggtgctgagaacagagaaagcccagaggtggtagggggtgcctatcgccacggcccagcttgcgtttagatgccatgaccctgggcaaaggaataggaatcatttccccaaggcaggtttattgaggacctactatgtgccaggctgtgtactaggcactggaggtgcagccctggataaacagcccccatgtacaggactgtgggagatcacaagcactaatgagagacgctgaggacagtgcctggcaccagatacagcacagtcagcatgagctggttttattaccatcgcccaggacacaagcgtgtctttaacgaagggccctcaggcagccgtccagcctggactggagtcctaagaacagaaacaccctccagaagcggtcagctgtactccctgtcagagccccaccgccaccacaggtggcggctttcccgaggccagcccagaggactgcccaggcgctgctgctccaggaggtgcgaaccttgggaatgggggaggggagtgggcaggtccctccaagtttggggtgccgtgggctacagaagcagatactggtggggctgggactcttggttgctcagatatcttggtggctgtccagagggtcccacgagccctgcccccacctgctgtggcagttgcagggatgcttgaaggcagtcgtccctctaatagtagagttcctggtcccaccagcctgggagagagagggagaaaggagactcagtgctgggggtgccacttaggcagggccaggggctcagaggtcagtgctggttgctatggagggtcaagggcttagaggccaagtgttgaggatcaaaggtgggtgcagctgctcaaacgtttcagtcccctgcccccaggctcccagtctccacactcactccctgggcaacagcgaactccaagcttccggatctcatcatagacgaagatgaggatgccgtagggcagggggaccagccaccactggaacctgaaggcacatggcaaggtgaaggccatcccaggcctgtgccctacagccccctccctgtccttgcccctcacagcctctcaccgaatgggcatgaagttgaagatgttgggcatgccggggcagtagcacaggaagcagccgatgcagacctggaacacgatggcgatcaccaggatcttattcctgggggtgggcagaatgggacaggccattaggaattggggacgtgatggaaatcaggatactgtgggtcaaagtaggtcagatgtcagcagcagcagggaggtgttctacacactgaacactggagtggcccgggcctctcagcaccacccctttagtgaaatgtggagggggccgtggggggagttattggccagttagaaaggtttttttggcatgtcaccatctggcactggcacccgctggcatttgccggctgttctaaaccacagtcaggatctgatgggagttgggaccaggggttggagggcaggaagagggccagccagggacacctgaagaagccttgctggaaggcagagagacggcgcgtcttgcggatgaggacatcggcgatctggcy

SEQ ID NO: 95152 - DNA, 24240 bp, Homo sapiens
ccttacccctgatgtttcctcttagtaactttcaatccactgcgccccacccgatcctgggctatgaattcccacttccccatgcagtatttggagttgagcccaacctgtctccctcactgcaagcccctgccactgtggcccctctctctatcgtaatggctctgaataaagccttcctttcctgtgccttattctatttttaatttttttaattttttgagatggagtctcgttctgttgcctaggctggagtgcagtggcgtgatcttggctcactgcaacctctgcctctcgagttcaagagattctcatgcttcagcctctccagtggctaggattacaggtgtgggccaccacgcccagctaatttttgtgtttttagtagagacggggtttcaccattttggccaggctggtcttgaactcctgacctcatgtgatctgcctgcctcagccacccaaagtgctgggattacaggcggaagccaccgtgcccagcccttcctgtgctttaacaactgttgttgaataattttttttccttttttttttttttttgagacagggtcatgctctgtcacccagccagactggagtgcagtggtgcaatcacagctcactgcagctcaacttctcaggctcaagcgattctcatgcctcagcctcccgagtaatggctaattttttgattatttgtaaagatggggttttcctgtgttgtccaggctggtctcaaactcctaggctcaagcgatccccctgcctcagcctcttaagtagctaggactacaggtgtgcattactaagcacagctcacaaaatgtattttaaaataaaaaattcaggccaagcacagtggcacacacgttatctcagtgctttgggaggctgagaggggaggatttcttgagcccaggaatagagaccactctaggcaacataatgagacctcatctgtacaaaaataagttttttaattagctgggcatggtggcacacacctgcagtcctagctactcaggaggttcaggctggaagatagcttgagcccagaaattcgaggctgcagtgagatatgatatatgatcacaccatgacactccagcctggatgacagagcaagaccctgtttctgaaaacaaacaaaaaacccagaaagtaatgcccaagaggatccttttatacaggttatcatggactagcatattaacgaaaattcctgcaacaaagcagctaatttaacttagttcaaggcagcaaattccacatttcttttgtcaaggaactccttttttttttttttttttttgagaggggtctctcgctctgtaggctggagtgcattgctgtgatctcagctcactgcaacatctacctcccaagttcaagcgattctcctgcctcagcctcctgagtagctgggattacaggtgcccgccactatgccaggctaatttttgtatttttagtaaaacagggtttcactatattggccaggctggtcttgaactcctgaccttgtgatccactgccttggcctcccaaagtggtgggattacaggcatgagccaccttaactggcctcaaggaactcttttatctttaggtatttcattcatgtcccctggaatcttgtcaaatgctggctgaaattttcttgtaaaattttgtggcatggcggcttatgcctataatcccagcactttgggaggctgaagtgggagaatcacttgagctcaggagtttgagaccagtttgggcaacatagcaagactccatctctacaaaaaagtgttttgaaaaaattagccaggcatagtggtgtgcccgtgctcctagctacttgggaggctggggtgggaggatcgctggagcccaggagtttgaggttgcaatgagacgaaattgtgccccatactccagcctggatgacagagagaccctgtctcaaaaataaaaaataaaaataaacatctttcctgatttgacaggcaaaaggtggtgtctcaatattttatgtaacattcttcaaatatgaatgggggtgaacttggctttcatggttttttggctattggtgtttcttttatgtattgtcttttcaaatatttgcccagtttccttattggcttttcatgttaatttcacattactttattaaaatctttattcttggccgtgcgcagtggctcacacctggaatcccagcactttgggagactgaggtgggaggattgcttgagcccaggagcctgaggctgcagtgagccgagattgtgccactgcactccagcctgagcaacatggcgaaaccccacctctacaaataatacagaaattagctgggtgtggtggcatgtgcctgtagtctcagctattcatggggcctactgaggtgggaggagcacttgagcccgggaagttgaggctacagtgagctcagatcacaccgccgggatcacacacaggctggataacagagcaagacgctgtctaaaaaacaaacaaaaaaatcagctctttttttttgaaatggagtttcgcttttgttgcccaggctggagtgcaatggtgtgatcttggcttgccacaacctccgcctcctgggttcaagcgattctcctatctcagcctcccaagtagctgggattataggtatgggccaccatgcccgcctaattttgtatttttagtagtttctccatgttggtcaggctggtcttgaactcccaacctcaggtgattcgcctgcctcggcctcccaaagtgctgggattacaggtgtgagccaccctgcctggcctgcagcattctttccttcattttttttttttttttttttttttgagatggagtctcattctgtcacccaagctggaatgcagtggcatgatgtcagctcactgcaacctccacctcctgggttcaagcaattctcctgcctcagcctcccaagtagctgggactacaggcacatgctggcatgcccagttagttttttgtattttagtagagatggggtttcactgtattgcccaggttggtctcgaactcctgagctcaggcaatccacctgcctcggcctcccaaagtgctgggattacaggcgtgagtgcccggcagcattctttctagtaaaacttttctttttcaagcctacgctgtcctcagtaaattcttcttactgttagaaataagttcttggtgccacagagagagaccagcactcggagaaaagtttcttagcaaggcaaagtttacttctgcagaagcgtgctgcccagacctgtaccaaaagcacacctaataaaggagagcaggggtttttaacccccgttggctagggttggacctcacaatctaagctgattccgattgcctatttctaatagaggcggggtatgggttgcagcggcggggaggggcagtttccccggtaagggcagtttctgcaggaaggrcagttcatagagcaaaggacaaggaagttagatttttgaagaggaactcattctgtctaacattaccaacactttcgctcccggggctctgacatctcgcccggcaaaagagatttcttttctttttttagatggaaacgcctcgtgcttgaacaggcttgggagcggaccaggagcccggggaaagggacaagtagagatgcaggaaagcaggaggacaggaaggaggcccagccggctccagccactaagggagctcgctcgcctcacttccactgcggccagaaagtcagcttcggcgcctcccccgggacgctggttccccgcctcagattaagctcggctgtctgtaccggatgcccgcgcctgcgctgcaccgcccttcgcggagcgcggagccaaatgcctacatcccacaatcccccgcaacgccggsaggggcgagacctcagcttccagctctgggcaagaccaggctcagattgtcgcgtagttttctgggaaatgccgtttgcgttccaggatgcttatgccacttttgagactacgcgacccataatgcaccaggggcgcagcgtctgaacggtgcgctgccgccccctcgtggcagatgggcggtcattgccgaggctaggcacgcaaaggttgcgggatctgggaggcgagcccaagtcctgggaacccctgggaattccctcccaaccccaaactttgggcaggaaaggtggagtgttgacgggaaacggtgaaagacttgcggacagggcctgctgtgaggattaaaggaaaccagcccagtaactgttggctgtataatccttaataatgtgacacgccacgtgctggtgtcacggcatggagtctcrctgtgtcacccaggctggagtgcagtggtgtgaacacagctcactgcagcttctacctcccaaggctcaagtgatcctaccacctagccttccaagtagctgggactacaggtgcgtgccaccacacccggctaatttttgttgttgttgtattttttgtagagacagggtttttgccatgttgcccaggctgttcttgaactcctgaactcaagtggtctgccctcctcggcctcccggagtgctgggattatgggcataagccaccatgcctggctttttttcttttttttgagacggagtctcactcttgtccccaggctggagtgaagtggcacgatctcagctcactgcaatctccacctcctgggttcaagccattctcctgcctcagcctcctgagtagctgggattacaggcacgcgccaccacacccagctaatttttgtatttttagtagagtcagggtttcaccatgttggccaggatgatctcgatctcccgcctcggcctcccaaaatgctgggattacaggcgtgggccaccgtgcttggcctcttttctttttttttggttttgagacagggtcttgctctgtcatccaggctggaatgcagtggtgccataactcgctgtagccttgaccttctgggcttaagtgattctcccacctcagcctcccaagtagctggggctacaggcatgcgccaccatacctgactcattttttgcatttttgtagagatgaagttttaccatgttgtccaggctgatctcaaactcctgggcttaagcgacctgccagctcggcctcccaaagtgctgggattacaggcatgagccactgtgcctggctgagttgtacatctttttttttttttttttttgagacggagtctcgctctgttgcccaggctggagtacagtggcgtgatctcagctcactgcaagctctgcctcccgggttcacgccattctcctgcctcagcctcctgagtagctgggactacaggcacctgccaccatgcttggctaatttttttatttttattttttgtagagatggggtttcaccatgttagccaggatggtctcgatctcctgacctcatgatccgcctgcctcggcctcccaaagtgctgggattataggtgtgagccaccacatccagccagagttgtacatctttttttttgagacagtctcgctctgtcgcccaggctggagtgcagtggcatgatctcggctcactgcaagctccgcctcccaggttctcaccattctcctgcctcagcctccccagcagctgggactacagcacccaccaccatgcccggctaatttttttgtatttttagtagagaaagggtttcaccgtgttagccaggatggtctcgatctcctgacctcatgatccacccgccctggcctcccaaagtgtgggattacaggcgtgagccaccgtgcccagctggctgtacatcatttttaaaggcaaaggatatcccctcccttcccttccctttcttcctggtagctacagcagatgaggtgggaatgatgagaagatgggggaacagcaagatatgaggagacagaggctggcccctgataccgaagggccactatttacccagtgggtccccaaatcatgaagtcctctaaatactttctgggtttctagtgaatttaatgcatgagtctcaaaaatcaatggcaaaggaaaaaatgaataaaattaaaatggggtcaggagaaaagggccatgggcacacacaggaggggcagtcagtggctgagctaggagctgaagcaggggmattccttaggtgtcatatctcgtccaacccgtagtcctcctccrggaagtcccccaccgtcacgactgctggcttgacaaaggcgccatacttggcctggcattcgaagtagcgtttcccattcacactgcaggaaaggayaggggtgggtgtggtcagaggaccctcacatggctccactctagaagctggcatgggcagctcagcaagcagcacgcatggacttacacacaaatgcacacacagacacctgagtgggaattcttgttacctgccatcatttttccccagtkgctcatcatagcggacaccaatccagtagccaggcttgaaatctgtgagacctgccaacagaagagaaatccctgtgaagcttctggacatagaagaaatccccatgaaatttcaggatcaccctggatccatgcctacccattgagtagaagcctgtcttggtgaaaaccatttcttgctacctctattgctaccactaggaccacctccagctcctgccgggactaatatggtagccacttcactggtgtccctgcttccacccctgtcccccattcactgggtgaagacaccagccagtgagggctttgtaaaaacctaagggggatggcactactgccttgccagagagagaggcttcagaataaatccaacctgctgacagcttgatcttgaacttctagcctccattactgtgagaaataactttaagttgctcagtgagtggtactttgttagcaaactaatacacaactcagcgacaaaagacagcatcccaatgaaaaactgagcagaagaatatacaaggaactcaaagaacacccactttgcaaaaaaaaaatcccattacaaagtgggcaacaggaagttgaggctgcagtgagccacgatcatggccaaaggacatgaacacacacttctcaaaagacgacatactggccgggtgcggtggctcacgcctgtaatcccagcactttagtaggctgaggagggtggatmacgaggtcaggagatcgagaccatcctggctaacacggtgaagccccgtctctactaaaaatacaaaaaattagccgggtgtggtggcgggcgcctgtagttccagctactcgggaggctgaggcaggagaaccgtttgaacccgggaggcggaggttggaacgagcgagctgagatcatgccactgtattccagcctgggcacaaagcgagattacgtctcaaaagaaaaaaaacaaaaccaaaccccgacataccgatgggcgcagtggctcatgtttgtaatcctagcactttgggagatccaccagctcaggtggatcacttgaggccaggagtttgagaccagcctggccaacatggcaaaaccctgtctctactaaaaatacagaaattagccaggtgttgtagcgctcacctataatcccagctactcgggaggctgaggcatgagaattgcttgaacccgggaggcagaggatgcagtgagctgagagcaccactgcactccagcctgggtgacggagtgagactgtgtgtcaaaaaacaaaaggcaaaggatctgaatagacatttctccaaagaagatacacaaatggccatgcaaagatgctcaacatcattagctgccaaagaagtgcaaatcaaaaccatgatgatgttccacttcacacccagtggatgactgtaagcaaaagacagactaaagtgctggtgaggatgaggacaaaatgggacccttctgcactgctggcgggaatgaaaactgctgcagcggctgtgggaagcagtgtggcaggtcctcaaaaaagtcaagcacagtgttaccatgtggcccagggattccactcctaggcacagagaaatgaaaacaaatgtccacataaaaatgtattttttattttttgagatggagtcttgcatggttgcccaggctggagtgcagtggtgtgatcttggctcactgcaacctccgcctcccaggctcaagcgattctcctgcctcagccttccgggtagctgcgatcacaggcacccgccaccacgcccagttaatttttgaatttttagtagagatggggtttcaccatgttggccaggctggtctcaaaattcctgatctcaggtgatctgcccaccttggcctcccaaagtgctggaattacaggcatgagccaccatgcccagccacacagaaatttataaaagaatgttcaggccgagcatggtggctcacacctgtaatcccagcactttgggaggctgaagcaggacgatcacttgagcgggaagagtttgagaccagcctgggccacatggcgaaatcccatcctacaaaaaaaaccacaaaactttagccgggggtggtgatgagtacctgtattcccagctactcaggaggccgaggtgggaggatggcttgagcccaagaggttaaggctgaaatggccgagattgtgccactgcattccagcctgggcaatagccagatgctgtctcaaattagaaaaaaaaaaaaaaaaaaaagaagaaggttcatagcagcattattcataatagccaaaaagtggaaatgaccctaatgtccactaactggtgactggatacactgtggtctaggcgctcaatgcaggactatttggcaacagtgtggcactgacacaggcatgccacggatgaaacttgaaagcattctgctcagtggaagccgccagttacaaaaggccacagactgcatgatcctattcctatgaaacatccagaatcggcaaattagagacagacgtaaattagtggctgaagacgactgggggatgggtacacacaggcataaagacggaaataccagacagtggggatgccagaaacaggagggtggtgagggttgaaaaattatctgttgggtacgatgttcacaatttgggtcatgggtacactagaagcccggtccccacccactagcaggcaacacacccatgtaacaatacatatatgtaccccgtgtatctttttttttttttttttttggagacagggtctccctctgtcacccaggctgcagtgcagtggtgcgatcatagctcactgcagcctcaactcccgggctcaagccatcctcccacctcagcctcccaagtagctggggcacctataggtgctcaccaccacaactgacaaaagttttgtgggattttttttttttttttttttgtagagacagggtctcattatgttgcccaggctggtctcaaattcctgggttcaagtgatcctcctgtctcagcctcccaaagtgctgggattacaggtgtgagccactgcacccagccttttttttgagactgggtctttctctgctgcccaggctagggtgcaatgacacaatcatagctcactgtaacctccaactccggggctcaagcaagcctcccaccttgttctcccaaagtgctgagtttacaggcgtgagccatcatgcctagcctgttctttttaaaaaaatccacactgctctccactgtgacgccgccctgcccatgcccctgactacacttctcccctctcctcccgctccccttccccaggtggacctcctgcgctctgctcacctgcacccgctactccttctggcgggaactcttcctcccttttcacctggctgctgcctcctttccttcagatgctcccagcctccaggtgcttcctctgggctcacacagccccctgtgttccctcactcctgccttggtcacgccgccygtttccccacygcgactgacactgccccacgcttcgaagcgcacaggccgcgtgcctctggcttctgcttcctccctcgctggacagatcactccgcctgcgcctcccacttccctccacaaacactctgggccgtcagtgtcggcagatggttccgtcacctccagggactgagatcgtttcgagtcccccccaaccccgcgcccctaggcagagcgtggtctccgaggctccactgtgcccccaacatttcctcccggccttggagccctggagccygggaccgggcccgcgagccacgcacctacatacatgacggtgccccggcgaggggattgtcccgccgcccgcacctcacagcggctgcccacggggatggagctggcctgggccttctcctcggccaggcgctgggcggcctcggcctcctgctgagcccgctcytcctcgttgtaccggccgagcttkctgcgcttcaggaaagagcggaccgtgtctgtgggcagagggggctggggtcagttggggygtcggccgggcctaacaggatgacgctccacccacgaggggcccacgttcacggaggaactctctcttccaggtgacaaagggctgtcacccaagccccaggtctcccaccacagccttagcctctcccaggactcctaggccccccaactccacaatcgtaaatggaargggtgccgcctgcacccctcactacaggacccatggtctctcaccccttcagcgcacatctgccttcatcatccgccttcctcctccgccctcctccggccctgaggcccccggtctcccccaacactcgatccgtcccaggcgccctcactgaccgccaccctgtccactcgcattccacctgtcctgccctccacaccccgtccgaccgccccatgcccccatctgaccctgacaacacccagcccccacacctacccctcaactccctccactttcccagccctcccccgaccacgtctgactgcccatacccctgacacctcccggccctcattcccaccccaggcctccgtctgtccccactcccagcctcacccctatatcctcccaagctctcggccccccgtctacaccactggcctccctgcaggggccctgtctaacctgcccgccctcatacctgcacatactccctctggcccccacgmacccctcgacgcccacctgcccgtaccttgcctctggtcgtaggcttcttgtgagatcgtgtacttctccacccgggacacgtcctcatactcaccaaggcgggcrccactgtggtcaatgacctgtgtgaggggaggggctccgtggggatcagggtctggccagggaggcctgggtgctgggtgcagggacttcagtgtctccatctgggaaaaacgcatctccctccctcgcctgtactgcagccttctcttctctcctgagcccagcggaagggagaagtagctacgtacactggccacctccccttcctcacccccatccaagctcccagaggctgcctctgtccccagaagttccccgcttgctggcatcaacatcgccaagggccccaaagtcacagagtccaaccggcagagctcaggccttgcccacagccctgtgcacagygcatctcctcgatgggcctctgrgactctcctaagctggccccaacctcaggccccagagcatctcttcctgttctgcccccactattcattcattcattggtttccgagctcccaggggcccagctgggcctcatgctggggactcagtgtaaacacagacgcactctgccctcaggctgtgctcattgtgcagggagaaggccaaccacaaacaaaggaacaggtacctatgaaacactggaggatggctatggagaaaaatatgacagggaagaggcttaaggagcatgggagggtaggcttcccaaaagaggggatgtttcagccaaggctggaaagatgagcaagaacggcaggtgcagacggccagaggtagaaatgtccttcacgctctagagtgggtggtgcgggtggggtggagcgagccagagggagagtggaagacacaagggactgctggagactttgggttttttttttttttttgacggagtctygctctgtcacccaggctggagtgtggtggtgtgatctcagctcacggaaacctctgcctcactgcaaattcaagtgattctcctgcctcagcctcccgggcagctgaaactataggcacacaccaccacacccggctaatttttgtatttttaagtagagacgacattttgccatgctggtcaggctggtctagaactcctgacctcaagtgatcttcccacctcagcctcccaatgtactgggtgggattacaggcacgatccaccgcacctggcctagactttggtttttatctggagcgaagtgccaccagggcagggctctgagctaggagggccctggcctgactcaggtggtcccaggctccctctggctgagatggggagcggggaggccagggaggaagctgccgggatggcgaggttgggggaaggatggaggctggaccagggtcagggaagtttttgtaggtggagccgagaggatttgatgagagtggatgtgggggtgagggagagagcgggcccaaggaacaccctgaggtgtctggcctaagccactgggctaacatggcaaaataggaatggcctttayctccggatgaagcgtcactgagaatttctgttgagaattttcacaaatttgaagttctgttattttaaacaatgaatatgggtgatatttataaagagaaaaagaattttagaaaatgtaaaaattccccagtggctccactctggaacaccttccttgagtggcctgggaggtctgtgtgtacctgaaccgcctgttatgaaacctgctcaaagatgccactgcctatgaggtgcctatgaacacccgcaccccttagcttcagctgcccagggtggcccaaaggctcagtcctgtgcacccagcagaggcctgacccacagctccagacctcgtcccctcatcaggactctcacagcagccccttcctggtctccctactcttcctgtcctccaccayctgttccccacacacagccagagggggcctgtgaacacctgagccaggtcagggtcctccccagcttccacagtgtttggccacagaagtggcctgtcttaatccccaccgcgctccctcccaccttggagtgtttgctgggttgtgccccactcctagggcaccccttccccatcttcagttaaccttttttttttttttttttttaaagataggatctcactctatcatccaaactggagtgcagtggtgtgatctcagctcactgcaacttccagctcctgggttcaagtgatcctcctgcctcagcctcctgagtagctaggattacaggcatctgccaccacgcccagctaatttctgtatttttaggagagacggggtttcaccgtctcgaactcctgaccttaagtgatctgtccacctcagcctcccaaggcactgggattacaggcgtgaaccaccatgcccgaccaattctttttattcttctcgtctctgctccagcagcaccacctccaggatgtcctcccagacgtcactgatgcatcaggtaccccaggatagggtctcccagcttcatgatctcctacacaacccttgtctcccctgacccttcacattcagtcctctggccatttagccaacatctgcctcatacactagaacttctcagatgcagtcataatgaaacccctggcacaacacagatggggaatgaacagttaatcaacgagagaaaaaagaagcagttctctctagagtcatgtagactggggccaaaatgctactgacagttcatccttaagaaagtagattctgggccgggtgcggtggctcatgcctgtaatcccagcactttgggaggccgaggtgggcggattacctgaggtcaggagttcgagaccagtctgactaacatggtgaaaccccgtctctactaaaaatacaaaaattaccctggtgtagtggcgggcatctgtaatcccacctactcgggaggctgaggcaggagaatcgcttgaaccggggaggcggaggttgcagtgagccgagatcatgccactgcacgccagcctgggagacagagcaagactctgtctcaaaaaaaataaaaaataaataaataaactccaccctgaagctaaattttctcttctgcaaaatggggataattacattatccttgtggtcttactttatggattcaattcatcattcaacaatgattcacagggctgggcgtggtggctcatgcctgtaatcccagcactttgcgaggctgaggtgggcagatcacttgaggtcaggagttcaagaccagcctggccaacatggtgaaaccccaactctacttaaaatacaaaattacaaaattagccaggcgtggtggtgcacacctgtaatcccagctacttgggaggctgaggcaggagaatagcttgaacccaggagacagaggttgcagtgagctgagatcacaccactgcattccggcctggggaacaagggcaaaactctgtctcgaacaaaacaaaacaaaaaacgattcacggactatcctccctgtcccaggcactattccaagtactggggacacagtagtgaattatagtgatcaaaatttccaccctcagggcactcgaatccagggagacagagagtaaataaaccagatgagagaaatccagagtgtgtcagaggagaattacttgtaaacacaaaaatctaaaataaagcaaagaaggggaaaggaatgaggtaaacgttaacactgaggccggtgaagacttcactagaatactgacactttaaattaagacaggaaggaagggtgaggcacgcaggcatatgacaaaagaaccattcaggcccaggatccagaggccgagctcacctggactgtgcaaggagcaatgtggctgctacagactgagtgaggtcgggagggaataaggacagaaaggggctgggcttggtggctcacgcctgtaatcccagcactttagtaggccaaggtgagctgatcacttgaggtcaggagttccagaccagcctggccaacatggcaaaaacccatctctactaaaaatacaaaaattagctgggtgggcacctgtaatcccagctactcgggaggctggggcacaaggatcacttgaacccaggaggtgaaggctgcagtgagcccgatagtgccactgcactccattccaggttgggtgacagagtgagactctgtctcaaaaaaagacagaaaggatgtactgagtggatgcacaaagagatcctgtgttctggtttctcccaagctgtccagcctggtcgctcactgtgacctacctcacattctaggcctctgtacaccctgctccctcctttccacctctttctcttaagtcaccctttcctcatccctcagctcagacatcccttcctccaggaagccctctctgattctcccaggtggagtcaggcacctcttcttggtggctccagtcccctgggatttcctgatcccagcccagaccactctaggctgtccctgtctaatgatgggtctgtctctcgtcaggctgcactggaggctccacgaaggcaggacctatctcgggtatgactgagggcaaagcccagcaagtgtctgttgaataaccaaatgaaaggtggggtgggggagtgtcccagatagagagtcctcacgtggatgcggcagccgtcatctacagggtaggagcccaggagcgcatcctcttgatccagcttgctgtagaacttgtcgtcaactccatacagctccagttccatgcaggaagcagggctgcccaccagcaactccagtttacactgtgaggaggaggcagggtgagaagaaggaggccacggaggccccgccccttgcatcaatgaccatcgccacgtccctttkcctccaaaagaccccccagtcaggacgcacggggccgcaatccagcccctcgcctcttgcccccgccctctggaccgtcggatttttcgctggacccggccctcatctctgcactctcgagttctctccggacccgccccgccgcgaccgggtccccagcctccgcagcctgggatcacctccgggcccgcccagtcactccccggcccctcccagcctcccccttccgggaaccccccaatttcttcgccccgcccctccggaccccgcccccatggccacaccttgaactcagcgatggtgaggctgcggctgtatcgcttctcggagcggaaggtgttgagggagctgctgatgaaaacggtcaccgtgggtgccgacacccccgtcacctccatcttgccgcgccctgcggatgcctgcagcgcggtccagccgcctcacacccgctccgcagccgccgccgcygctgctgctgctgggctatcagccccgcctcctgctccgtgcctgaccaatccgcgctctcctgccaggagcgtccgccaatcgccgccgtcccttccccaccgscaggaagagggctctccttactcttgggccagcccagccaatccagaggggccttccatagttcacggttcttccaatagcggcccgggaaaggaccagaacaggcggcgaagactgaagcccsgaggtaggagtggcaagagytcgcccagtccgcgaagggtaaactcgcgcatgcgcactggccttcaaccaagccaagcrccttggcttctgtcctggatgctcagtgttttgcggtttacgatgcgcatcgttttcccggctctggcaccagatccatactattctgtaaactgaggcggcgatgcccaaaaattggaagcaattactctaagatatcaaaagattgaagcaagccatgaaacctctgcgcggagagagccgagcccgaggcggcggggagccagcamgtgtgcgcagctccgccctcttttggcgaagcacctaggcctggcccctcccgcgacctgtagcgcggcggagcaagcgcrgaaggctgggagggctgcgcggrctgcgcgtcgccatggagcccgacgggacttacgagccgggcttcgtgggtattcgcttctgccaggaatggtgaggcggagggagcgggtgatgttagaaggygggcgaggartggctccagractaacccctggcacctccccctccccacagtaacaacatgctgtaccccaaggaagacaaggaraaccgcattctgctctacgcggtgagcgcyggggtcttccccggcaggtccacctgttcccagcgtggccccgccctgccccctgcctctgtgatcggactccctgttcgccctccgctgcacctcaagtgatcctgactctcatgtcctgcccatccccaaagagagtcctgtcgtcatatcctccgggatcaccctgccctctcctcccaatcttgtctggaatccttccgtgaccccctttcccccacactcgccctctcgtagtgccggaactgtgattaccagcaggaggccgacaacagctgcatctatgtcaacaagatcacgcacgaagtggagtgagtggcrggccctgagctgggggcgggggtgttggctctggaggctgggtctgagcgtaattttgcacccccgcgtccctgcagcgaactgacccagattatcgccgaygtgtcccaggaccccacgttgccgcggaccgaggaccacccgtgccaaaagtgagcgttcagctggtactggggaggtaaagtgaggctcgtctcctcactgggcgaagggaggagggaagggtgtgaagcctccggtgaccgagcccctaccctctcaggtgcggccacaaggaggctgtgttcttccagtcacacagtgcgcgggccgaggtaagtgscgcgagggctttctaagtatckggggcttgtttggtcctttctgggggcggggatatcartgtgggtgaccctgcgcttcttggaactctgccgggcccttacctattggtgaagttctcttgcctgttcttttggggtaaggcgctgctgggtccaaatccttcctaaccatgcatcatttctgccaggacgccatgcgcctttactacgtgtgcacagccccacactgcggccaccgctggaccgagtgacctcctctctcccccgagtgtaataaacaccagattccatgcgtgagttttctgtgtttatttgcctcgtggggaggacgctggcacaccgtatcaggctgcgcggtgcagggcgcggtgctgtgcgtaggtgtcgggccgggagctggtgaagccgcagtcctcgcacacgtgcagcttctcgcggcgctcacggtaagcgtagctggccggctgtccatgcaccttagcaaggtgagcttccagggagcagcgctgcgtaaacgctttcccgcaagcactgcagcggaagggcckgatccctgcacagatgggcgcagaggggagggctggacagagagggcaatgggctctggactaaagcgcccccaccctgctttccagtgttgagcatttctggtacctattccaagctcttcagactcttccgcccatgacccaccatctgctaccgtcacccagtgcagacatgggccagacacctgtgtctccactctccctcaccaggatgctccctcccctgggggatggagagggaggccttcccttgcctttcgatctggagcctgaatcgtataaccggcatccgtctgcactctgcattccgtgacaggcccctattttggtgccaccttacacccacccactggggtccgagagacatcatgtcttgattctccataccccacatacacaaaccatggacactccacagcccagcacctctctccatttccttccatccccacctggggcccagcaacttttccctgtccctgccactgctcaccagtgtgagtcctcatgtggcgcttgagatcgaaggcgtcatgaaagcccttgccacaacagcggcacaggtggcggcgcacggggctgtggcacttgaggtgccttgtcagcatgcgctgcagagggaaggccttagggcagagcgggcagcccagcgtcccwgggcccctgggagcagaggtcaggttkccctgtgtgggctgctggagggatgcaggagttattagcctctctggctggaccccatccaccctttgttactctgcaaatgagtatttacagagtgtcctgagccaccacggaggattaggaaggcaggtgggagacagtgattagtgtgtgtgcctgtcactctccagggccttccctcactatcccatggtccttactttctctatgccaagtcccatcttctgatgtgacatacacatttttttttttttaaagacagagtcttgctctgtcgcccaggcaggagtgaagtggtatgatgtcaggtcactgcaacctccgcctcccgggttcaagcgattctagtgcctcagcctccccacgattacacgattgtaggcatgcgccacatgcccagttaatttttttattttttgtagagatggggtttcaccatgttggccaggctggtcttgaattcctgacctcaagcaatccacccaccttggcctcacaaagtgctgggattacaggcatgagccactatgcccggtctatttttctaattttattgttttttttgaggggggatggagtctagatctgtttcccaggctggagtgcagtggcgcagactcggctcactgcatcctctgccctgcctcctaggttcaactgattctcctgcctcagcctcctgaggagctgggattacaggcacgtgccaccatgtctggctaatgtttgtaattttagtagagacaaggtttcaacatgttggccagcctggtctcgaactcatgacctcaagtgattcacccgcctcggcctcccaaagtgctggaattacaggctgactaattttattgtctatacatgcagccccaaccagaatataagctccataaaattgtggatttttgtcttattcccgctgaatataacagcccatgcctagaacagtggcttgctttcatgaatatattacattccggctggcgctttccttcctccaatgcatgcacagctgaaaaagcccttatctcccatcgcactcctgttgccttgtcccatgttctgacataaagcggatcatccacatgtggggatgaatcttgtgccccgctggaagagatccctgtggctgccggccctggtgcctggggtgagacctaacagtagagagctcactactaggaaaggagaggcattcccaacacagagaagtaggggcggacaggtcccgaggctggagggcgtgtgcagatgggtcgggggagcaaggggctgtcagcttcattaaggctgagagcaggcaggagcgaaacagctggctttgctagccagttacacactcaccgctgtccacggatccctgacactggacgactgttgtgccggtggcccccccaggctgctgcagtctgaggagaaaagccagatggtgacactgcgtctctcctgccccttacctccaggcacagtgaggggcccacctgggatataggcatctccccggagctggtcaggcagatggccccagttggggggctgtggacgccgactcctgaccaggaaggcgcggggcatgccctccrgaaggctctccacacacaggggctgcttccacctgctgtcagacctcagccccaggatgactatccctggtgggaaaggaggggaagcctctgaggaacctcattctcttcatgcaaatttcctggctggccctgggagtggactaagctggctcaggttacccctgcctggggacctgcccatcttctcccaggttttggagggaaccatccagcctccaggggtggacaagcactaggaccaccaagcagagccaggcaaggggagatgggcctggggagcttttgaggataggaagaagaaacaaggccccagggggactgtctcccaggggttgagggtctgtttgccaggcaaatcagtcaccaggggacatccagcagcctgcctggttattcaaatcacagcagctgtctgaggacactgaaggggccccctgctgtgattgccctgctctgtagggtgcagggaggacagcagatctggataaatcagggcaaaatgaggatccaggctgtgcatcctcaggtaggatgccccacctctctgatcttcagattcccagggctaacattcagccagaagcactgttcaggtgtagcaggcactaaaatactagtttgttaataatctagcccctagttactgcctgggacaacactcttcctccctcccacagtctggaaagtaaaagggggtctcctatttttttttctttttttgagacggagtttcactcttgttgcccaggctggagtgcagtggcaccatcttggctcactggaacctccacctcccgggttcaaacgattctcctgcctcagcctcctgagtagctgggactacaggcatgcaccaccacaccgggctaatttttgtatttttggtagagacagagtttcaccatgttggccaggctagtcttgaactcctgacgtcaagtgatccgcctgccttggcctcccaaagtgctgggattacaggcatgagccaccgcacctggcccaaagggggtctcttgacacagccaggggctcccaggaccctaccccggcacactggccaagctgttttacacttgattcttagccagaagactaagaagcaatccaagctctgttttttaattttttttttttgaggcggagttttgctcgttgcccaggctggagtgcaatggcgtgatcttggctcctctatgacctccgcctcctgggttcaagtgagtctcctgcctcagccttccaagtagctgggattacaggggcacaccactgcacccagctgattttttgtgttttttgtagagatggggtttcaccatgttggccaggctggtctcaaactcctaaatgcaggtgatccgcccggctcagcctcccaaagtgctgggattacaggcgtgagccaccgcgcccaacctgtttttattttttttgttttgttttgttttgttttttgagacagattctcactctgttgcccaggctggagtgcagtggtacgatctccacacactgcagcctccgtctcctgggttcaagcgattctgctgcctcagtcccccaagtagctgggactacaggtgcgcaccaccacacccggctaatttttgtatttttagtagagatagggtttcaccatgttgggcaggctggtctcaaactcctgacctcgagtgatccacctgcctcaacctcccaaagtgctgggattacaggcgtgagccattgcgcctggcaactaaacaattttctaagctccagacctagcttactgaaaatgatcgcgtaagtccatgaaggaggcacaccagtgacagcccagaatgaccaagacagtgagaggcaagtgaggcagagacccagccatgatggggaaaagaggggtacctggggacccgaacaggctcctgatccaggctacgggtacagggatggcttcctggataagcgctgaaaggtttcagatgaaaggggagggtgttctagtcagagggggacatctgtacaaggcttgctggtgagaggagtatttcttcatttctttacattgcccgagagtcagttgtgccaattcatttggggaagcaagggtggcagtgctgagggtctgctggccatgcattgccgcttgctctctgcaggacccagagcaagtcatttctcattgggcctcggtttcttcacctggaaaatgagactaaggaatctccctcttcccagtttgtattgaagatccatgtagctcacatggagggaatgcttagcatggggcctggcatgtggcagacatataagcagggattggttaggaaggttttttttttgtttttttttttgagacagggccttgctttgtcacctaggctggagtgcagtggagtgaacacagctcactgtagcctcaagctcctgggctcaagtgatcctcccacatcaacctcccaagtagctgggactacaggcgtgcaccaccacacctagctaattttaaaattttttgtagaggtggagtcttgctatgttgcctagggctggttttgaactcctgagctcaaaccgtctgcctgccttggcctcccaaagtgttgggattacaggaatgagccactgcatcctgccgaggaatccctcctctgggcaaacatccaggcctcaggtgggtcatctgcaaaatggggtttcaggtggtgtctccattttgcaattgttggctttcctgcagccctgactgggatgcctggcacgggcctggcagctcaggacccaggagctgtcctgatggtactgctatggggaggccaagggtagatgtgggggtagaagcagggggggagttgcagtgaaagatgaactgttttccttccagggacccagttccccaggaaccctctcagtcctgttctgccctgctccatggcctaggaggttgactggaggcggggtcacctgggcttctatgcactctggcttccagtaggatttggacaatggggtgccctgcaggaggggagtaaggtcagggtgttgattctcactccgtcctgtgtgggagtcagggctgcagctccctcagcactaccctctccctgggatttgctcttttgggttcttgttccttctctttgtgccttgtggcctgggggtggtaacagctcccagggtgccagtcctggggttctgcaccagcctcggtggtttcccagtccctgctgctcctttgcaaatgatcccttggttaaactctttggaatatcccatctaagcatgctgtcatctttctgctgggaccctgtcagctcacaaaccacatgcacacatgctgcaccaccagcagtggcttcttaaccaggtggtttatcctggttaagaagtatggagaaagtatggtccttccaggacagagcctggcatttggaagagggaagtggcagacatgctggatcctctctgattaccagcccacttgcctttcttattgagag

SEQ ID NO: 95153 - DNA, 25473 bp, Homo sapiens
aattctgaccacctgcccctgcacctggcctggagaggcgggagaagcaaggtccctgtatgcccagccccttgctttcatcctcccagggtcgagggggcggggtgacctgctcaggaggtgaagggcattgctgggcccattatcttatcagggagatgcaaacactgtacccaaagtcacagtcacaatgactcctgtcacttggcaaacactccccaaggccagcctgggccaggcaatgcagggcacacagtggtgactgagacatcctgggtcctgccctcatggatctggagggggagatgaaatgtcaccaaagcatgacagcccagagtggtcagggctgtgatggaggaattatagggtcagagtcgtcaggactgggatgggggaagcacaggcagggaggtgggggctgtgatggggaccccaggggtctgtggaagcccagggaggtgcctgactcagcctggtgggtagtccaaggcttcccggaggaaggatcatctgtgcttaacaggaaaggtgaggagtggttaaacatggggaggaggtagggtgcacacttcaggtagaggaaattgcatgtgctgaggttttgaaatgatcctttggaaaagcagaaggcctgggcgggcaggatcccaaagcatgaaagggaaaagtagaacatgggaaggaggaggaatagccaggggtctgatcccatcaaggtttacagggcgctgggttcctaagagtgtgtatggctacaattctaggacattattgttcaaattccccttcaaacccaagtaatgttcaccatccacatttttttttttttttgagacggagttttgttctgtcgcccaggctggagtgcagtggtgcaatcttggctcactgcaacctgcgcctcccagattcaagaggttctcctgcctcagcctcccgagttgctgggactacaggcacccgccactgcacttggcaaatttttttattttttattttttattttttttgagatgcagtctcactctgtcacccaggctggagtgcaatggcgcaatcttggctcactgcaacctccacctcccaggttcaagcgattcttctgcctcagcctcctgagtagctgggattacaggcatgcgccaccatgcccagctgatttttgtatttttagtagagacggggttttaccctgttggtcaggctggtcttgaactcctgacctcgtgatccacccaccttggcctcccaaagtgctgggattacaggcgtgagccactgcgcccggccagatttttgtatttttagtagaggcagggtttcaccatgctggccaggctggtctcgaactcctgacctccagtgatatgcccgcctcagcctcctagtgctgggattacaggtatgagccactgctcctggaccaccgtccatttaatagtctgtcctctgcccctctttctcaagaaaagaaaatttttttcaattctgaccactaattgttctcaaaaaagtttccaacgttctgtgtgccccaggctcagagaaacttgcactactgtggaccatgtcacacttgcaacattcttgtgagaagtttctttgcccctgagttgtgctaggggttgtccatccgcctgaaatggcatcgtgcggtccacccaggctgcattccagggtgccaaagacttggaacacttcccaacttatccagatcctgcctgtggactaaggcctcagtgttcacctcccagagacaggggttagtattgcttagacacacggtgaaataataaatgacccaagcaaagaccttccccacaaaaacacacaacttgcataccatctgaagactgcaaaattaggggagtaggtaaaagtatttacccatgaacctagctgagcaggggatggtcagaatggacaagggtggctgggcgtggtggctcacacctgttatcccagcattttgggaggctgaagtgggcagattacttgaggtaagaagttggagaccagcctggccaacatggcaaaaccccatctctactaaaaatacaaaaattagctgggcatggtggtacgtgcctgtagtcccagctacttgggaggctgaggcaggagaatcgcttgaacctaggaggtggaggttgcagtaagccaagatcgtgccactgcacttcagcctaggtgacagagccagactccgtctcaaaaaaaaaaaaaaaaaaaaaggacaaggccttgggactggcacaggcatccactttaaggggttgggtgtgggaggtctggagtcttaggggaagtgctgggggctcaggcagtggctgtatttctttcaattactttaactaccagggcagctgggtgccagccctggctgtggcactgtcttgagtaaaaattaaagagggcatagaatggtttcctgatcactccctaaggctcttgagacccctccccaccatgtccaccctgctctagacaagttacagactccaaaatggggcatggcctgacacgatgatgctctggggcaggggatkggggggacacacatcccttctgtgttcctgccagcacacaacccgaacttaatcacgaagaaccagcagcaaagccacactgagcgaagtctacaaaatcactgaatcatactcttccaaaacgcccaggtcatgaaagacaaggaaagatggaggaattgttacgcaatggaggaagccaaaatgtgaggtgtggtcccggactggatcctggactaggaaaaggacattagtgggaaaactggggaaattcaaataaatcctccaaatcatgggtgtccaatcttttggcttccctgggccacattggaagaagaattgtcctgggtcacacataaaatacattaacactatcaatagctgatgagctaaaaaaaaaaaaaatcgcaaacaaatctcataatgttttaagaaagtctacgaatttgtattgggcagcattcaaagcagtcctgggccacatatggcctgcaggccatgggttggacaagcttgctctagattatttactagtgttttattaatgttaatttcctgaatttgattattagactgtgcttatgtaagaaaatgtccttattcatagaagacacatgcctaagtatggataaaggggatcctgtctccaacttgcttccaaatgattcagccaaaaatttaaaaaattctggccaggcatggtggctcacacctgtaatcccagcactttgggaggccaaggcgggtggatcacttgagaccaggagttctagaccatcctggccaacatggtgaaaccccgtctctactaaaaatacagaaattagctgggcatggtggcgggtgcctgtaatcccagctgcttgggaggctgaggcacaagaattgcttgaatccaggagacagaggttgcagtgagccgagatcatgacactgcactacagcctgggcgacagagaaagactctgtctcaaaaagaaaaaaaaaaaaaatctatcaatcatctatcatttatgtatccatctatctgtctaacatctcttatctatctatttttctatttttttttttttttttttttgagacagagtctcactctgtcacccaggctggagtgcagtggcatgatctcggctcactgcaactttcacctcccaggttcaagtgattctcctgcctcggcctccctggtagctgggattacaggcacacaccaccacatccagctaatttttgtatttttagtagagacagggtttcaccatgttgaccaggctggtctcgaactcctgacctcatgatccgtccacctcagccttccagagtgctgggattacagatgtgagtcacagtgtccggcccagtcctccttctaatgaacaccaaacaaataaaaagaaaacacagtgtcaggttggagtaggaggtgtaaatacagtggggtaaaggaacagaacacagtgtgcagtattacagaatggactctctgaagaggtgacatttgagctgagacctgaaagaggtgagaaagccagtgcagacatctaaggaagggggcccaggcagaaggaactgtaagtaccaaggtcctgaagcaggaacgaccttggtctgtgcaaagtgcagcagagaggtcagtgcccctggaaacctagcagcaacagaggcaggacaggtgaccagggccagatgttgcaggaaggagtgcagagtttattctgagtgggaagggaaggctttggagggttgtaagcagggggtgacacaagctgtttgacatacatggctcagagctgatgggagcccagtgagcgagtagattcactacaaggacagcatgtggccccacgccacctcttctttggaggtttcttctagcaggctggggatgaccagccgtgtgggtgcggggaggagctctggctgcccaacagctttgagtttcccaggtgacctgccccagtagagaaggacattgccagggcagttatcttatcaggcgcacgctcacctgctcctggagacacgctcaccccataacataccaaggtccccaccattccactggcccagcccctcgctgctgctgcccatggaggtccctacctgagggatgaggagggagtccccaggcctcctggcatctgtcacccaacaccaagatcaagccaagacccttggacacatcctttccccatgttgcaccttggtttccccatctagggtagggacggggaatggttgagagctgtaaagtctgtagctggatatgtgagtccctgtgagcctcagtttccccctctgcacaacaggaatgatagttctgcctgcacagggttttttgcaaagacccgtgaggtcacacgtgcagagcctggcatgtgtgtggtgctgctgcagtgaagtttgggtttttccattggtggtgccatagaagagctaggctctggggtcaagccctggggtcaagcccgggctggaaccctgtccctaattcttagacgttgaaatcttctgcaaagtccctgatgggggctaagaagagaatattgctttacagggctgctgttagatgctaaggaaaccatttgagtgacacacagagcacacccagcccatagtgaatagtcagagttcagtaaacattcagccaccatagagagtgttgtaagcatggcagggcatggtggctcacgcctgtaatcccagcactttgggaggccaaggcgggtggatcacctgaggtcaggagttcgagaccagcctggccaacctggtgaaaccccgtctctactaaaagtacaaaaattagctgggtgtggtggcatgtgcctgtagtcccagctactcaagaggctgaggcaggagaatcacttgaacccgggaggcggaggttgcagcgagctgagattgcaccactgcactccaacctgggtgtcagagtgacactccatctcaaaaaaaaaaagaaaaaaaaaaagagtgtgggagcaccctcctcttccagttgatcaggcacgtgctatttagactgaaagaggacactctgcagccagctgatctggttctcactccattatgtcctagcctgtgatggagccataggagaatgactcaacccctccatgcctcagtttccccatctgtaaagggtcttgtcccctcaaagggttattggaaggttaaataagttagcacatggaagccgtcagcacaatgcccagcgcataatgagcaccttatgtttgctcttcttgttgctgcagcggttcccaggggctccctgatctcagggcaggttgacatggggggatctgggcaggggaggggggggccagcccaggagggaatgcctgaggtgcccaggcctagaggtcaccccaaggagcctgtaatcagctgtggtcgggcggttctgctccaccccaccgccctccctgggtatatcaggactggtccgggcccaggctctgttgggtgggagcacaggcaccgggcaccatggggaaggccgtgagtggggcccaggggtccggggtgcagtggggacaggggttgcagtggaatctgagttctccctccctccatcctgtccattcccaggagaactatgagctctactcggtggagctgggtcctggccctggcggggacatggctgccaagatgagcaagaagaagaaggcgggtggcgggggtggcaagaggaaggagaagctggagaacatgaagaaggagatggagattgtgagctctgactggggaggggcgggagctggagggtaggctgggaaccaggcagtgggcggggagggggccaggagagcccagagcaagcaccctgccccaccccaccacacagaacgaccaccagctgtcagtggcggagctggaacagaaataccagaccagtgccaccaaggtgagctggagactgggagcgtacagaaaggggaggaggagagagggagggagagggagatggaaggagggagatggagagagggagagagagggagagatgaagagaggaagatatggagaaatagagagagggagggaggcagaaaaggaaagagggagggagggagagaggaaaggatggagggaggggaggagagagggagggagatggagagagggagagagagggagagggagagaagggagaaagcattagagagaaagggtgacacacagagacggagagaggagtagctgaaaagagacagcaagacagagaaggcagagacaaataaggagagagcagcaggagagagacacatagaaaggggagcgaggagagagagacaaagggagagatgaaggagggagggagagatggggtgggggcaggaaccaagagacaaagagatgagaaggagcaggacagaccaagctggagaagggaaactgaagcagggggctttccacggggtgtgcatgtggaggaaagcccccaggaccgcctcgccctgcccctctgtcccagggcctctctgcgagcctggctgctgagctgctgctgcgggatgggcccaacgcactgcggccaccacggggcaccccagagtaygtcaagttygcgaggcagctggccgggggcctgcagtgcctcatgtgggttgccgccgccatctgcctcatcgcctttgccatccaggctagtgagggggacctcaccaccgacgacaatgtgagccatgttgtggggacaggctcaggacatggggacctggggatggaagacactgagcctgggacttgggacaagaggggcagagaaggatggggatagacgaacacgaaaggcagtctcaagacaggggtcatggagggtgaaggacattgggatatggatggggcagacccaaggacacaggacacagggacactggggtgaatcttgggtatggggacataggtgggggcataaagagtatggcaatgtgatacgtaagagatgggatttggaggccgggcgtgtaatcccatgcctgtaatcccagcactttgggaggccgaggcgggcagatcacctgaggtcaggagttcgagaccagcctggccaacatggcaaaaccccatctctactaaaattacaaaaattagccagacatggtggcgggcacctgtaatcccagttacttgggaggctgaggcaggagaatcatttgaacccaggaggtggatgttgcagtgagccaagaccatgccactgcactccagcctgggcgacagagcgagactgcatcttaaaaaaaaaaaaaaaaaaaaaaaaaagagatgggacttggaagcagaggacatgcagtgcagacacaggacagactgaggcacggggaataggagaccctgggactcagacataggacaccagggcagggacccaagcctcaggacacagcacatagagagacacaaaacatgagacatagaagcacagagacagagaggaaatggaggtgcagggcaagggacattggacatatggcagagatgagggcaagggacatggggactcagggacatgtgacatgggacagaggctcgaaaagtcatggccatgggacacaggatgggaactcggagatacacagacatgggagacacgggacacagtgactggggagctagaacatgggggccgtggccacagaggacacagaccatgacgtacaaggtctgcagcacacgcagggacggggatgtgaggatgcagggacaagggggcccaggggacacacagagggtggcagcagattatggaaaacccaggatgtgaaactggagacacggggaatacaggccatggggacaggaggagacatgggacagtggacatggggaatgcaaggcttggggacacaggagaagggaacacgtcagaccaaggcacacagtgatttggggcacaagtcacagatatggggacatggaagattgaggattcagggccagaggatatgaaatatacacagaaacacaagacactgagaagacagagcaggcgagtgtgggacatgagggacatgggagggggctaaaggctacagggaatggtgcatggagcttcctagtaggtggggaaaagcatggggaaaaccaagaaaaccagggcaccagggagcaggtcggtggcctcaggcaggcagcttccrgcccctctgaataaccccaccccttccctgtccccagctgtacctggcaatcgctctcattgctgtggttgtcgtcaccggctgctttggctactaccaggaattcaagagcaccaacatcatcgccagctttaagaaccttgtgccacaggtgggttccccagcacccagccactccagatcccagagactccaaactgctcctgtagcctccttccatcaggcccctgtccctcatctgtggcctccatctctccccatgggtcccagctctcctcatcctttacctccccacatgcagcagctcccacccccacccccgtccacctcaactttggtgcccctgccccgcagcaagccactgtcatccgcgatggagacaaattccagatcaacgctgaccaactggtggtgggcgacctggtggagatgaaaggtggggacagagtgcccgccgacatccgcatcctggcggcccagggctgcaaggtggacaactcctcgctgacaggggagtctgagccacaracccgctcacccgagtgcacgcacgagagccctctggagacccgcaacatcgccttcttctccaccatgtgccttgagggtctgtgaagcccccgcctgcctgcccagtaactgctgcctccactggcctctctcctgctatcttctaggacagggggcttcagcctccctgtctctctcctgcatgactgccacctccccrtgactgccacctccccagggcacactgcttctctgtctcccactgtcactaccctctcccaggtcacatcctccactggcagtgactggctgtccttcagctcacacggcagtgcacaccccactgccgccccctatccctgagtcgcgccttggcccccctgcaggcaccgygcagggcctggtggtgaacacgggcgaccgcaccatcattgggcgcatcgcatcgctggcgtcgggggtggaaaacgagaagacacccatcgctatcgagatcgagcattttgtggacatcatcgcgggcctggccattctcttcggtgccacattttttattgtggccatgkgcattggctacaccttcctgcgggccatggtcttcttcatggccatcgtggtggcctatgtgcctgaggggctgctggccactgtcacagtgagtgggggcaggcggggatgcagggagctgaggggcctgctcaaccatctgttctttcctccacatttcccccatcacctccctgcctgtctatctgtccacttagctcccatccattctcctgccttcccatcatccactcattcagcaagtccttcccgaggcaaccctggggcaagtcctgtgccacacattgagggcgcagagatgacgaggccgggtccttaactggaagaggctgatgtcctgtgcaggcagccagcatgtcaccagaccttccacagtcagcacccagctccagaccagtccccagggaggtgcggggaaggttcctcttctcattttgattgtgtgaagagaattttcagaacctcggctgggacagctcagagaggggcctcgctactgtatctgggcagactggggaaggagtcccaaacaaagcactggctgaacaaaagctggggccaagaaaacacctggtgtttgcagaagcacgttgcacacgcagccccgcggctggggtaaagccttccccgttctttgacgcggggaagaggactggaagccagggtgggtccccagcctgcggtgctcaccccttccccaggtctgcctgtccctgacagccaagcgcctggccagtaagaactgcgtggtcaagaacctggaggcggtggagacattgggctccacttcggtgatctgctcggacaagacagggactctcactcagaaccgcatgactgtgtcccatctktggtttgacaaccacatccacacagctgacaccacggaagaccagtcaggtgtgggggagggagggcacaggcgccagggcaggatctggtggatggtggagacctgaagagggatagggaggtagggagggctttgtacgaaggcggggcggctcggctccaggtctcaaaggagactcgctaccgggtctagagggaagggtcatccgggggctgggtccctcagggttgggtggaacccaattccacccaggtctggggagggggcccgcgatatgagcctaggaggaggsggctcggttctggtccgggagagccgccgtgcgggacccagcctggacgcctggtctgcagggcagacgtttgaccagtcctcggagacgtggcgggcgctgtgccgggtgctcaccctgtgcaaccgcgccgccttcaagtccggccaggatgcagtgcctgtgcccaaggtgagagccagggggcctccagggaatcccgggaggctggtgtagccggcttcgcccctgacaccggtccccgctcccagcgcatcgtgattggagacgcatcggagacggcgctgctcaagttctcggagctgacgctgggcaacgccatgggctaccgggaccgcttcccaaaagtctgcgagatacccttcaactccaccaacaagttccaggtgcgcagccggccccgcccacggcctgggcccgcccacctcgggccccgcccmaggccacacccacatcagcgggccacgaggggcttcgctccttgccccttctctccgcagccaaaccccaccccatctcccgctccgcctatggccccgtccaccagaggcaaggccccgcccaccacccagccccgcccacagcttctcctcggcgggactgtccatggggagcacctcgctctccaaatccgcccccagcccaactccgcaccctaattctgttcattccctgcgtccaggactccaaatctgcacctagccccrmcttaacgcttaccttctaccaaggacccctccacacaaggcctccatcttccaccttcacccttccccgcagctctcagagcccgcaccgagctctcggccccgcccctctcctcagccccgccccgttcccycgtccacagccccgcccygttcccycgtccacagccycgcctctyccccccgyccacagctgtccatmcatacgctggaggacccgcgggacccgcgacacttgctggtgatgaagggcgcccccgagcgcgtgctggagcgctgcagctccatccttatcaagggccaggagctgccgctggacgagcagtggcgcgaggccttccagaccgcctacctcagcctgggaggcctgggcgaacgcgtgctcggtgagacccctgggcaggggaggagactccaggtgcgaggaggagctagcacagaccctgcccaccactcccggcccagccctgaccgtcctcatccctggctgctggctgatttgtcgcagtccacagcctcacccttgactttccctgtaccagtcctgacccctgtctgtcctcactttctaccttgaccccagtcctcacctggacttttatccgtatcctgacctctaacctctcccaatttttgtcctgacgccttaaacttcgctgcctctaccctagaaagcagatctgtggtccaattctgggccttttacttgctgtgtgacctctggcaagaaatgtcccctctctgagcctcagtttcctcatctgtaagatgagaatgggcctcacagggtggttgtgagggtagattcagataatgtgagtgaaggggtcagcacaaggtcaggcatccataggtgtttggtgcaaggggcctggttattttacccatttcctggccctgctaaraaagggtgtgcccagggctcttccctgacttccccgtttccggtcaggcttctgccagctctacctgaatgagaaggactacccgcctggctatgccttcgacgtrgaggscatgaactttccatctagcggcctctgctttgcgggacttgtatccatgattgacccaccccgggccaccgtccctgatgctgtgctcaagtgtcgcacygcaggcatccgggtatgccactgtggggaggaacaagtggagtgaggacagaggatggcagcaggatttgggttgaagaaccccatgacaaacccacctgaaactggcttgaaccaaaatgcattggtttatgatactgaaaaattctggggaattaagcttcaggtctagccagatccaggagctcagtgtcattaggaattttcctttctccakgtctcagctctgctgttctctttgctggctttatttgcaggcactcccttcacttggggacacacacacccctgctccagcagctcaaacttaactcccacctgcttagccaccccacaaaaagagagtgcctcttttgcagtagcactggattgggtcactcatttatccctgagccagtcactggggctgggggatggaagaccttgattggccaggtctgggcttacttacccratcttagccagggacctcactgcaactgatggtgtaggggagaggagtggttccccaaacacaaaacaagggtgggaaagccaaggccaggcaggcaatgcccaagcccttcccgtgtctctacggccctgttacatcgggccttgttacctttctaagcttgttcgttagccctctttccttgttcactcctctgcagttatggtgtcctccctgctgttcctccgacagttcgggcctgtcctcacctcagggcctttgcacctgctgttctcyctgccaggagcactcttctcccagctttccacgtggctgactctctcacctcttacaggtctctgctcagatatcaccttctcaataagcccttccctgggtacacttaaaatcgagtcaccgtttccttcaccaagcttratatgtttttttccactttctaacacactatataattcgtttctttattttctgtcaccctcactagaatgtcagctcctcaaggacagggatttttgtctcttttgtctctgctatatcccaggcacgtaggaggtggtcacgcttggtcaagtaaatgaacacgtgtatcagcagatgtctcccagggaggacagggagattgggctgatctgaaggggtcagtgatccactggttccccctacaggtgatcatggtaacgggtgaccaccccatcaccgccaaggccattgcagccagtgtgggcatcatctcggaaggcagcgagacagtggaggacatcgctgcccgcctccgtgtgccygtagaccaggttaatcgcaagtaagcccccmcagacctccccggggttctccccacatctggcacagaccgaggtcccagcgaggtcctcycatctcctccccagggatgcccgtgcctgtgtgatcaatggcatgcwgctgaaggacatggacccatcggaactggtcgaggccctgcgcacccaccccgagatggtgtttgcgcgcaccagcccccagcagaagctggtgatcgtggagagctgccagcggctggtgagccctgctgatgagggtgggcaggcgggcagacaggcggggctggtcttggaccggcctctcactgaccacccacccaccacctgcacccactgcctgcagggtgcgattgtggccgtcacgggggatggtgtgaatgactccccagctctgaagaaggcagacatcggagtagccatgggcatcgctggctcagatgctgccaaaaatgcagctgacatgatcctgctggatgacaactttgcctccattgtgacaggcgtggagcagggtccgagccacgccagggggagggcaggcagtgtgggcacaggagggagagggctgtgaggaggctgaggtgcccaccctaccccacaggtcgactgatcttcgacaacctgaagaagtctattgcctacacattgaccaagaacatcccagagctgacaccctacctcatctacatcaccgtcagcgtgccyctgcccctcgggtgcatcaccatcctcttcatcgaactctgcactgacattgtaagtccacagcccagggtacccatccacagggtgcccagagacacttgcytgcagatggacaggagggacagagaccaccacagacactcttgggcacagagtgacagacaagacctgtgtgtgcaatgacagccagtgcaggacacatgggtggcaggcaggtgaacagacctaaatggacatacctacagccaygcacacacaggcggacactcaggtaggcccgggccgacccatgcacacacatgactcagatacagatactcagacagagatggaaacagaacaggtatctggccaaacttgaatcacagacacgtgyccctaaacagacacggacaaataaaccccctcagatagaccccatggcagacagacagaaaagaaccacagatacagtcacgaatgcagccagaggcgcrgctgtgttgacaggtatttattcggtaacatttacacagtgctttctctgggccagacacaccatcatttccttaattttgtactcataaccacactatgagatgagttttgttactatcacccgtactttactgatgagctcatcaaggcatagacaggtagagtggattgtcccaggtcactgggcaaataagtggcccggctgtgacttgagcttgagcagtcacaggtcccacagcctgtggtcgtggtcagtatgctctgctgccactctaggcacaagcagatgaaggggcacggcgacactgagagactgaagatacacagagatagggagtgacacagaaatacacaagagcagatacagtcacagagaattacactggagacagggacagagaaacagagtgaggaacagagaaagagagggagggagacagagggagaagataaaagcagatgttcttacgaagatgggcaccaggatgccaacacccaggggccagtggggcccaggctgtccaggctggtgtggctgtgccgtccctgcaggtcctgcctgctaacctcagtcctgttcctgctcacaagtgggggaagggggacccraagtggaggggacaagggcccagccaaaccctcagtcccagttccttccactcctggccagttcccatctgtgtccctggcatatgaaaaggccgagagtgacatcatgcacctgcgtccacgcaacccaaagcgtgacagattggtcaacgagcccctggctgcctactcctacttccagattggtgggtgcccgtgggccggggagcctggaggtggggggctctgcgctgggctgctcgcctgccccaggccctgccttgggctcyggctggttctggacctcagtgyctgcatttggtcctgggtctccgttgtcctccgtgtccctctctgtttgtgacagtctctctggttctgctgtgtccctgctctctctctgaccttgctctccatgaccctgtctctgagttgttgcctatttctgtctttttgggtcctggatgtgtctttttctctctgtccctgcctctgtctctctgtccctgcttctctctctgcctctgtgtctctgtcactgtttctgtgtccctggctctgtgtgtccttgaccttgtgtatctgtgtccctgtctctcttcccgtgtccctgtctgtgtgtccttgacctttgtgtatctgtgtccctgtctctccatgtccctctcttcctgtgtccctgtctctgtgtccatctctgtctccctgtgtccccttgtctctctccaggtgccattcagtcctttgctggcttcactgactacttcacggcaatggcccaggagggctggttcccactgctgtgcgtggggctgcgggcgcagtgggaggaccaccacctacaagatctgcaggacagctacggccaggagtgggtgagccctgccccgccccatcccatccctgggctccctccttcccagggcaacttgccttgtgtgcggcccacttgttcctccacgtgtgactgagttcagccagagcatcccggacccccagactccctgccagttcgggggggcaagggcctttcccaccatctccagctccaaactcctgcttctgatgatcgcaactgcagatgggtgtctctgccctgacactaatgcatcatctcagatgtggaaccaggcccctattctgctattttccctacagcatcactcccacagggtatttgcacatgtggtctattttaatgaaggtttggagcacagtgaggctagatctggccagcagatgtgtttagttcacctgtagagttacatacagacgaggatacttcccttaaacatttactatcatggttaaggtagacactgaagccagactgcctggacttatggtctggtactgcttctcacaagctgtgtaaccctgggcaggttgctttgcctctctgtgcctgttttctcacctgcaaagtggagagaatatcaaagtctacctcagtggttttcagtttgctcccagaccagcagcatcaccatctcctgggaacatgtttgcagtgcaaattctcaggctctatcccagccctctgggagcccttgctgggattctcatgcatgttcaagttccagcaccactgatttacctcctagggttacccagcggattaaatgagctaatgcacgtgcaacactcggcacctggagcagtcagtgatccccacagttagctggtattaggagttgtgttgccaggcatggtggcrcatgcttgtaattccagctacttgggaggctaaggcaggagaatctcctgaacctgggattcggaagttgcagtgagctgagattgcaccactgcactccagcctgggtgacagagcgagattccatctcaaaaaaaaaagtagctgtgttgaagaaatgggctgcatagtggctgccccctttaaatggggcatctgccctcttttcccaaaggcccgcggtgactgcctcacctatttttgccatctgcctggcccctggagtcactggactttgcaaatcccatctgaggatttcaattcccctttcccaggccctttcttttgggtgcctcccccctttcactatgaaagcagtcggcccagcctacagttttcccggccactgtcatccaagctctgctaggctgaggtttctgggccccacgttctggggtcctgcacacctggcagaccctgcctctctccttccccccacccccacactctgatgcaaggcagagagagcatttaggggttcacggccctgggaccctatgcccggtgggctgcagaggctctccgcygggactcaggctggactcaggctgtttccgtttgcccctggcctgcagacattcgggcagcgcctgtaccagcagtacacctgctacaccgtgttcttcatcagcattgaggtgtgccagatcgccgatgtcctcatccgcaagacgcgccgtctctctgccttccagcaaggcttcttcaggtgtccctggctggccctcttcctgccctccaacccctggtcccaactcccatcagatcctgactgtggtttagaacagccggcaaatgccagcgggtgccagtgccagatggtgacatgccaaaaaaacctttctaactgrccaataactccccccacggccccctccacatttcactaaaggggtggtgctgagaggcccgggccactccagtgttcagtgtgtagaacacctccctgctgctgctgacatctgacctactttgacccacagtatcctgatttccatcacgtccccaattcctaatggcctgtcccattctgcccacccccaggaataagatcctggtgatcgccatcgtgttccaggtctgcatcggctgcttcctgtgctactgccccggcatgcccaacatcttcaacttcatgcccattcggtgagaggctgtgaggggcaaggacagggagggggctgtagggcacaggcctgggatggccttcaccttgccatgtgccttcaggttccagtggtggctggtccccctgccctacggcatcctcatcttcgtctatgatgagatccggaagcttggagttcgctgttgcccagggagtgagtgtggagactgggagcctgggggcaggggactgaaacgtttgagcagctgcacccacctttgatcctcaacacttggcctctaagcccttgaccctccatagcaaccagcactgacctctgagcccctgrccctgcctaagtggcacccccagcactgagtctcctttctccctctctctcccaggctggtgggaccaggaactctactattagagggacgactgccttcaagcatccctgcaactgccacagcaggtgggggcagggcwcgtgggaccctctggacagccaccaagatatctgagcaaccaagagtcccagccccaccagtatctgcttctgtagcccacggcaccccaaacttggagggacctgcccactcccctcccccattcccaaggttcgcacctcctggagcagcagcgcctgggcagtcctctgggctggcctcgggaaagccgccacctgtggtggcggtggggctctgacagggagtacagctgaccgcttctggagggtgtttctgttcttaggactccagtccaggctggacggctgcctgagggcccttcgttaaagacacgcttgtgtcctgggcgatggtaataaaaccagctcatgctgactgtgctgtatctggtgccaggcactgtcctcagcgtctctcattagtgcttgtgatctcccacagtcctgtacatgggggctgtttatccagggctgcacctccagtgcctagtacacagcctggcacatagtaggtcctcaataaacctgccttggggaaatgattcctattcctttgcccagggtcatggcatctaaacgcaagctgggccgtggcgataggcaccccctaccacctctgggctttctctgttctcagcacccttctccctcctggaggctcccagacacaagggggcccaagtcatttccacatcaagcatcccccaccccccagcggtgtctcctttctgagcctacctgcttactcctctgtcccggcaatggccagttcctgaacaactcctggaggtcccctcctcacacccctcacctgaaaggttaaccccatccccctacctcccatctctgccgctcctttcccagcccctctgttcacctctcttcctctttcttatgtggctttctctggctagggcctgggcttctccttccttgtgaccacagccccccagtcccccatggcttcagttgtttctgcagtgagacccacctctgtccccagcttcccccagtgttggtgacctacactggcctcttcatcaccccccatgcctgtacccatgcactgacccaatctgatagtcccactgtcccatcagtgtggtcccttctcccttggaaacgtggtgagccctcgggcttacaagccccaaactccagttatcctggaactctttgctcctcccttacctgttagcgccccctgccggtaaataaatacacacagccactgatcaccaacacctgggcttggcttctagtcactctcctaaccccacaaagccctgccctggtccagccctggcctcgtggcctcagctttcccatttcagacaacagccatgcagagcttcctaaagccaaatctgaccctgtccttcctctgcctagagctctccttggttcccaaagcctcctgtgatctgacccctgccagcttctgtagtcttacaagtccccttgaactcattccaaccagttatgttcccttgggaaaaacaggccccctctctgacctcaagaccattacctctgccttgccccaatcactcattctttaggtctcagctcacatgtcctctgctcaggggagcccgcactgcttccacggcaggccaggcggctcctctgggtccccataacccggggttttcccatcataaccccgatcacctgaagcctggctccccacagtccaaccgcccaggcttcaccgtcctctgccaactcaggcccagccactccagtctctctccctgaaccccatgtaagctgggattattccagttggtaattttgcatcctacacttgtctcaatatgtgtgaagagctatgtggggcatggaagtgtgggagaaagtgaccttgtcacaagtccacccagatagactgccccatctacttcctttctacatcaaagtcaaggtgatcaatcacttccagctcccaagagacccatggaccctgtctttactccaaacaatgaggaagagtggcctagatggcagctgccgtctgaaggcaaatgctccctctggaaacatcgagatggtcatagtgagctttcctaggcctaagcttaaaaaaaatcaggtggaacttcaacggcctggtggaggaggaggggcaatggtgctatcctactccctggggtaccccactgggaacaccaaggatggggagcatcttcctgagtggggagggtgtacatcaaagtggagcttaaacatgacattcaaaacttctgacacatccccctcagagaaaggcggggagccggcttcagtggaccaaggaaggctgagggtggaggggggcatccaggacaatgtccaagctgggggccccactgctctgcttcttggctgcagctgtctctccactccaccctgagaaggctcaggctgggatctgatctgagggccatagaactgaggagctcacagtcacaactctccccccagccccatgctgaccccatggcttgaacgatgttaagaatctggctggacaaattattctagggagcagtttcagaaaagctggttttgctggttgggtaaaaccaaaggccaagcaattggactgtccactgtgtaacaaggggccgcaagtggctgcaagtgggaggatgacctggttagacgggtttcagatagatcccctggctgccatacagaggatggattggagggggacactggggccaggagcctcagaggcaaccagcccgggaagggcccatgtgaggaggcccaggttggggctgtgaggaggaagagccccccaagggccttctcttggattctagctcccctctatcatctgttccctgagggccctggcctctgccactgctcaaagatcatccaaaccttctgtctactcctggcaaaccaggagcctgaggaacaagacatgggacaagtcagtgactggctagcttccagcttgtctacctggctcctgagacagaaccagggcctctgagacccaggtggacacggtattgggagacagttcccaagagagagaaatggaggcagcaacaactttccaaatactgtttacttcactaaaacctggagygaggcagggaaaaggtacatcaatgtctgagacaccaagcctaggagtgcacattgacaacggcgacatacagggccaaagtgctgagggccagcagccccgttaccactgctcgggccagtaragctgyccaactgcccagcgagcagaggtggacgaaggtcctgcrggaaaatgtcacartaaggaagggagactagataacccaccccactttggacccagccctaaaccccacccaactcactccataacaaaggccttgtagacactgaggaacatcagcaggaggacagctggccggaaggtgtggtacagatcatagcgtgttatcatccagacctgagcagacgcgacgatgtaatggacctagagggaggcagaaagtcggggccaggccttggggaggagtatggccgccagcagaaatgtgtatgtgggagagcacgactgcctaccagactgatgttggagtctatgctcatctggatgtrcttccagtcaaactcaatgccccgggctccgacccayaggggaatgcagctgaggaaggcaaaggatgggattctccagtactcagacaccttcagcaccaggctttgagcccctgccctccagcacccccgtggaacccaggtgtcccttctcaggggtctgggctccaggctgctgtacgcaccgggacataataagctcagcagtggcccagcccagggcagcaaccatgatcttgtactctcccttgccggcattccgggacatgacaaggtttagacctatcaggtctgccacatccacgctggccttcatgaactcctgcgggtcaggttgaggcttaagtaagcacagggggacagggagccccattcctgarctcccttcccttccctggcccctctcaccccaatgaagtcatagatgccgccttcccaggtgggaaagaaagtggccaagaacagcatctgagaacagaaagcagaaagaggtcacttcaaggtgaggggatcaagataaaccacgtgggatttgtgggaagttcgtgggtaggaagagggcaggacaggttctgggggcccatctggaagaggaaccaccagatggtggcaaaattacaggaatcggggagatagaggataggtccccgggtccccgagggggctggaagtttgagttctgggtgatcacagggcatctgagtcaggtctgaaggtgctgctccttgggcagtgttagcagcacgtacggaatcagtgatcactcttaaccgcaccaaaaaaaacctgttagccaaccacactactgaggttttctcagttttactaagtgctacgcaaaagttgcttctaggtctcttctcaggtcgtgccctctttaaagtccatcctctctaggtatcctgacgcctcccagtgcggagtcccgagggcggtcccaccgtggggcggcgggggcgcggataggcaacgggggcgggtccctgggtctgcagagcctgggggccagaacacgtggcttcccggtggccctcaccttgcagagttggacaaagaggtaggtgactccagcctggacgcatttccagaaggcgttgtactcggacctggagaagcgggaggtgagggtcggcccgggccccgcgccctctccgccccgcgcccttcccgcactcacaggccgctgcacttgtaggtgatgaagtaggggaagtaggcaagagcgaagcagttcccgaagtgaaacagggtcatgatgccggccgcccggtcccgcccgcgcggggatcgcgaggcggcgtctccgggagcgggtctccggctccgccggctctttcgccacggccagggcctggcacccacctgactggcgggggcccgcgcgcgaccttctgggagcagtagtcccggcgcggggcgtcgcgcccagtgacgtcagagagcccgtggccggccctgggtcccaccgctgccggcccagcgctttggggagtgacttccggccatgcggggcctctaccgctgccatcgcggtcccggtctcctgaagtggaacccggcttggagtcgagcgcgacccctcgcccgtgggcgcaggcgatcgagtaagggtggggcgggcctcaaacccggatcagaacccgccctgaccggcgcagagatacgggacgcagccgtgagcactgttttttatttcaccatggacccatcggcgtggggcgcccgccccgggtgtccttcctcccccgggcagccagatgctggaacgggaggcacatgttccggccccggcccctgggaaggaaagaaaggaccttcccgtttcacttgtctcggctgaacatgtagcggaggaggtcgaccacccggtgactgtagccatattcgttgtcgtacctgtggaggaggggtcgggaggttcaagggggttccttccgaccaccccttagttcccctccctctaagtctccagctccttcccccttaccatgaaatgagcttcacgaaattgtcattgagcgcaatgccggccttagcatcgaagatggacgagtgggtatcaccgaggaagtccgtagagacgacstggaagtcagaatttcaaagataagtgtgtccggcagagcaaggacctccaggagctgaggccccgactcttaactctatcgcccatccatgcattcatctataatatttgatgtagccctactgtgtccagtctctggactggagggtatgaccaagtgcagggtatgaccaaggcactgtgtcagggtctggccaaagggcacaggtcacaaacaccctcatgctgtaccagtacatccctttcctaggaataatgcaagcgtttggaatgggccagcatggagggcctctctgaggggtggccatgagcctgggtctagatgactagaaagatctgaccggctggggccctcagcacagtgtctgaggtagaaggagctgcaggaagggaggacctgagggttttagccctagtgtcatgaaaggccacaggagtgttttcaatcctgaaaacgggtgatgcaatgtgattccattaaaacaaaagatcccagtgactgtgggaaagtggacctgcaggagttaatgcagggagacagcaccaaggtggatgtacaggggtccaccatgaccatggcatccactcctcacagagaaggcatctggccatggcctggccctgagcaagtattgaaaaaaatgggagctgttgtcttttgttcactaagcatgtattagtcacctgctgtatgccaggttggagccacaaa

SEQ ID NO: 95154 - DNA, 19784 bp, Homo sapiens
aactcctgggctcaagcaatcctcctgcttcagcctcccaaaccctgggattacaggcgtgagccaccgcgcctggccattttagccattttaaaatgcacaattcagtggcatttagtacatcacaattttgtgcagtcatcacctttatctaatctcaacgcattctcatcacccccagaggaagtcctgtcctcatcaacagtcactctcatcccctccccagctcctggcacccacaaatccccttcctgcctctgtggattgacgtgtcctggatatgggaccacacactgtgtggccttttttttttttttttttttgagacagagtcttgctccgtcacccaggctggagtgcagtggcacgatctcggctcaatgcaacctccgcctccctggctcgagtgattctcctgcctcaacctcctgagtagctaggactacaggcgtgtaccaccacactcagctaattttttgtatttttagtagagatggggtttcaccgtgttagccaggctggtttcgaactcctgacctaggtgatctgcccgcctccgcctcccaaagtgctgggattacaggtatgagccaccgcacccggactatatgtccttttgtatctggcttctctcactgagtgtgattgtcctccagatttatccacgctgtggcctgtgtcagagcctcattccttttggtggctgagtcattgtccagtgtgtggatgaatccgctgtattgaccccatctatctgtcaaaggacacttggctatttctaccacttgtgagtcatgctgctgtgaacattcatgtacatgtttttgttagaatgcacattttccattcttttggagatacagattgctgggagttctgcatttggcttgttttgtgtacgtgtgtgtgtgtgtgtgtgtgtgttgcttattgagaaacctttccagggacttctgcgtttaatggcatacataagacatcctaaaaaattcggagaataatctgaaccccagaacctctgaacgtgaccttatttggaaatagggtcactgcagatataattagttaagattaagtcattactggagtagcataggccctaagtccaagatgactgctctccttataagaagataaaatctggacacagacacagagaagagacagccaagtgacaacagaggccgagactggagtgatgtatctagaagccaagaaacgttaaggaaggccacccacagccagaagctgtggatgccaggaaggattcttcccaggggctccgagggccctgccaacaccttcattgtgggattctggcctctggagctgtgagaggataagtttctgctgtgttatgtctccctgtttgtgatgctttgtttttgtttattttttattttttaggggttgggggggggtctcactatgttgcccaggatgatcttgaactcctggctcaagtgtcctgctgcctgggcctcccaaagtgctgggattacaggcgtgagccattgtgcccgcccacccccmtcccacactgcttcttcttcttcttttttcttttttttttcagacagagtttcactcatgtcacccaggccggagtgcaatggcacgatctcggctcactgcaacctccaccatccaggttcaagcgattctcctgccccagcctcctgagtagctgggattacaggcgcccaccaccatgtctggctaattttttatattttagtagagatgtgatttcaccatgtcagccaggatggtctcgaactcctgacctcaggtgatccacctgccccagcctcccaaagggctgggattacaggcgtgagccaccgtgcccgacagctttttttttttttttgagacagggtcccactatgttacctaggctggagtgcagtgtcgcaatcatagctcactgcagcctcgacctcctgggctcaggtgatcctcccacctggttctcgtgagtagctgggaccacaggtgcctgccatcactcctgcctaattatttatttaatttatttatttatttatttttctgtgagacagagtctcgctctattgcctaggctggagtgcaatggctggatctcaggtcactgcaacctccacctcccgggttgaagcgattctcccacgtagctgggattacaggcactcaccatcaagcctggctaatttttgtattttgagtagagatggggcttcaccatgttgcccaggctgatctcaaactcctgacctcaagtgatcaacccacctcagcctcccaaagtgctggaattacaggcatgagccaccatacccagtcaatttattggtatttgtgagatggggtctcactatgttgcccagactggtcttgaactaccgggttcaagcgatccatctgggccagcctctcaaaacgctaggattacaggcataagccactgcacccagctgtttctttgtggttgagacaggatcttgctctgtcacccaggctgaagtgcagagatgccatcacagctcactgcagcctatacctcctgggttcaagcaatcttcccatctcagcttcccaagtagctgggactacaggtgtgtgccaccacaccccgctaattttgtattttttgtagagatggggtctcaccttattcctcaggctggtctcaaactcctgggctcaagtgatcctcccgcctcggcctcccaaagtgctgggatcacagtcaagagccacctcaccacacccagtttttggtgctttgttacagccatcatgggcgagtcagacaacctgatactgccaacccccctcactccccaccccagtttcaccctgtcctggcacaggtaccaccaccttaaatttagagtttctcatttctaggcaggcctggaaaatagcattttgcagcagttttttattaaaaaaaatttcagtatacaattcagtaggttttggtacattcaaaaagctgtgtgggctgggcacagtggctcacgcctgtaattccagcagtttgggagaccgaggcaggcagatcacttgagaccaagagttccagaccagcctggccaacatagtgaaacccggtctctactaaaaatacaaaaatagccagggatggtggtgcatgcctgtaattccagctacttgggagactgaggcaggtgaatccctctctctctctctttttttttttttgaggcggagtcacgctcttgtctgtcccaggctggagtgcagtggcgcgatcttggctcactgcaacctccgcctcccgggttcaagtgattctcctgtctcagccttccaagtagctgggattacaggcacatgacaccatactcagctaatttaatttttgtatttttagtagagatggggtttcatcatgttggccaggatggtcttgatctcttgaccttgtgatctgccttccttggcctccccaagtgctgggattacaggggtgagccaccagacctggccttttttttttttttttttttttgagacagtctcactctgttgtccaggctggagtgcagtggcatgatcttggctcactgcaacctccgcctcccaggttggagcaattctgcctcagcctcccgagtaactgggactacaggtgtgcgccaccacacctggctaatttttgtgtttttagtagagatggggtttcactgcgttgtccaggctggtctcgaactcctgacctcaagcaatccgcctgcctcagcctcccaaagtgctggattacaggcatgagccaccgtgcccggccttacataaaatttcttacctcgtccaaaccctcctgccactttcttttctctccccatgttcagtttgtgaggctcctcctgggcggaggctgtgactggctctgctgtagggcccgccactgcaggcaggatggctgtttattgagccgacattcctgggtaggaatctgatggatacgtaggtgtttctgacattgcactccagcggatttttaccaacgcctcctggtgcctggggtctcctccttcatctgtgacctggacatccgttcattcctcaccaaagatcactgggcacctgctgtatgccaggcactgtgccctggacactgggcatggggacagagcaggggaacagcccccaccctcctggagctgacattcctccagtcctggggacaaacaggacaaaagatgaaatgaaatatcagcagggggctggggctcaagcctgtaatcccaacattttgggaggctgaggcgggaggattccttgaggtcaggagttcgagaccatcctggccaacatggtgaaacccccgtctctactaaaaatacaaaaaaaattagctgggcatggtggcaggtgcctgtaatcccaactaatcaggaggctgaggcagaagaatcgcttgaacccgggaggcagaggttgcagtgagccgagatcgtgccactgcactccagccttggcaagagagagagactccgtctcaaaaaataaaataaaataaaatatctgatatgtcagatggtagctttaaatgctgaagagaagctgggcacagtggctcacatctgtaatcctagcactttgggaggccaaggctgaaggatggcctgaacctcctggtcttgagtttgagaccagcctgggcaacacagtgagatcccaactgtacaaaaaattaatcatgtttctaaattaaattttaaaaaactgaatgcggccgggtgcggtggttcacgcctgtaatcccagcactttgggaggccaaggcaggtggatcacctgaggtcaggggttcgagacaagcctgaccaacatggtgaaaccctgtctctactaaaaaatacaaaaattagccaggcatggtggtgtgcgcctataatcccagctactaggggggctgaggcaggagaatcgcttgaacccaggaggtggaggttgcagtgagccgagatcacgccattgcactccagcctgggcgacagagctagactccgtctccaaaatcaaacaaacaaaccaaaggctgggcgtggtggctcatgcctgtaatcccagcttttttggaggctaaggtgggtggattcctgaggtcaggagttcaagaccatcctggccaacatggtgaaacctcatctctattaaaaatacaaaaaaattagccgggcatggtggtatatgcctgtaatcccagctactggggaggccgaggcatgagaattgcttgaacctggtgggcagaggttgcagtgagctgagatcgtgccactgaactccaaactgggtgacagagcgagactccagctcaaaataaataaataaataaaaataataaaataaaataaaacaatgacctcgcctagcagagggtgagtgctccagcaccctcagctgtccctgtccttttttttttttttttttttttttttgcgacggagtctcgctttgttgcccaggctggagtgtaatggcgccatctcagctcactgccacctccgcytcccgggttcaagagatctcagcctcccgagtagctgggattacaggcgcccrccaccacgtccggctgatttttgtatttttggtagagacggggtttcaccatgttggccaggctagtcttgaactcctgacctcaggtcatctgcccgcttcggcctcccaaagtgctggaattacagacgtgagccaccgctccaggcctgtccctgtccttatttgtggtccctgttcttccagggtcctgagctcaggcccccccggactgcgggtatccccggggagggcacagctggccctggcagggcccggacacctggggcccgacccacccctgcgcaccccgcggtgtcgccttcccgggaggctcgggttcccagatccccttacccgggcgtctcggctgtcgcgccctgggccgggggaggggaggctgcaggaagcggcggatccggcggcggcggcgagggcccgggtgggtggccgaacttctcccgccatggagggagcagcggcccgggaggcccgggggaccgagaccccgcgcgcgtctgcgcccccgcccgcgccctcggagcccccggccgcgccccgcgcccgcccgcgcctcgtcttccgcacgcagctggcgcacgggagccccacgggcaagatcgagggcttcaccaacgtccgcgagctgtacgccaagatcgccgaagccttcgggatcgcgcccaccgaggtaaggagcccggacaccggcgcccaagaccacccgcctgatggggtgaggggtagggagcttggaccctggacgggagaccccagatccccggatcccagacgtcggggtggccgcctaatcgccggatctcagagacccagccctcagatcccggggtgccacactcccaggggycccctttgcacgctctgcgcaaaagatgggcaggtcttaggactagcggacccctagatattccagaaaatcctctgcgcagacctagcttggagcggaccccagccctcggggaagcgcctctgtgcttcctgggcgtagctggggtctggggttccagatggcccccttagggatgggaagtttgaggccgccgtggggttggggggttcctgggcgtttttccaatccgggttcgtttggtttgcagcccccagggggcgccagcagattaaacctggaggtctgggggctggaggtcccggggtatggagaggggtctccacctgctggaagtctccttctccctcctctctctgttctgggggtcccacgccctgccctttcccatgggctgggatcctggtcgctgggggcaggggcctgcgcagacagggtggctgcgtggggggatgcatgccctggctaactctaggctccttctcccccgggaagattttattctgcaccctcaacagccacaaagtggacatgcagaagctcctggggggtcagataggcctggaggacttcatctttgcccacgtgcgaggcgagaccaaggaggtggaggtcactaagacagaggatgctctggggctgaccatcacggacaacggggctggctacgccttcatcaaggtgcccgggagggggtgggcgggtggcttcctggggtccagcaactgccccccccactctgggtcgacgtgggttctgcggattggaggcgggtggctggggttgccctgccagcgacgctggatccctgcagagaatcaaggaaggcagtatcatcaaccggatcgaggcagtgtgcgtgggtgacagcatcgaagccatcaacgaccactccattgtgggctgccgccactacgaggtggccaagatgctccgggagctgcccaagtcccagcccttcaccctgcgcctggtgcagcccaagagggccttcggtgaggcgggtgggctggcgggagctcttcccgaagtgcgttctacggatgcctggggtggaggagggtcggggatgggacgggctggaaggttctaggtgcacccgctgcgtgccaaggagctcctggcagggtatcagaaactcgtaggtagtttctattaatagattgttatggagtcagcctgtgggggaggggtgggggagagactgggtaaagtggagttggaggaggacgcgtccagaaccactttggagccaggctgggagacttgtttttgtttgtttgtttgtttgtttgtttttgagacggagtctcactctgttgcctgggctggagtgcaatggcgcgatctcagctcactgcaatctccacctcccgggttcaagcgattctcctgcctcagcctcccgagtagctgggactacaggcacccaccattgcgcctggctaatttttgtatttttagtagagacggggtttcaccatcttgaccagtctggtctcgaacttctgacctcaagtgctccacccgcctcagtctcccaaaatgctaggattataggcgtgagccaccgcgcgcagcctgggaacttttaaagcagtgctttgaggtcatggtggattgtagagaatgagaatatgagaaaaaagttttctttcttttcttttttttttcctttcttttttcttttcttttcttttttcttttcttttctttttttttttttgagacggagtctagctctgtcgcccagactgcagtgcagtggctagatttcagctcactgcaagctccgcctcccgggttcacaccattctcctgcctcagcctcccgagtagctgggactacaggcgcccgccaccacacccggctaattttttgtattttagtagagatgaggttttaccgtgttagccaggacggtctcgatctcctgacctcgtgatccgcccacctcggcctcccaaagtgctgcgattacaggtgtgagccaccgcgcctggccgtgccagctaatttttaatttttttctttttttgagacggagttttgctcttgttgcccaggctggagtgcaatggtgtgatctcggctcaccacaacctctgcctcccaggttcaagtgattctcctgcctcagcctcccaactagctgggattacaggcatgtgccaccatgcctggctaattttgtatttttagtagagatggggtttctccatgttggcaggctggtctcgaactcccgacctcaggtgatctgcccgcctcggcctccgaaagtgctggaattacaggcatgagccactgcaccctgcccattttttttcataactagactttctcaatgaagaaaacagtgtattgatttacacactagcacattctcctcatgtagccatgggttggccctttggatagcgttgttctatagaacagagacagagattctagaagtgccccagcacacatggagagacgtcccagggagagtgagctgtatggggttctagaatctgccctgccgtggctgtgaactccaaaagccatgcctaaaaatagagtttaggccgggcgtggtggctcacacctgtaatcccagcactttgagaggccaaggcaggtggatcacctgaggtcaggtgatccatcgtatcaaaaaaaaaaaaaaaaaaacctggctgggtgcagtggctcaagcctgtaatcccagtactttggaaggccaaggcgggtgcatcacgaggtcaggagttcgagaccagcctggccaatatggtgaaaccctgtctctactaaaaatacaaaaaattagctgggcatggtggcaggtgcctgtaatcccagctactcgagaggctgaggcaggagaatcgcttgaacctgggaggtggaggctgcagtaagccgagatcgtgccattgcactctagcctgggtgacagagcaagacaacatctcaaaaaaaaaaaaaaaaatcaagcttagtctgagactaaacccagctctagagcccaggccagctctcagaccaagccctgctcttaagcccaggccagctctgagactaagtgtgtttctagcacctcagtcctgacactaagccgggttctggaacccagacaagaacatatctagattgaggatcctaccacaaggagggtcccaagcagtcccttctagagaaagtcgctagaagagggagagtgagggcatggaactgggatgttagttctaaacctgctccattacaacacctcattctggacttgtgatttagtttgctggggatgcgaagtgtggaatctcgaataggtctctggagacttgccgtacagatgtaaggaggactttgaagrggaggaagattctagaaaggctcggctgttggcctcccagggtttacaaagatgtggctccacccagaacccatggccatccctcactctgttccctccagatatgattggccagagaagtcggtccagcaaatgtccagtagaggcgaaagtgaccagcgggagggagaccctgcggcttcgttctgggggggctgccacagtggaggaagcggtgagtgaaggggaggggctctccccaggcttctgcaccttcagctcctccactgagtcagtgcggtcttgggtaagaacttctcctcggagcctcagtttctctgcctgcaaaatgggtcctcattgaaaagtggggcaatgatgttggtaccagcactactgactcgtgtgagggtccagtctactcttcccttaggggtgggggtcgggagggggctgggctggagggctccaaagcttttcacccctgacttccctcccgtgtgcccccagcccagtgagtttgaggaggaggcatctcggaaggttgatgacctgctggaaagctacatgggcattcgggaccccgagctgggtaaggggccagggtaagccagggggccctggggggagggaagcctacgggaggaggcaggggtcccagcgggaagttgggcgcggggagtgccctcactgacatcccctctggcacggcccgcagcgtccaccatggtggagacgtccaagaagacagcgagcgcccaggagtttgcacgctgtttagactccgtcttgggcgagttcgccttccccgacgagtttgtggtggaagtgtgggccgccatcggcgaggccagagaggcctgtggctagtttgccctgggggggcccagcacagccccagcccggagcccagccccctgccccggccctgctccagaacccagcccagatcggaggacaagttcctctctagaacccaatccaatttggagccccagcccaactccagaacccarcccttctctagaatccagcccagatctgaggccaagctatgtgctagagcccaggccagctctgagacyaagcccagcattgagaataagctctgttctaaaactcaggccagccctgagaccaagcccagctctagaactcagatgagctttgagaccatgcccagcactgagaccaagccctgttctagaactcaggcctgctctgaggccaagcccagctctagaacccagatgagctctgagaccatgcccagctctagaactcagatgggctctgagaccatgcccagctctagaactcagatgggctctgagaccgagcccagctctagaactcagatgggctctgagaccgagcccagctctaraactcagatgggctctgagaccatgcccagctctagaactcagatgggctctgagaccgagcccagctctagaactcagatgggctctgagaccgagcccagctctagaactcagatgggctctgagaccatgcccagctctagaactcagatgggctccgagaccaagcccagctctagaacccagatgagctctgagaccatgcccagctctagaactcagatgagctctgagacagagcccagtattgagaccaagccctgttctagagtccaggccagctccgagaccaagcccagctctagaacccagataagctctgaaaccaagcccagcatagagaccaagccgtgttctagaattcaggccacatctgaagccaagcccagctctagaactcaggtcagccctgagaccaagcccagctctagaacccagataagctctgaaaccaatcccagcattgagaccaagccctgttctagaactcaggccacctctgaggccaaacccagctctagaacccagataagatctgagaccaagccctgctctgaagcccaggccagctctgagacgaagcacatctctagaatccagctgagccctgacaacaagccaaactctggaacccagacacattttaagacccagaccagcttggagaccaatcccagttccagaatccaggctagctcggagaccaagccctgctggaaaactcaagctgactctggaactctggacagctccacgatgcagccacacctggacactcggtctagctccggaaccccagttaattttggaacccatgtgagattcatgaagcagcccagctctggaaccccagtcagctcaggattcagagacagctcccaaaycaaatcctattcaagaactcagaccagctcagaaacccaggtccacacggctgcccagtccagatcccaaccccagttgcatccaagtgcccatccccatcctgcagcccagtccagctccagtgatgattccagctctgagactgagcccagctctagaacctcgcctagtgctacaaccaggcccaactccaggattcagaccagctctggaaccccatccatcttggaagcaagacccagctccagcacacagcttggtgccaagccccactctccttgcacaatgcagctcagctctagaatgcagtttacttccaggacccagaccaatttcaaggcctggccaagctccagagctcaatccagcccaagcaccgcacccagctctggaactcagctcagttctggagcacaggctggttctgaaatcccagccagctccaaaacacagacagcagctgagacccagccaagttccagaatccagctaagctctggagtccaatctagtcctgggacccaggccatcgcagcaatagaattaagctccacagccctgtctagttccgacagcaggyccagctccaggacccagcgctgcccaggagctcgaccagcctctgggactcaattcgcctctaaaaccctgccaggttctagataccagctccagaccacagccccagacagctctggtattcaactggactttgggaagcagagcagttctgaaagtcagcttagctttggaactcagcccagctctgggacccagataagctcaagaattcaagccagctctggaagtcagcttagttcgggaacccagctgatttccggagcccaacccagctccagaactcagactagttctggaaaccagctcagctccgggacccagaccactgcaagaattcagctcagccctggagctcatcttagctccagaacccagtccagtcctgagaccaggctcagctctgaggctcagtccagctctggaacccagttcagttctgggattcagtttggctctgaaacccagaccggctcaagaattcagcccgactctggagcccaacttagttccagaacccagtccagctctgagaccgggctcagctctgaaacccagayyggctcaagaattcagcccagccctggagcccaccttagttctggaacccagcctgtttctggaacccaatccagttccagaactcacaccagttcaagaatctggctgagccctggaaatggamtctgcccacagacccctggccttgaccctagaatccagcttgaggcccctgccccagcccaacctcagcccccaggcccatcccccagagaccccaccccagcccctagcaaagacccccagcctctgcctcagccccatgatcaggtatgtggcatccaggccagccttggccccatcccaggcttaccccaagcctcctacctggccccacagtcacaggtctcctcaaccccccagaagccagccgtctctcccaagccccgggtgggaccccagaagtccaccccacccaccatatctgtcactcctagtcctgcccctagggcagccctcctgagttcccagctgtctgagtccccagctttggcgccagccctttgccccactctgggggagccaggagcccgcccttaccgcggggggccgtagcttggctgtgacttagccctggttcatgtggttctcgtcctctcctgtcccttccagcctggggcccccagaagcagcaagtgaccttatttctccagcaggcggtggtagggagtgtgcggtggtgaaaacaggggcttcaccggtcctggctcagatccaggtccttggagggaaaaggagggcaggagacgggttgcaccgcatgtaccctgagggctcatggtgaataaaggcaccttccatctctgcagcctggtgtgtcattttgggggaagtttgggggaatgcagagatgtggggctggggggctggctgaaactgtggcaacactgaatacctcttgagcacctactgtgtaccaggcacttcattaagcaccgcacaggcatgagcttacgtgcctgcaggcgacaggtgctccacgaagacccagccactggtcctttctaccaatatttattgagcacgtactatgtgcaaggtgctgtacagaacactgtggtgtttgaaaggttgctgggtgaacaagtgaacagtggaggaaacgggcatcactccacgcttttgcatctctctctctctttctctgttttatttatttacttatttacagatggagtcttactctgtcgcccaggctggagtgcagtggcatgatctcggctcactgcaacctctgcctcctgggttcaaccaattctcctgcctcagccttctgagtagctggcattacaggcgcccgccaccatgcctggctaattttttgtttgtttgtttgtttgtttgtttgttttttgagacagagttttgctcttgttgcccaggctggagtgcaatgacgtgatctcggctcactgcaacctccacctcccgggttcaagctattctcttgcttcagcctcccgcgtagctgggattacagacatgcgccaccacgcccggctaatttttttgtgtatttttagtagagacggggtttctccatgttggtcaggctggtctctaactcccgacctcaggtgatctgcccgtctcgacctcccaaagtgctgagactacaggcgtgagccaccgcgccctgcaatttttgtatttttagtagagacaggggttcaccatgttggccaggctggtctcgaacttctggcctcaagtgaccctcccgcttcggcctcccaaaatgctgggattacaggcatgaacaatcgcgcccggcccatttatatctacttttaatgacacacagattcaaaggtggtttgattgcaggttccagggctaacctgtagccctcccattacaggctgctggaagaattctaggtggtaccacccatcaagtgattaggaaacactcaagaaacaaggtgggggaggaaccgaatcctctatgtccctccccatccttcccagccctgccctcgtctgctccgggtgaggcccaatgcacaaactccagagattgaaaacttctggacccaaaggaaaataaaaccaaaggcagagatatattttggcaagaaaagggggtgcccccgttcacattcaatcctttctggacagagccttccctgttggaggttcaaaaggaagcaactgtaccccagcaagtaggtcaaattcagggtcaaagagcatgcaaggccgggcgcagtggcttacgcctgtaatcccagctgctcgggaggctgaggcacgagaatcgcttgaacccgggaggcggaggttgcagtgagccgagatcgtgccactgtactccaggctgggccacagagtgagactccgtctaaaaaaaaaaaaaaaaatggccaggtgtggtggttcatgcctgtgatcccagcactttgggaggctgaggctggtgaatcacctgaggtcaggagttcaagaccagcctggccaacacggtgaaaccccgtctctactaaaaatacaaaaattagccgggcgtggtggcgcgcgcctatagtcccagctactcaggaggctgaggcaggagaatcgcttgaacccgggaggtggaggttgcagtgagctgagattgcgccactgcactccagcctgggggacagagcaagactccgtctaaaaaaaaaaatagcaatgcaagaccctcttccaatgtctgcatgcccttcctggggttgggagggacgcagagaaggggtgggagctctggatgggaaaaaggggccgaggaagggagagtgcttggtaaaaggatcagggaggagttgggggtccccgggttggattggggtcaacccaaaaccctgctgctgatgcccactgtccatccagcacccccagcccctgaatcctcagaacaggcagatgggctgtccgaggggccaagggctccgcggaaaggcgcgggaggggcgctctgtccacttcctactgcagcccggagcgctgcgtgagctggggctggagggacagcgacctgggccgggtgctgaggcgaggctggagacgccggagcacggcgcggcggaacaggatrtacacccaggggtccaggatctggttccaggtggccacgcgcaagtagatgagcagctccttctccrtggtgcgggacagctgcccggcggggctcatggcaggcgggtttcgcagcactgtctgggcratgaagacctgcaaaggggagagctgtcagcctgggcccccgcctccagccccgcccgccccggtccctgcccggggtcccttgagatccagggtccactccgttttttaattttatttttgagacagggtctcactctgtcgtccaggctggagtgcagtggtgcgatctcagctcattgcaacctctgcctcccgggttcaagcaattctcctccctcagccttccaagtagctgggattacaggtggctgccaccacacctggctaatttttgtatttttcgtagagatgggggtttcaccatgttggccaggctggtctcgaactcctgacctcaggtgatccaccagcctcagcctcccagagtgctggaattacaggagtgagccactgcgcccggccagtgtccactctgttactgcattgctgggtgacctcaggagagttgactaaccgctctgagctccttttgatgggttcataaattagcgcactcttagccaggcagtggctcacgcctgtgatctcagcactttgggaggtaaataggagagaatcacttgagcccaggagttcaagaccagcctggggaacatagtgagacctcatgtctacaaaaagttaaaataaatagaaaagttacccaggcatggttgcactccagcctgggtgacagagcaagatcctgtctcaaaataaataaataaataccttttttttttttttgagacggagtctccgcctcctgggtttacgccattctcctgcctcagcctcccgagtagctgggactacaggcgcccaccaccacatccggctaattttttgtatttttagtagagacagggtttcactgtgtcagccaggatggtctcgatctcctgaccttgtgatctgccctcctcggcctcccaaagtgctgggattacaggtgtgagccaccacacctggccataaataaaatatttaaataataaaaattatatttatctataggtcaggattgatgggaaatttttttttttttttgagacggagtttcactcttgttgcccaggctggagtgcaatggcaggttctcggcttaccacaacctccgcctcctgggttcaagcgattctcctgcctcagcctcccgagtagctgggattacaggcatgcaccaccacatctggctgatttttttgtatttttagtagagacggggtttctccatgttggtcaggctagccttgaactcccgacctgaggtgatccacccgccttagcttcccaaagtgctgggattacaggcatgagccaccgcgcctggcaggaaatttttaaactatatttaaaaatatttaaaataagaatgttatctacaaattagtatataatatataataatcaattatatgataattattcataattataatgtggcctataattgatatatatcatatatcatacaattatattataattaaatgttacattatattaaaatactttgtttgagatcagcctgaccaacatggtcaaacaccatctctactaaaacatacaaaattagccgggtgtggtggtgcacacctgtagtcccagctactccggaggctgaagtgggaggatcccttgaacccaggaggcagaggttgcagtgagctaaaattgygccactgcactccagcctgggtgacacatcgaaactccatcttaaaataaaataaaataatttggccgggtgcggtggctcacacctatactcccagcactttgggaggctgaagcgggcagatcacgaggtcaggagattgagaccatcctggctaacacgatgaaaccccgtctctactaaaaatacaaaaaaaattagccgggcatggtggcgggcgcctgtaatcccagctactcgggaggctgaggcaggtgaatcgcttgaacctgggaggcggagcttgcagtgagctgagatcgcaccactgcactccagcccgggcaacagtgcgagactccatctctaaataaattaaatcaatcaatcaatcaaatcatttcctgagcagtaggtcctgtaggctgaatgaagcagcaacagcagctgaggaactcccagggcgcaccctcataggctcacagtccagtcgggagacggaaactgggtccggggagttacagcatggggtgggcaaagctgtgaggaggaagcaatgtcagagcccagaagaggtgcctgacctggcctagggaagtcactgaagggcaaatgggagtgggcaaggtgcgtctgcaggaagtgcctgtgagaactttcttctgagggcaacagggagccatgggagggtttagagcaagggttgacccatgggccaaatctggcctgccacttgctttgggttttttttcttttcttttctttctttctttcttttcttttcttttttttttttttttttgagacagagtcttgctctgtcacccaggctggagtgcagtggcacaatcttggctcactgcaacctccacctcctgggctcaagcaattctcatgcctcagcctcctgagtagctgggactacaggagtgtgccatcatggttagttaattttttttagttttagtagagatggggtttcaacatgtaggccaggctggtcttgaactcctgacctcaggtgatccgcctgtctcggcctctcaaagcgctgggattacagacatgagccaccgtggctggcctgtttttgtttgtttgtttgtttttgtttttgtttgaggcggagtctcgctctgtcacccaggctggagtgcagtgacgtgatctcggctcactgcaacttccgcctcctgggttcaagcgattctcttgcctcagcctcccaagtagctgggactacaggcgtgcgccaccacgcccggctaattttttgtatttttagtagagacggggtttcaccatgttggccagcatggtctccatctcttgacctcatgatctgcccgcctctgcctcacaaagtgctgggatttcaggcatgagccactacgcccggcctgttttgttttttactaagaatttctttccatgtttaaatggttagaggaaaacaaaatagaggcaaaaattgagtgacataaaaatgacatgaaattcaaatttcatcatctatccatcagtagttttattggccacagccacgcctactcatttatgtgttttctacggctgctttctattttttttctttttttttaatttggaggcagggtctcactctgtcacctaggctggagtgcagtggtgcaatcatagctcactgcagcctcaacctcccaggctccagcaatcctcctgccttgacctctcaaagtgctgggattgcaggcacatgccaccatgtctggctaatttttttatttttta

SEQ ID NO: 95155 - DNA, 82334 bp, Homo sapiens
agaggcagaggttgcagtgagccgagatcgcgccactgcactccagcttgggagacagagcaagacgctggctgaaaaataaataaatattaaaatgccacctcacagaggtcatggactttgtcgtgctcatccctgccgtgtcctatggcctagcacagtgcctggtacacagtaggtgctcaatacatgtttttggaatgaatggactagggtccctccagcctgcagtacctcctgctgacggtagtagccactatggccaccaggcggcgccagaaaccacgcaaccggcccccgccgggcagcctcggttttccaccctgcgtaatggggacagccaaccaggggcgtggggggatgcggggaaggcacagaaggctggtggctctcccggaccccagcccctcctctctgtcccttgcctctcccctcctgtcaccccatccctgccctagttttcttttttttaagttttttgtttgtttgtttgtttttgtgttttgagacggagtctcactctgtctcccgggctggagtgcagtggcgccatctcggctcactgcaacctctgcctcccgggttcaagcgattctcctgcctcagcctcccgagtagctggaattacaggcatgtgccactacgcctggctacttttttggtattttcagtagaggtggggtttcatcatgttggccaggctggtctcaaactcctgacctcaggtgatccacccacctctgcctcccaaagtgctgggattacaggcgtgacccaccgcgcccggccaagaggctgcttttaactgcttgttttgatgttgacttttgcgtctgtaagtcatgactgttcggccagttttagtaattttttttaagtatatttcctcttcattatcctcatcaatgatctaacctccagcmcttcctccactttatctggcatccaaattgcctggaagggggaagtcatgaacacccagattttaccacccccaccaccccgcccagtttctggtgtgtgaagtctgcgttggagcctgggaaactgcatttcttttccttttctttggtttgagacagagtctcgctctgtcgcccaggctggagtgcagtggtgcaatctcggctcactgcaacctctgcctcctgagttcaggtgattctcctgcctcagcctcccaagtagctgggactacaggcgcatgccaccacgcctggctaatttttatacttttagtagagatggggtttctccatgttggccaggctggtctcgaactcctgacctcaagtgatccgcccaccttggcctctcaaagtgctgggattacaggtatgagccaccgtggctggccccttcccccaaactttatctggcacccagtttgcctggaagggaggagtcatgaacacccagattgtgccctcccaccaccctactctgcccagtttctggtgtgtgaagtctgggtgggggcctaggaacctgcatttcttttacttttcattgtttgttttgagaccaggtctcgctctgttgcccaggctggactgtagtggtgtgatcatagctcactgcagcttcaaacttctgggctcaagcgatcctcccacctcagcctcccaagtagctgggactacaggtgtgcaccaccatgccaggctatttttgtttttttgagaggagtttcgctcttgctgcccaggctggagcgcaatggcgagatcttgactcactgcaacctctgcctcccgggttcaagcaattctcctgcctcagcctcctaagtagctgggattacaggcatgcgccaccatgcccgactaatttttgtatttttagtagagacagggtttctccgtgatggtcaggctggtctcgaactcctgacctcaggcgatccacctgcctcaacctcccaaagtgctgggattacaggcgtgagccactgcatctggccacgccagactaatttttaatttgttttgtagagatgggatcttgctatgttgcccaggctggtcttgaactcctgggctaaagtgattctcctgcctcagcctcaatcccaaagcactgggattacaggcatgaaccactgcacctggctttggaacctgcatttctaacaagctcccagggtgaggctgatgtggctggcccagggaccacaccttgagagccagtggtctaaatcttttttcaaaacagattctgggtgaatcaggagctctgtccatgacctgcgtccaaagaactcttcctggagccttaaaatggtcaaggccgcctgcagtggctgacgcctgtaatcctcacactttgggaggccgaggtgggcagatcacctgacaccagcctggccaacacagtgaaatcccatttctactgaaattacaaaaattagccaggtatggtagcacacacctgtggtctcagctacttgggaggctgaggtgggaggatcgcttgaacctgggaggcagaggctgcagtaagccgagatcacgccactgcactccagcctgggtaacagagcaagactcatctcaaaaaagaaaaaacaaaaaatggtagtaaaatacgcacaacatacaattcacaattttcaccatttcttttttttcgagtcttgctctgttgcccaggctggagtgcagtggtgccatgttggctcactgcaacctctgcctctcaggttcaagtgattctcctgcctcagcctcccgagtagctgggattataggcctgtgccactatgcccagctaattttttggtatttttagtagagacagggtttcaccacattgaccaggctggtcttgaactcctgaccttaggtgatctgccagcctcggcctcccaaagtgctgggatgacaggcgtgagccaccgcacccggcccattttcaccatttctttcttcttcttcttcttcttttttttttttttttttttggagacagagtcttgctctgtcgcccaggctggagtgcagtggtgccatgttggctcactgcaacctctgcctttcgggttcaagtgattctcctgcctcagcctcccgagtagctgggattacaggcacgcrccaccacgcctggctaattttgtatttttagtagagacggggtttctccatgttagtcaggctggtcttgaactcccgacctcaggtaatccgcccacctcggcctcccaaagtgctgggattgcaggtgtgagcccccgcgcccggcccattttcaccatgtctaagagcacagctccgtggccttaagcacattcccatggctgtgcaaacatcaccgccatcatctccagaatgttctcatcttctgagactggaagtctgcccctgtgaaacactcactcctcgtctccccccaagcccctggcaccccccatcctactttctgtctctgtgaatgtgacaactctagggacctcctaggagtggaaccacacagaatttgtctttttgttttttttgtttgttttttttttttgcggggacagacggggtctttctctgttgcccaggccagagtgcagtggtgcgatcatagctcactgcagccttgagttcccgggctcaagcagtcctcccaccttagcctactaagtagctggctaattaaaaaacaattttttttgtaaagatgaggggtctcactacacctagctaattaaaaaaattttttttgtagagatgagagggctcactatgttacccaggctggtctagaactcctgagctcaagtaatcctcctgccttggcctcccaaagtgctggaattacaggcgggagcctctgtgcccaccccaaacattatttatgtgcataggtaatataatcattatgatttacatttatgtaaataatataaacgttattacttaaattaacataaacaacataagccttattatgtgcttatataaagaacataaatatggccgggcgcagtggctcacacctgtaatcccagcactttgggaagctgaggcgggaagatcacgaggtcaggcgttcaagaccagcctggccaacatggcgaaacctcatctctactaaaaatacaaaaattagccgggcgtggtggcacgtacctgtagtcctagttacttgggagggtgaggcaggagaatcacttgaaccctggaggcagaggttgcagtgagctcagatcgcccccctgcactccagcctgggcaacaacagcaagactccatctcaaaaaaaaaaaagaaggatataaatattgctacttacatttgcataaatatatataatttattatgtatttctataattatatgtttcttataatagcaaactgtattattattgataaaataatataaagaaaacaataacatatctatacttacgtaatacaaacgatggaatataaatattatttgcaatatgataataaacaggtagttaattgcaaatgttattgatatgtattgcgtagatcaatgttaataacatgtattgtgtagatctatatatatatatatattttttgatatggagtctcgctctgttgcccaggctggagtgcagtgacacgatctcagctcactgcaagctctgcctcccaggttcaccctattctcctgccttagcctcccaagtagctgggactacaggcgcccgccaccacgcctggctaattttttgtatttttagtagagacggggtttcaccatgttaaccaggatggtctcaatctcctgacctcgtgatccgcccgcctcggcctcccaaagtcttgggattacaggcatgagccaccgcgcccggccctgtgtagatcaatattatttacatgtactgtgtatatcactgttattggtatattttgtgcatatcaatgttattgacatgtagtgtgtatatcaatgttattgacatgtagtgtgtacattaatgttattggcatgtagtgtgtatatcaatgttattggcatgtagtgtgtatatccatgttattggcatgtagtgtgtatatcaatgttattgacatgtagtgtgtgtatcaatgttagttacatgtattgtgtagatcaatgttattggtattcattgtgtatagcaatgtgattggcatgtattgcatatagcaatgctatttgtatgttttatgtagatccatgtcaatgatatagtatagattcatgttattggcatgtattgtgtatatccatgttattggcatgtattgtgcatatccgtgttattggcatgtattgtgtatatccatgttattggcatgcattgggtwactccatgttattggcatgtgctgtgtaggtccatgtgtggttttttttgggacagagtctcactctgtggcccaggctggagggcaatggtgcgatctcagctcactgcaacctctccctcctgggttccagcgattctcctgcctcagcctcccgagtagccgcgattacaggcatgtgccaccacgcccagctattttttgtatttttagtagagacaggatttcaccatgttggtcaggatggtcttgaactcctgacctcaggtgatccgccctcttcggcctcccaaagtgccgggaatataggcgtgagtcaccgcgcccggccagatccatgttattgtcatgcgctgtgcaggtccctgttattggcatgtgctgtttagatccatgttattggcatgtgctgtgtacatccatattattggcacgtgctgtatagatccatattattgtcatgtgttgtgtagatccatgttattggtatgtgttgtgcacagcaatgttattgatacgtatcgtgcctgtcaatcttactgacctaatacgatggaatggcgagcctggctctgtactcccacccctgggcgcgagggggcactcgaggcgctcctggctgcgggtcgcaagcaggccccgcccccgagccccgattggccgcgcgccgtccgcggcgtcgcacgcacgcaggccccgccccgtccgccccgcgccggcccggcgcgccctcccttggccggcggcgcttgttgttcggcggcggcggtcgcagctcgggtccccctcgggcgcccccgccgccgtccgcgcgcggccatggagctggaggtaccggacgaggcggagagcgctgaggcgggggccgtgccctcggaggcggcgtgggcggcagagagcggggcggcggcaggtaacggcccggcctcccggggctgcggcccgctgggctcgtccgagcgccgagagtcgcggggctgcggggccggggcgggggctgcacggtcgctgcgggggcgccgccggttccaggagcctggggcggggcagtcccctggagccgcggggaggacggggctgaagccgcgccgggaagcgggaggcctgcgaggggctacctcccaccgctcccgggccgggggcgactcggcgtgggcgccgctggggatccccgttctgcctgacccgctcccaggggctgcccgtcgtgtgagtggcggctgcttgggtggaggcgggggtctctgaggccgtgcgtgcccacctcctgatgtcacctccctttctgtaagtccccagacctgagtccgggtgcgcgacctttcctcaccttcctgggcctcagtttacctccctgctaaaatgaggggaggaaaagggttacatctcaagatgcctccaccgccccggctgtgcacacagggtgccctgtcgcccccttttcctctccccgagccttcccscaggacacactggtggggctgcgggctgggcggggggcacggctgtctcatgccccctttagctgcttcctggacctccagccgggtaggtggcggcagctgggccttcccttctgtggggacggtgtgcagagcccagaggaagggaacagttccttctcagtcgaggtcacaagctcccaaatcggaagtttccggattcacaaaatcctctgctcctcccaggcagccagcagcagcgtctctgtagacacccacacgggcatccgtcctccttctccccccaggcctcccgaagcttccttggttggcaggcgggcaagcgggcgggcgggcgatgcgtgctgcctgggagttggggagatgtctggagagagagagagtgtggaagtcatcaagtcccccccccaccccccgccttgaaagacactcgtggcttccctcccggcggccatctggaaccgcttggtaggtgacccggttccttccccagagccagtggcctcgcccctttctttgcgggcagccggtgtcctggcctggccagcaagagacatggtggaggaacccaggcagggcaccaggccccagcccgggttcctttcttgggccccccaacttccgctgtcagccctctgaccccagctggtcagagacaaagtagcccaggactcgctgaccaaaagaaaaccacaccgcgaccattcatcttatcaggggctctgggagcaccggggacagataaagttgccagctccagactgagcatggtggtggggtgggagagcgggggagtgggggkgtgggggtggggggccggggagggctggaaggtcagggtctggcatctctgcccatccctgaaatccacagaaatctgaccccagctggccatatactgcytctgaatgtttaaaattcagagttgcctcactcctccaacgccatccctcctgatgttagcgctggtgagtttaggttgtgcctggctgggccacagagacgtgagcacataaaggggcctgcttgttcttcaccgagatggtttcatgcctcactggggcttctgtgccttggcagaggtattttgagtcaggaaattaggggtgctgagcaacgcccctggcttctgcccactccatgccaggagcacctgccagttgtgacagccacaagtgacccagacaccgttcagtgtcccctgggggcaggacggccctggtgagaaatgccacacgtttatgactctgtgaactgcttgctttttatctctggtcatctggagtctccccaccctatgttggtatcggtttgtagagagggcgagcgccaggcagtggttaagggggagccccagagttggtcccgccgatgtccccctcccagctccgcgcttcaggtgctgtgtggcygtcacttccccgggcttcagcgtcccgtctgtgaagtggggtgatgaccgtgtgtgctaggggctgagcctgggatgagttggcgctcgtgcttggtgattgtcgtgccggttggccacccctttccggcctctccaccatcrgtgcctccaggcccctgctgaggcccatgcccgtggtttctggagtcaccgctcactgttagaagcgatggcgacaccttccagaaagctcagctacagcgggagccttgtccgacaggggccgagggaggctgcccgtttcccacggcactgccagctcccagtgtcatcgtccttggcgatttcggctgatccgatgggaggcaaagcaatgtctcgttggtgtttagaatttggttcctctaattgcctgggctcctggctcccgaggcgtggcctgaatggcgtctccatgggccgtggccgtggggcacgtgggggcggtctcgggaaggccggggcttgggatgcggctgtgcccactgtgtgggccgatggcctgtggtggagtttggtctgagctgtggcctgggcrtgtctgagcctctcccaggctgtcctgtctctgtgatgccccagaacggtcagctccatccctgcccctgccccactcccacggctgatctgtctctgtgatgccctggaaaggtcagctgcatccctgcccctgccccacttccacggctgatctggcagcaaatgatggcagcttcaccttcagaactggcccagaacccactgactccttccctgtcctctgcctctcccgggtccagcttggtcctcccgggtccagcttggtcctccctggtccagctcggtcctccccggtccagctcggtcctcctcggtccagctcggtcctcctccgtacagctcggtcctcctccgtctggctgagtactccccggtccagctcagtcctcctccgtctggctcagtcctcctctgtctggctcggtcctccccggtccagctcggtcctcctccgtccggcccagtcctcctccatccggctcggtcctctatccggcttggtcctcctccatctggctcggtcctcccgggtccagctcggtcctccccggtccagcttagtcctcctccatccggctcagtcctccccagtccagcttggtcctcctctgtccggctcggttctccttcgtccggctcagtcctccttcgtctggctcggtcctccttggtcctcctcggtccagctcggtcctccttggtccagctcggtcctccccggtccagctcagtcctcctttgtccagctcggtcctcctcggtccagctcgatcctcctccgtccagctcagtcctcctcggtccagctcagtcctcctttgccccctgagccaggcctggcgcccctgctcttcctctgctccctgtcccacattccaggaggaccccattaaaaaccagcggcccgagtcccgaccctcctctgctcgcagccctccatggctcccacctcccttggggtcaaagacatagtcctctttgaagcccatcaggccctgcacagcctgccccgggccctccctgccctccctgccctcccctccgcactctgccctccctgccctcccgtctgcactctgctgtaggcccatgggccccttgctgttcctccagcatgcagggcatggtcctgccccggggcctttgcacggctgccccccacccccaccccggaatgcccctcctcccatctgtgtcctttgctcccttagcgctttccaggttttgtgggagcatctcctctccgtgaggcctccctgccctgctgtcaccacacagcggtctccccttctccgtcccctgccctcccggttcctcttccctgattgtgccaccatagcgtttgtcaccacctgaaacatatggctctgctgacgtgttttctgaccatctcctcctgagcgagagctccacgagggccaagaccgtctgtgccactcctgcggcatcccctgcgcccggaagagctcagcacagtgcagatcctggtgaacatcaggtgcatgaggccagcagtgccagggaggaagggtaaggtagaatggggtggctgggaaggccttgccaagaaggtggcatccgagggagacctgtgggcattgggcaggaagagggcatggccccagcagaggccccgcctgcctggagcacagtgtagtgtggtcacagggcggccgggcagggagtcagcaccgccaccagggcctccctgtagctgtggtggtctgtgtaaaaaggtcagggaggccgggcacggtggctcacacctgtaatcccagcattttgggaggctgaagcaggaggatcacttgatctcaggagtttgagaccagcctggagcaacatagcaagacccctgtctctactaaaaaaaaattaaaagaagtagctagacgtaatggtatgtacctgtagttccagctactcaggaggctgaggcaggaggatcacctgagcctgggaggctgaggctgcactgagctgtgatcgtgccactgcatgcctgggtgacagcagaatcgtatctcaaaaaaaaaaaaaaaaaagggtcagtgggattgtggtgtctcttgttgcaagtcagcagggcccaggcggaggctgaggacactggggacggaaagttccccattctctcccgccctggccgcctcccgggatgcaggtcaggcactgtgaccrccacagcctgggtgtcccagtggagaggcctcgggggccggccctcctgggttcacacccagcgccattgcatgccagccggggatgtgcagcctcggtgtacctgtctgtaaagtgggcgtgatggctgcctttctcctgggctgcatggagaatcatggggtaaagcccttagaaggcacgggacaggcagccggccccgtgagaaagctgggtgccccctccgtcccaggttgctgttggaggagagggagtccccttcgtgtgctgcttccggggcccaggtgccaagcgagctcacctgggcgctggggtccgccatgggagtcggctcgtgaaagtgtgagttccactcctgggctccagacctttgttgagcacctcgtgtgggccaggtggggctcagggtgcccagtcttctggtgctaacgggactgcctcgctgaccccttggagccctcaggttgctgggcgtcaggctgcagatgggaacaagtggccacgtgagaccccacccgaatctgtccatgccgcttcttgtcaacaaagttttattggcaacggccacaccatttgttccgttgccggccttggtggcccccacgctgcagcggcagagctgggagctgagtggccatgcttggggctacgtgtcccacgaagccgaaaacacttgctgcccggtcctttacggaagatgtttgcccagcccagagccgggctgcgttgggcggtgatgagtgtggtgagggcacctgggaggtcaagtggccaggcctgcggcagctgaggactcggagggaggtgactgtccccacgagctgaataagggtgggctgtggctcaggcgatgtaggcagcggaatagtcgcgccgaggccgtggggtgggaacttgctgcacccacttgagccgcagaagtgaagtcaacgtggtgggagagggtcgcgtggggtcggacctgaggacagcgggtggcacgggcatctgagtggggcggcgagcccgattcacagcgcctggtgggggatggtccgtgggcagtgctctgtggggttggggcaggtgtccaggtgagtgccaccggtgcctggaggcagacgaggggcctggaaggattttggcctgggccctggagctggtggctggggtggcgaggactgaggacagagcaggactgggagcccaggcactgtggcaggtgtgtgcygatgtggggtgagcaggcagtggggacccccaaagcaggtggaggctccgggagcctgggcagggtggtcccagggcctggtgtgggctgagcctgccttggccgcttagacccgtgtgcctctgagcaagtgacttccctttgttttaaatttttttttttttttttttttgagatggagtctcgctgtctcgcccgggctggagtgcagtggcgcgttctcggctcactgcaagctccacctcccgggttcacgccattctcctgcctcagcctcctgagtagctgggactacaggcgtccgccactacgcccggctaatgttttgtatttttagtagagacagggtttcaccgtgttagccaggagggtgttgatctcctgacctggtgatccgcccgcctcagcctcccaaagtgctgggattacaggtgtgagccaccgcgcccagcctcttttaaatttttaaaacttttttgtagaggtgaggtctcactrtgttgtccagggtgcgagggtctcgaacccttggtcccaagcagccctcctgcctccacctcccaaagtgctggggttacaggcatgcgcccccatggtggccccttctttcccttttggaacaagagctgcgggtgtcctgagtgcctggcaggacagggatgggtgaggccctagcccctgggaagctgcacgacctgggtctttgtttacagatggggaaaccgaggctccaggagggctggagagtccacacagggtggggctgtgaacgaggagcggggcccaggcctccctgccgcctgccgcctgccgcctggccccggcagcatgtcccttcacgcaggaccaggccggtcaagaccctgcaaggatttgccagcaggcgccagctggacggggcccgtggtggtgccagtactcatggggattacagcctgaggggattagctcggagcccctgcacctgcctccccgccaccctgagaggccagcttgggaggggctggagtcgagcatgagggcccccaggtgcctgagctggcatgggggtgcgaggggacccggcctctggctgagtgaagagaggaccccagcaccctgcccggccgctctcctccactgaaatgcctcatgcctccactttgcaggcagggctgctgctgaaggtttccgggagtggggtgtggttcgggcatcgtctacgtgtgctttcctgcgtgtgctgtggccgggtgctgggagcctgggggaacgagagggccaggccccctaaggaactctgggagtggggccaggacatacagacagcaaagaaaagcaaaacacgcaacgcagtggacaagtgccacggagaagagccgagcagaggaggggagagagtggcggcggaggtgccctcaaggctggggactcgggggccacacttgaacagagatccaggggaagtgagggggttgtggaagtgtggagggagctgtctggcagaggcactgtgcaaaggctctggggcaggaccacgcctggtgttttagaggaacagtgaggaggggagggcagggaggggacggggcagggtgtgcagggccttgtgggctgcagggaggacttgggctttgaccccaagggaggtgggagccatggagggctgcgggcagaggagggatgggcgagactcaggagctcacaggcaccccctggtggctgctgtggggaggacagatggggtgagggcgggacgtgggctaggggaaccagggcagaggggactgcactggcccaggtgggcgaagctggggctgggccaggtggggaccatgagcagtgcgccatctgggatggattttggaagcagagccagcaggaccttttgaaggttgagtgtggggctgaggggggattgagtttgaaatcaagattttagcctgagccctggaaggacagagctgccctcagccaagatggatgcaggaagggcagcatgggggccgccggggcccagcatggccgagctgcgagggaggccccaggagcccctgtagggagcgttgggggccgtggtgggagccggcagtgggactgggtggggccgtcgggaccctggtggtggctgtgctcagtggacggtgtctctgttccattgtgctgttggcaggaggacagctgagatgattgggttcggttgcccagccgctccgtgcctcagtttcctcatttggaaagcaatgtcccttgaggattagatgagtcaatgcacacaaaaggctcagagccggccctgcccatggtgggcgcccagggagtggggacagggacgtgagcgggcagctcccactgtgcacccttcccgtgcggtgcttggactggccacggtgcatgcgctgacatgggcggggctgctggggcagggaaaagagcctggggtgggagcagctgcctcggggcctgtgcctgtgggcgcgtatgagccagcctggcttggcgtctgctgctaaaacaaacatccccactctcccggccatcccagaggctcatttctcgcttgtgttgggggctttggtggttttgctccccgatctctcagatcccaggttgacggaggtgctgtcacccccagtgcagtaaaggctctatgcttctgtaacccagaaaggtggtacgtgtattcagatgcactctgattggtttaaatcaggcctggtgaggccaagagagcaggaggtgactgctattgaaaagctcttgtgttacagttcccgaggctttggttggaagggacgggccaggcggggtagatgggctgggtgtgcctaggatgggctggtttgactcccgactgtttgcggctcttggctgttggggtggtccctgttctgggagctggccctggggtgattcagggcagggaacctgggcgtggcgcgtgagagtttgatcaggtgcgtgggctcgcggttggttgctctgcacgtcacagtgtgctcgcaggcgggccgtttgcaacgtttaggaatccgcttaccctggaaggggccgtcatccccagattagcgaggcccccaagatgtcgtaaaatccagaaaacaaaacgcagcatcagcactgtaccagaccgggcgctccgtgttccggcagcggaggacgcgtccatctctcccatcctcagcagccatatgggtgcaaggcgacttcttccctcactgcgtcattgcagcgtatattcgtcttcttgtgactcagagaaaaagtccttgtggctcttcgcagcatttcctctttgttttcttggaactgcgtttccacaaggggagcagagaccactagaggcgaagggactcgccacacaggagctccctcccactcctcccgacggtcacctgtgtttctatcaagagctggaaaatggagtgtccccaccagggagacggggtcaccaccgaggctggctctgagctgcctcagctcctgcaagctccgtggccccgacctccaccctccccggcccattttccttgcacagttccttcttgtaagcacacacgtcaggttgaactctgacctcattttctgggacctgtatgattgtgtctttcccagtctacagttatctgtcaccattttgttgattcgtaggagctctttatttgttatggcagctactcatttattggtgacacaagtgcaggtacttctttgcccatcttctcctacgatgattgttaacgtctggcaggtattttggggtttatgtggtcaaacttatcactctttccttttctggtttcctagtttggtgtcatgaatgggaaagtcttcctgttctgaggttatgattaaattctgctaagacttttataacttagcttcttttttgttcacatttcaattctttttttttttttttaagacagggtctcgctgtatcacccaggctagagttcagtgacacgattgtagctcaccgcagcctcgacctcctgggttcaaaccagcctcccaactagctgggactgcaggtgtgcgccaccatgcatagctaatttttcatcttttatggagacagggtcttcccatgttgcctgggctggtctcgagctcctggcctcaagtgatcctcttgccttggcttctcgatgtgctggggttacaggtgtgagccagtgcgcccagcctatttctggactttttattctgctccactcctctgcctttaccttcatgctacagccatgtctcgtcttgaacaaatgataacatgttcacagttaaaaaaaaaaaaagtaatcagacttgcartgagtaaaaagtgagtcccacctcaccctctccatctctgtggagataatgactgtcaccccaggtgtttctctggcccatacacttggggctcagattatattaggctattaaaaatagtttatttggaaagctttccagcctatagaaggggcaagaatgctacagtgaagacctgtacagcccgcacagagatccaccagctgctaacgttttgccatgtctttatcattctgtgtgtggggggggagtgtacgttagtgtgtgcaagtttgtgtgtgtgagagtgcatgtgagttagtgtgtgtgtgttagcgtgtgcgtgtgtgattatgtcaggccatttgcgtgttgattgctggcatggtacctctctgcctgaagcagccagttccattatttgtggtagttctttattttattttaattattttatttttttgagacggagttttgccctctcgtccaggctggagtgcagtggcgcgatctcagctcaccgaaacctctgtcttccggtttcaagcaattctgctgcctcagcctcccaagtagctgggattacaggcgcccgccaccacacccggctaatttttgtatttttagtagagacagggtttcaccatgttggccaggtgggtctcgaactcctgaccttgtgatccagccacctcagcctcccaaagtgctggggttacaggcatgagccactgcgccaggcctgtttgtggtagttcctttgtgaagctgctgcagacacttcaggcgcacactgagccctggctccaggggaaacccaaggtcgggttcctgtgagcctctgggcatgatgtttccatcagccagtcgatacgtgaccttgttgtatgttcgtttttatttcaaggcgtgttattttagggctgggtgcggtggctcacacctgtaatcccagcactttgggaggctgaggtgggagaataactggattactgagcccaggagtttgaggctgcagtgagccgtgattgcaccactgcactccagcctgggcgacagagtgagatcctaagaaaattttaaagacacccgtgttgttgatttatccacagggagctcacagaccataggccgcgtgcgccaagccccccccaccccccagccccatcccgggcactctcccaggcccccgcccatttgcaggctgtgttggggacaaggctggaagggggaccgggggcatgtattcggctgtgtgggggctcaaaaacggggtggggggccatggcgacgtgggtgtgggtccccctcccccggcccaccagctcggtgtgtctctcgctctcgttctccccccactctcctctctctctctctctttccgctctcagtcctgtttgagcaaagcttctctcactacgggtttctccatggggctcatccgggtctctagccctgagggacacgaaaccacctgaggacaatgcctgggggggcaatttcagcagcagaatcaccagcaaaaccgcaaaaaacacacgcggctctcagtggaccagggaaaggccaggtgctcacagcaggagttgaaaccagggggcgagggtggcctcaccggagctgcctggggacgtgtgtgccccagagtcctgggggtgctgccctggaaatagccttccggtcttctagatccctccccgcccacagcagggggccagaggccgtccccccctcgcaggtgaggaacaggagctcctgcgggctcccctgcggcaccccgctctgtttcccaccacggcctaacctcaggctctggaaggaattcccttcagggacactgtactccccggagggacgctgcgcccctggaggacagggacgctggggagccagccgcgaggggcgtccacctctgctgtgctggagacggagcgcgcaaggaggtggggaccacgcgcagaccctggctgcgggagcctcagctcggggcccatcaggatctcccgcagcccgcacgggccgggcttcccccaggggctggcgtgtgctctgtgcaccctgacccatcccgtcggccccgccacctgcgggctggccacgccccacagcctcctgccccggcccgcccgggagcttggtgctgagagtggagcctctttctccctggacattggggccctgggaaacgacccaacacctcagggcctgcggagttctggatgctccgcccgcctgcgcagagcttcctgtttaccggcctggctcctgcccgcccacctgctgcggggaaagcgatcactctatgccctgcggggagcacccggcagggagaagggagaaggggcaaggaagaggggcggcctactactcgggtggaccccaggctgtccctccaccgtgctggggtcccccaggtgtaccctcccctccagccacctcaccccttccttgctgtgtcccgcaggtgttctgtggtgtcctctgagggcctgtgcgtgtgtgtgcgtgtatgcatgtgtgtatctgcatgtgtgtgcgtgtgcatgtgtgtgcgtgtgcatgtgtgcatgtatgtgtgtgcgtgtgcatgtgtgcatgtatgtgcatgtgtgcgtgtatgtgcgtctgtgtccccttcccacaggccctcaccgctccctgcacctgtgggtcctttcttcctttcctgccctgttgggacatattccttattgcacacttggacttctttcttaaattcttttctttttgagactgagtctcagtctgccacccaggctggagtgcagtggcgcagtctcggctcactgcaacctccgcctcccaggttcaagcaattctcctatctcagcctcctgagtagctgggactacaggcatgtgccaccatgcctggctaattttttttgtttttgttttgagtcggagtctcactcttttcacccaggctggagtgcagtggcatgatctcagcccactgcaacgtctgcctcccgggttcaagccaatcttcttcttcagcttccagagtagctgggattataggtgtgcaccactatgcccrgctaatttttgtgtttttagtagggacagggttttaccatgttggccaggctgctctcgaactgccgaccttaggctatccacctgcctcggcctcccaaagtgctgggattaccggtgtgagccactgcacctggccttgatctgtttttttctttgcttgcttatgcttttggtgtttatttaagaaattgttgcctaatccaaggtcacaaagatttattaccccattttcttaagtagttttatagttttagctattacattcattccagtttgtaattattttattttattttattttattttattttatttatttatttattttgagacggagtttcgctcctgttgcccaggctggagtgcaatggtgcgatctcggttcaccacaagctccacctcctgggttcaagtgattctcctgcctcagcctcctgagtagctgggattacaggcgcccgccatcacgtctggctaattttgtatttttagtagagacggggtttctccatgttggtcagactggtctcaaactcccgacctcaggtgatctgcccgccttggcctcccagagtgctaggattacacacgtgagccactgcacccagcctttatttttatttttttgagacagagtctcactctgtcgcccaggctggagtgcagtggcgtgatctcagctcactgcaagctctgcctccctggttcatgccattctcctgcctcagcctcctgagtagctgggactacaggcgcccgccaccacgcccggctaatttttgtatttgtatttgggaggatcggcctcccaaagtgctaggattaccggtgtcagtcactgtgcctggctaggaaactctgtaaagggctgagtagtaaattttttagcttttagtctaagtacggtggctcacgcctgtaatcccagtgcttcgggaggccagggtaggaggatcagttgagcccaggagtttgagaccagcctcggcaacaacgcgagacccccgtttctgaaaaaagaattagccaggtgtggtggcgcctgtagtcccagctactcaggaggctgaggcaggacggtcgcttgagcccaggagttggaggctgcagagctatggtggcaccactgtgttccagcctgggtgacagtgcaagaccccgtctctacaaaaaaatcaagatgaacattttagggtttgtggtccagatggtctctgtcacaactcctccacactgcggttgtagcacttaaggagccagacaattcgtgaacacatgggtgtggccatgttccaataaaactttttttttttttttgagacggagtctcgctctgtcacccaggctggagtgcagtggcatgatctcagctcactgcaagctccgcctcccgggttcacgccattctcctgcctcagcctcccgagtagctgggactacaggcgcccgccaccacacccggctaattttttgtatttttagtagagacggggtttcaccgtgttagccaggatggtctcgatctcctgacctcgtgatccgcccgcctcggcctcccaaagtgctgggattacaggcatgagccaccgtgcctggcccaataaaactttctttagtgggctgtgttcggcccctggactgtggtawaccagcccctgctttagacagtctttgtaggaccttatgagttccatataatcagcgagactcctgtctttttacctgtgccgaagttgtctaggagaaagttctagaattgaagttgctgccaagggcacacacattagaaatgctgccaggctgccccctaggggagaatctattgacacgggcatcacccccagccgtgtgaggaccccctgagtccccaacccattgctggcaggctggtttcatatcatgtcttttatcattagaggggtctgggcgtctttttcagatgttcacactgtttgttttcttttcctctgcctgttttacaagttgagtgagttaatgctttgagaaaagcctcatttctataaataaaaatgacaaaatatgtatttcagacggcaccaaaggatggaagttgcaaattaagagaccctcccccatcccacacccagaaataacttggaaccttctaagattcacgtgtctggccctgactgctgagtgacgtgtctacagtggtggaagccatgtggcactaagagcttgagttctcctggtgggtcacagggaaccagatcctggtgctcagagggagagagccgcccggggctttgctgcctgggccctacgtgccgggtgaccttcagcaggtggtggtcccgctctgggtgcgtctgtggtgggattcgtggattatgcaacaaaccactgccacactgagaggcttcacgctgcagtgcttttgctgtcagtttcccagtattggctgggcttggctgggctcagcaggtcggttctgctgcggcatctggcttgtgccagcacaccctggtggcctcctgtcccaggcctctctccgcattgctgccaccctccagcctggccccagcatcgtactggagggattccaagagagcagaggctgatggaagaattccccccatgtcacttctgcatcatgtgattggccaaagcagggcttgagacccgcccactttcaaggggaaggaattcggccctgtccccgggatggaagggaccctggcaggcagcaggtgtccccatctgtgtgtgagtgctgtgagattgtgcgctggatgatgtgtgtggggtgagggggcggcaatgagctcatcttgatgcctctaattataaggcaaagaaatgctcatgcgtgactggtgtggttaccactgcagcgctgtgagcgggaggctcttcttatcgttccgtctttattttgaggaatcctgaggtccagtgggtgacacagaggccacttcccagccaggaggctgtgggtgctgctccaggcaccgaagcatctgctctgcctctcctgtgctgggggccgggcctgctgcagagacagagtcagcactggtcggggtggygggggctccaacatgggggaggtgtgggactgcccgggagaggaagcgggggctccagcgtgggggrggtgtgggactgcccgggaggggaagcaggggctccagygtgggggaggtgtgggactgcccgggaggggaagcgggggctggctgtgctctgcacaggatgttcctgctgtgcccgggctgatcccagctctccagacacggtcctgccccggggcctccgtactggctgtgcctctgcctgggaggcccctctgcccttcccccgcctggctcctcctcactctcctcccgtccctgctgtggtgacgcagactggggcctgacatcctggaatcaggtgcgtccacccctacatttttgctgcatgatcaggcaagcgatctgacctctctgagcctcagtttccgcctctgcataatgggagcagtaatagtgcctacgtcacagggttgttgggacaattgcgtgactaagccatggggttctcatatggtgcgggccccgccacacacacggcgaaggtgggctagctcgtctctggccagctcctgcctgcgctccagctgttccagggtggctcagtggttagagacgggaagcagcctgcgcccctgggctcttgaccccatccaaccccgtttccctcctgagccaagcccactgtgccctggacccagatctccgtggaactcctgggaggaggacactgtcgcaggcagccttacccacgtgccaggctcgtgctgtctgcactgttgcagaggggaaagatgaagtcgctgccctggccgggctcatggcctcagagggaacaaatgtggaggatccaaggagtagagagaagtaaacccagcgggggcagggtgaccagggaggggactctctgaggaggtgacatttgatctagacctgaacaaggttgggtgggagagagagttccaggcagaggcgcagcctgtgcggaggccctagggcaggaccaagcctggtgtggggagggagggggaggagaggagggaggggaaggacaggaggggaggggagggggaggaggggaggtgttctccatctgggcctctgtccagcaaacgttcattgaggcaacatctgtgacctcacacagtttctgagtcaggagtctgggagcggcgtagctgggtggtcctggctcggggtctctcatgaggctgtggtgaagctgtcagccgggactgcctcctctgaaggctcaactggggctggaggagccgcttccaagagagcttctgctctttattttttatttttttaatttttttatagggacagtcttgctctgtcacccaggctgaaatggagtgtcaccatcatagctcactgcagcctccaactctggggctcaagcagtcttcccaccgcagcctcccgagtagccgggactacaggcacacgtcaccacgccagataatttttttgttttttgaagaggtggggtcttgctatgtcttgctatgttgctcggtctggtctggaattcctgggctcaagcaatcctcccacctcggcctccaagtgtgctgggatgacaggtatgagaactgcgcctggcccacaatgcctttttttttttttttttagatggagtcttgctctgttgtccaggctggaatgcagtggtgcgatctcagctcactgcaacctctgcctcctgggtttgagcgattctcctgcctcagcctcctgagtagccgggattacaggcgcgcacccccatgcctggctaatgtttgtatttttagtagagacggggcctcaccatgttggccagactggtctcaaactcctgatctcaggtgatccacccgcctcagcctcccaaagtgctgggtttataagagtgagccactgtgcctggcccacgatgccttttctaagaaatgttaggcaccttctctttgtctccctctgtgctattggtgggggtggtgacggggtcagaccagcatgcagcgtgcagcaggctctgcaatctgggctcgtggaagcatattcctacacgccaggctgacggggaaggagttcgctttggatcctggtgggcctgaggggccagaggaccaaacgcaggccccagggctcgtttggctaagtgaccccctggagtttatctgaagaatgtgccttaagtttgctcctcccccaggggctgccctggggctgctgtttgccctcccccaggggctgccctggggctgccgtttgcccttcaagtccaggctggagcgaatgttgctgcctttgactagcagagacctctgagcctcagtttacatagctgtaaaataggtccaatgccagtcacctcatggagcattgagagggtcagagacgcagcttgcagagcaccagcccgcggggggatgtgtgtacgagctgcagcttttattacagggaacttcaaacaaaagacaaaagtgggccaggcgcggtggctcatgcctgtaatcccagcactttgggaggccgaggtgggtggatcacctgaggtcaggagttcgagatcagcctggccaacatggcaaaattccgtcgctactagaaatacaaaaattagccaggtggtagtggtgaacgcctgtaatcccagctacttgggagactgaggcaggagaatcgcttgaacccaggaggcagaggttgcagtgagccaaaatcatgccactgcactccagcctgggcgacagaacgagactctatctcaaaaaaaaaaaaaaaagtggacagggtggtacaggtacgggtgttcttttcctgaaacattgtacacacccggagaatagtgtcaggaacaccctgcccgcccccactcccatcccacatacctccatactgtgttgactccgggttcttgtgtgtgcagatgcggggggcgaacaggggcgagattctaccatcccagtctctaaaacagggtctctgcctctcagcactgccgacctgtgggacctgatctttctctggggtagggccatcctgggcactgcagggggctgagcagtgtcgctggcctccgcctactttatgccaggagcacccttagtcatgacaatcacaaatggccccagacatcaaccagtgtgccctggagggcagagtctcccctggtgagacctccatttcggtcactccctccacccccagggccacgctcaaagcctgtcccagaggagatcctggcctccgcctgatctcctctgaccctttacaaaagtttgctgacccctgacttaagggataaacagaaaagatgttttttgacctatgtagtaatagatgggtgtcttttatgtgattctgtgctttccaggtgcttaaaaccttttcttattagacattgtatttagacagtccgggcgcggtggctcacgcctgtcatcccagcactttgggaggccaaagtgagtggatcacctgaggtcaggagcgagaccagcstggccaacatggtgaaacgccatctctataaaaatagaaaaattagctgagaatagtggcggatccctttaatcccagctactcgggaggctgagacgggagaatcgtatgaacctgggaggcggaggttgcagtgagtcaggatggtgccgttgcactccagcctgggcgacagagcaggactccgtctcaaaagaaaaaagaaaagacagttgcatttagacagagagccggccgcctcagtggtgtgtcatcccccaaacccaagagatgcttgctgattttggtttggatggatggatggatggatggatgaacggatgaacgagccaacagacaatcacctgacaccattcaccacgctgggagtctcagaatcagaagagagtgcatcttcagggtaagaactagcctgtagtcacttcagggccattgttccaggcttgattgtggggcttcaggcctttgccacgtccccccgagggggctgtagccagggtgttctcacagggccagagggcaggagctgggatcccccaaaccccaccatagcccgggcagtgtctcccacagcatctgcctcttcgtttgctgcagaaagtttcttgagcgtctgcaacatgccgggcacgttctaggctccagttgcctgctccaccactccgtccaccatgcgtgcccagcgcagcacgtcaagccacatccagggcgccccttgggcccctccaaccctgcaggtcctgactgctcagcacatctgacccaagcctgygcttcttcctgatgccccatcttggtagccaactcactgtgtgcctgagcccaggtcccaggtcacgtcctctccagtgctccccctccacagctgaggacccctctggatctcccagatccagcccagcccscctgccccagctccattcaccggtgctgctgcgcccctactgagtagcgagtaggtctgggagagcaaccgtgaacgagacgccaggtctgtgctcccacaggaaggagcaagatcagtcccaactgatgtgcagtgtgaggaaatagaatgggatgcaaggcgggtaggaaggtggctgtgaggacggtctccctggggaggtgagaggctgagacccaaacgggaggacaggagccggccaagcagggacacaggcgcagcacgcgcaaggcccctgaggcaggaacatgcccctcaaaggtgtggtgctgggtggggagcctgggcacagggcccggcccactggagcttgggggcatcctctgtgacccgtgtccccactcaggttcctcaagcagagttccctcaaaaaccgtgtttcttcagagcttgaaaacacctgtgtccaaggtaaagactcacctttcccctgggggaaagggatttttaaagagaattttcaaaagtgctgaaaagttgaaagaattgggcagtagacccacgacttaccgcctgggtcttgcaattggcagttggctgtgttcacgccatccctccatcccaccatccctccatccctccctccatcttgccatcccttcatcctccatccctccattctccatccctccctccactcctccatccctccatcccttcctccgtcctgccatcccgccatccctccctccatcctgccatcccgccatccctccatccctccctccatccatcttgccatcccttcatcctccatccctccattctccatccctccctccatccctccctccgtcctgccatcccgccatccctctgtccctccctccatcctgccatcccgccatccctccatccctcccgccctccatctcgccatccctccatctcgccatccctccatctcgccatctctccatctctccctccatccttccatctctccatccctccttccacccctccatccctccatccctttatccctccatccctccctccatccctccttccatctctccatccctccctccatccatccctccctccatcccaccatccttccatcctccttgcctccatccctcctccatccctccatcctccatccctccatcctccatctctccatcctccatccctccatccttcatcactccatctctatccctccatccatctattctccatccctccatcctccattcctccatccctccatgcctctgtccctgcatccctccgtccctccatccctccgtccctccatccctccatccctccacccctccattctccattcctccacccctccattctccattcctccatcctccatccctccgtccctccatctctccatcccttcatcctccattctccatcctccatccctccatctctccatccctccattttctatcctgccatctctccatccctccatctctccatccctccattctccctccctcctccatcctccatcctccttccatctctccatccctccattctccatccctccattctccatccctccgtctctccatccctccatctgtccatccctccatcctccttccctctattcctccatcctccatccatccatccctccctccatccctccattctccatccctccctttatccctccatccctcctccatccctccctccctgccctccctccctccctctgtctatccctctcccacccctccatccctccctcgctccatgcctccatggtatccctccctccctgcgtgggtcgctccctccgtgcctccgggctccatcctccatccctccctccatcccaccatccttccatccctccatcccaccatccctccattccgccatccctctcagcttgttttttggaagcctttcaaagttgcagacctcagcacccccacctgtcaacacttaacacgattcagcatcttgaactggactcactgtctctttttttttgagagggagtctcactctgttgcccaggctggagtgcagtggcatgatcttggctcactgcaacctccgcctcccaggtttaagcgattctcctgcctccgcctcccaagtagctgggattacaggcactggccaccacacccgcctaatttttgtattttcagtagagacggggtttcaccatgttggccaggctggtctctaactcctgggctcaagtgacccgcctgcctcggcctcccaaagtgctgggatgacaggcgtgagccaccgtaaagcctggcctaaaactttctctttttcttttcagtcttcattcctttctctttttctagtcttattgctccagccagcacttccgctgcagtggcggctctcacagccacacccctggtcttgtggttgacattaaggcatttcccataactttttgctttatacttctttcattttatattttattttattttattttaattttaagacaggatcttgctctgttgcccaggctagagtgcagtggtgcagtcatagctcactgcagcctcaaacttctgggttcaagtgatcctcccgcctcagcctcccaagtagctagaaatacaggtgtgcaccaccactcctggctaatatttaaatttttttgtagagatgggggtctcacgatgttgcccaggcaagtctcaaacttctgggctcaagccgtcctcctgcctcagcctcccaaagtgctagagccacctcgcctggtcttatatttctttttaaagtaaaagcagtctccctttctctcctttttttctttcttggtagtattttggggggacgtgaaattcatgttgaatttcgttgaaggtttttctggattcggagatgggatcacagcgtttttcaccgttgactttgggtaacttcctaaatttccccaaatccccatttcccggcctgtcaaacggtgatcatgaattaggtggcagctggatcaggtgctcacaggcgcctcctggccacgcgccgtcggggagtgggccgtggggggcgaaggcagaggcgagtgtgccaggcrgggggccragtgatggtgcagccttttatttctagatctgcctgtttttcgagaaacccaggtttttctccaaaacattgtgatttctagagttgaccgaacccaaacaccgcagggctcagaaccaagcccgggcgggccactcaccagggtgtgctgggagtggtgggtgccggggaccgcggatgtaccgggtgacagtttacggcgactcgctgggcttggggctgcagggccgggcaggtacctgagttcacatctctcatcacttcccggtggggaccatcagtcgggtgctgcctgtccccaaacagggaccccattgcctaccatgccaggcctgtatgggttagagacggtcacgcgggaggcctggccacatgggttctccccagcggtgtcagaatccttccacctctcccagcctcggtttccccatgtgtcaaatgaagccgtgaggagtggctgcctggtcaggctgggtgggatcctgtgtggggagagcttggtcggcacctggtgcagatatttgctgttgcagccgtgttgaacatctcacccaagggtttaacctcaggggctactgaagcggggcatcacctggggtcatcctgcccccctggggacacggggccatgtctggagacatctgtggttgttacagctggggggtgcccctggcatggagtgggtggaggccagggatgctgctcggcaccctgcagtgcccaggacggccccagtgaccagcccagagaacaatccagccctaagtgctgaggggggagatcctggtttgcatgggctttggggggtgcctggaggcccccaagccgtttgcatgtgggtacactcatatcaagagagaagaggcctgaggcagggccgtttgatgtcaccatggacgagactgtccatcccggtccataccagagaggagcagaagctgagggtcggcaccagcctttcagacctcggtagttgctgtttactgcgtttcacaaaagccttggtccatgatggagagaaaagaaaggttgaactcagttctacagcacagacagtgtgagaagctccagcctgcagcagactggctgcccttctggtcaagccttgaccaagtcccccaacctcctttagagacaagcaaactgaggccctgggggatgaccgagtttggagaaggttccagatggtgtatgtcactgggcaatgcttttgcaactaaagggatctgcatcttcattttgcttttctgggacacaaaattcactctttgaaagtgtcttactgcttacttattgcaactgagtaaattcttctcggcgtattcacagagttgttcagtcactgccactaattctagtacatttccatcaccccgaaagcaaaccctgcgcctggcggctgtcactctccatccctccccagccccagcacccatgcatcccctccctgtctctctggatcagcctgtcctggacatttcatagaaatggggtcacacactgcatggcctcttgtgtctggtatctctcactgagtgtgacgtcttcaaggtgcatccgtgctgtggcctgcgtcagagcctcactccttttcatggctgaataatccatgtacagattattaatgcttctttgaatgtaagaagtccaagtaagacaaaggaattaaaaactgtaactcctcctgttccaaagaagtccacagataggccgggcacggtggctcatgtctgtcatcgcagcacgctgggaggccaaggcgggcagatcacgaggtcaagagattgagaccatcctgggtaacacggtgaaaccccatctctactaaaaatacaaaaaagctgggcatggtggtgcgtgcctgtagtcccagctactcgggggaggctgaggcaggagaatcgcttgaacccgggaggcggaggctgtagtgagccgagatctgcagctactcgggggaggctgaggcaggagaatcgcttgaacccgggaggcggaggctgtagtgagccgagatctgcagctactcgggggaggctgaggcaggagaatcgcttgaacccgagtggcggaggctgtagtgagccaagatctgcagctactcgggggaggctgagacaggagaatcacttaaacccaagaggcagaggttgtagtgagccgagatctgtttcagtcagctattgtataacaaaccacccccagacagaagcttcaaacaactgtgtatttgcttgcgattctgttatttgggttgggttcagttgggtggttcttctgtaggtcatacctggggttagttccatggctgtggtcggcagtggcaggaaattcaagctcgtcctacacttgcctgtccaaccctcagccaggatggcaggaacagctggggccgcccggtctttttgcagggagctggcctctgagtgtcgtggcccaggttcccagaggcacagtgagaagtgccagccttcctcacgcccacaccatcccttgcatcacattctgttggtcagagcaagtcacactactgccaagcgtcgcagccatctgtggacagccacagaaggcctttctgcagtttagcaggagaagattcttgcacggcctacccttgtccgccgggtcctggtctgagcctcaccagagctgagggtcggccctgccgcctccgggtccccaccccagcctgtgtcgtggagtgccgctgcccagcctggccgtcctggcaggtcctcagaggggcctgtggtccccatggtcggaggcctgcacggcgggaggccagaggatgggttgttccagcgaatgagggaggtgaccgtgagctctggcccggggttgcttcctgcttgtgggatcgcaggaccccgtgcctgggccgtcctcacacacccgggttgctgtgtcacggcgagcctgcacctgtcctggggtgcccagcagttgccctctgggcagcggccccacccaggggtgcaggccccctgtgctactctgacacacctgggtcccactgccgcccctttctcactggccttcccttgctgccctcagagctttgccagagtctgtgagcaggtgacagagcaggcctgggacccctgttgtggggatgacaacagccatgtatcaggtggtgccgtgtgccgggcagtgaggaggggatcgtttggtgcaggttggctggaggaggcctctgaggggtgatgttcaagccaggtctggggtgaaacaggaacaaaccgtgagggaatcttgggactggcaggccaggcagaggcaccgctcgtgcaaaggccatgacacagggtggcgctggcgtgctggagggacagcgagggcccgtgtggctggagcagagggaggagcagagggcagggagggggccacacagggtctggtggggtgacagggcctggtcttcaccctgcagggttgcagtgaggcctggggagacccttgtctgcggtgggggcggggtgggtgggccccctttcgcagaatccctcccctgccgtgggctctccccggccccccagtccccagccccccagtccccagcttcatcatcctgggccttccagggccctgcccactctccccccgcccccaccgcctccagggctggggctttctcctcccagccatgggggtctggaccttggttctacagggatgaggccaccactgttcctgtcctgcctgctgtcacagtgccctgcaggtgcccacaggggctgaggcaccttccacccaccctcgagcttgcctcgctgggccctctgccccacggcgccctgtcggtgagcccagaatgtgccctgtttcctctcactgtgatgcctccctccctctggccacctgtccagacctctccgtccccattcttactttgggtctcactgcagagccagcctgacaatctgcctcctcccccagtttagtcattccctgcctcagtgtccatgtcagacagatgtggagaggaagctctggcggaggcctgttgtgcagagaaaagaggaacgggtatctgtcagtccatgggtcagtcaacaaacacgcccatgctgtcagcccagggcaggccccgtcctgagggagcccccaggctcagcaggagggaccaggctggtctgcaggatggggcggtgtcagtggggtggcaaaggtggctggtgtgggacacagtgtccagggagcactggcagggccagggcggagaccaggcgcaggccagggaacagctgggtgcagaggcggccatgtggccccgtggagaatggcagtgcctctagggctcgagctggcttcagccgcactttatagagagagactgaggctcagagagaagccctgggcacacagggaggtggggtggccgatgaggtcaccgtgcagccagcgatcagagccgtgcaccgcaggcccgggtcgccaccacgtcctgtgatggggccaggagagaggggccccagcggcagagcccccgcctcgggcctggccagcggaaactgctcagaggggccacctcccggctccgcagcgcggctcgcctttcctcccccgactatttttaaaacctaatttcctcgaaaacggggtggctcattcagcagataattagtcacgtctcaggctgagcagagctcaccgtcatgacagccccctatgggggtcacggcaggctctgtgccctgagcgggcctcatggggagcgaggattgagtgaagatggcgctcacctgcccccaccccctgggcaggcggtggcagcaaggctgtgctttctccccgtcccctctcctccacaggacactcggctctggtctccccttgctgcccgttcctgcctgccctgggagccccacattttccctggggtcccccaaccgagtgcctcccctctccgtcctgctccacctccacctcagtgcttcggccccggccagtcccttaaccctacaggcccccagtgcagggacgttcccagcagggcccgagccgcctgcccctctcctctcctctccccgttagccagctcaggtgagtcgggcaggtgaagacgtggaaccacagagggaaactgaggcagggggcctacacccaacacgggtgaccccgaggtgcctggtgaggtcagcagagctgggtctggagggcctcactgcatccactgggtcccggggccgtagggagcctgggagagtccgggcaggggtggacccaagcgctgtgacctctcagcatcggggccactgaggaaaacagctgagtcacccaagtgggtgtgggggggccccagaggggtggtttcgcgagtagagtcaggactgtgggcagggaggccccagacaggccgagcagggggacgcccgggcccccgatgaggtctggaacgtcccgccccggcccaccgctggcttcctgccctctcttcttttccttcccccacaccctggacgtaaaaccgtgaattgttctgctcccgggccgccaacccaaacatcacgtcagcgtccagcaccttccgccccgccgcggcccagagcaggccctttgtggcctgtcagagacctgggggcgactggccctgtcctctggaaggacagagaagcagcccgtctttcccttcaccgtggcagccggaatcctgagtcaccccactccctccgtccccgtccccgcccctgcagtgagcaccatgggtctgtcccccagatccctccagggcccacccgctgcccacccagccctgcagggcatccaggtggcccgaggggaggacccttcagctgttcttgctgccttgagaagtacgccccctcccacccagggctggggtcctcactggagggctccgtgtgaggtcctgggctgcccagacaaagtccccgggactggggggcttggagcagcaggccttgaacaggcgtttgttctggctcagctctggaggccaggagcctgaggtccaggagtgggcagggctctgccctcccgaccgacctcggagaagctccacacccctctgctcctggtgcctccgggcatccttggcgtttcagggcctggaggagtggtgccctccccgcctccaccccacacggcatcttggcctccctgagcggcttctcttataaggacagcggtggatccagggcccaccccactccggcatgacctcatcttacccaatgacatcagcaaagactctctttccaaatacggttgcaggctgaggttcttggaaggacgtgaatgtcggagggacaccgtccaaccccgcaccctcaggcaggcgtggggactgaccacgactgcaggggcccaccagcgtctcgaatgcggccccctccccacctgccgcctgcagaggctcctgaccccagccccctccccacctgccgcctgccccaggttcctgaccgcagtcccctccccacctgccgcctgcagaggcttctggccccagccccctccatacctgctgcctgccccgaggctcctgaccccaggcccctccccggcctgcccctgccccgaggctcctgaccccagcaaagttttccacctcgtgccttcgtcttgtctccggcagttctgacccggcagcagagcaaagctatgggctgctccaccaagtcgcattcagttgccttcagtgcccgcggtggacgtgttttcagacggcagggcggtcaccggggtgcagcctctggatgggacacacgtgggtctcccgtgcacccaccgagagcagcacagtgcccatgggggccgaggggcgctggcagggctgatagggtggggcatcgccgacccaggcccaggtttgactttccttctccttctgtgtgacctcgggtgggttcacccctccctctgagcatctctttccgcgtcataaaacagaagggctcccgccttctctgcactctttgctggctttgtaaggccttggtccagaaagactttttgtctctcggggaaattctcctctgtcccctctcccgagtccacacccagccgggtccccacccctgacggcccccgtctgcaccgcggactccgcacccacctcctcacctgtctgcacctccctgaacctcgcccagttggcccctcacatgtcctggcctcccctgctcacctcagccggcctggaagccagggccagaccagttccaacgcactgctgcccagcccagagcagggaggcagccagagggccgagccctacggagcagggcacctgccgcaccctcctgcacacactccggcgcagcctgagtgtctccacgggctcataataatcccctttgagggcctgccccagcacccccagctgccagacctcagccagccctcccttccccaaccctcagcctcttcctctaggaagggggaatggagtgagaagatgctggcagagctggggtggagtcagccctgacccacagcccctgtgattgaaaagaagcatttgtctccatgcccctgggccctgggtggtgccagcatcggaatccaacagggaggcactccccttcggtacccgcctctgcatgagcctggaggacgctgctgttatccgtgcagcgtggctgcctcagccaccttgtgacctttgtgctgccgttccctccgcctggaactccctccggctcccacggcatccttgttcggcactgagctcagacaggaccagcccagggaagcccccccttgctgatccgcaccccgcctgtcaccccacatcaaacacccagccctgcgcccacccctgttgaccgtgagccccttgagggcgagaccaggtcttccccaggcctgcatggtggacgccagcacgtgcgatccctgcagtcgctgacatcgcttcccacctcagggctccgaggccaggagtccagccccagaacggggcctcaccaggctaaagtcaagctgtgggcagggctgggcccagcacaagctgcagaggagaatccgtttcccccttttcccagcatctagaggcgcccgcatctgtcggctcaggtcccttcctccctcttcacagccacagcgcagcctcttccagtctctgtctgactcaccctctcgcccccgctcgtgaggaccctgtgaggacatcgggctcccaggtcccccaggatcatctcccgtcggtctcagggcctgtaatcacagctgtagagtctgttcccgttctccagatgaggaccccagggccctgctgctgggagccagggctggggatgtggtcctgggtcctaggagctgagtctcgcctgctcccctcgtcccagcctccttgcatggaggaaggtgctcccggctcagcccaggcctgggctcgttggctcaatcctgcaggcctctgttgtcctctctggagctgcggcccaggccctgctgcgctgaccggaggctgcgggcccaggagccagggcagggctgggggtcccctcgcagcctctcttacccttccacaaacctcactctggagaggggcagggagggcggcagccctggggacccctggccagttcccactgaccgcagctgcccaggtgctgggcgctccctgcaactccagcctgccctcgccccagcgggggcctgccccccctcactccccacgctggcacctgatttccccatgcccgagcctctcctggcgcctgcctccgaggaagcggggcttggtcagttcagacctgctcagttgttgactgcccagaacctcatgtctgggtgtgaagggggtcagagccgggggaggtttgctccctatttcccctcccctcctccaggcaggtccaagccccaggccctccgtggtgggtgccaagcctaggcgtcaccagctgcccatctccctgaggctgcaaagcctctcccctgctctaggccccagtggctgccaaccagggtgaccatggcaggccccagtggcccccaccctcatcacatcctcccagcgcactcagtccatgtcttcacttgtgtgtagccttgagaccagccccacgcggagttacacacgccrggcctggggcgccagaaggtgggccgggggcygggcccaggactcccagaggtcaccggtttcctgtctgatacccagcttgtctcttctgcaggtttggctcagaagaaggcggccccaacagaggtgagtgtctggagcggacgaagggyctggggtccccaccctgacctgctgcctccctactcgcggagaagctgtgtggcctggggcagctcactacacctctctgggccccaaatgccgtccagtgtccacaagcaggatgaacgtgaggtctacaccaactgcgtcttgagaggtcggggtgaaattccgtgatggaggagggggccctgcatctgaggggccacaccctcagtggcaggggtgcctggtcagggctgcaggggcaggaagggcttctctgggttccaggccacgtggagcctggattctggggggtgggcggtggggagagagcagctctcgccgggggactgggggcaggaatggaagacctggctggagggttagacgctgcccagagggcgatgcccgaggctaccagctgcacccacgccctcagtgtctgtgagccacacaggcgtagtgcacagtgaggctgtgtgcagcctatgtgtgcatgtttgcctgcgtgcgtgtgtgcacgtttgtgtgtgtgcatgtttgcctgcgtgcgtgtgtgcacgtttgtgtgtgtgcatgtttgcctgcgtgcgtgtgtgcatctatttttgcttgtgtggatgtttgcctgtgtgtgtgcacgtttgtgtgtgtgcatgtttgcgtgcatgtgtgcacgtgtttgcctgtgttcatttgcctacgtgcgtgtgtgcacgtgtttgcctgtgttcatgtttgcctgagtgcatgtgtgtttgcctgtgtgcctgtttgcctgcgtgcgtatgtacacgtttgcctgtgtgcacgtctgcacgtgtgtttgcctgtgtgcatatttgtctgtgtgtgtgcacatctgcatgtacatgggtcctgtcattgctgcccgtctcctcccgagagctttctctgcacgttggccctgcctttgcagcttctgccagccccgtggcgccgagtggccttcttcccagccccagtgggcgcagtggggtgggccgtcctctgagggcacccgagctgctgcatctcccgtcttcccgcatgcagtcctcagggcacctgtccatgagccccattcacaggagcagtccccaaggcacctgtcccacctgggccacccttggccctgcgtccgtagccagagcttggagggctttgtccaccaggcctgggaccctgggatccttcctcagagtcccccggcgtgggggcagtgtggagggtggcgcgggtggagggtggcccgggtggcggggtgaattcctggggagagcctgccccctggcggccacctgggagaatgcagggaacatggctgagcagcgtcggctgtggagggagggcaggggcaggggtcagggctgcaggcgtgtccctggggctgatagcggtgggatggrgtctggccagtggagggtccatggggtctcctagcaaacgcagtggcgctccttaaatgacggtgccaggcggggctgttctccttggttggcctctgtgtcccttcaggctcccaaggcccctcctcacatcctccctcgagggcaacaagctgaggccccctggggtcggcggtcccatctgctgggacacccgcgctgcccgacagcttgcaggagccgggcctgaccctggccagtgagaccatctccctcagggacaaggtggtcttttcaatccttccatcccagcggtctcacagttaggggccctggtgagggagaggagttacgactcccaccaccacctcaggcggtgggtgagatgctctgaggctggcctggctcacaccgtgttggcaggaagcctgacccccgctctgttcccacccccacctcagtcctgtttttttaaaaaatacccactttactgagatgtgatttgcatactgtactctctgaagtgtgcagtgagtgacttttagtacatttgcagagttgtgtggggacatctgtggttgccacaactgggaggtgctcctggcatggagtgggtggaggccaggaatgctgctcagcaccctgctgtgcccagggtggccccaccccaaagaacggtccagccccagtgtccacagcacctgggggagaccctggaattagagggctggagctgcccaatcctcttgcccttcctgaggaggcagaggtctccaccttggagtgagcgcttctgggtgtccagtgtgggacactgaggggccccagccagcccgccaggcgcccacgggtgaggggcctcctgctgcaccccggagtcgcctggacctgccccctgccctgtgcacccctgctgggcccaacgactaaacctttcttcccagggtttcagagcgtgccctgtcccggtgggcgtgctccttagggagttaacgcttcctgcttcctcttcccaggttctgtccatgacggcacagccgggccctggccatgggaagaagttgggccatcgaggtgtggacgcatccggcgaaaccacctacaagaaggttcctcggctccccttagctggctggagggagcgggacagagcagaggggagggggatcccactggtagcatggatggggcctatcgcccccgacacaaaccagggtctgcccagggacaggtgtgggctgtgtggaggcagaggctggagtcctcagtcctgcatgaggccccactgtttgctgtccttgccgggcggccgggcagcatgttctgtggctcagcctggctgcaacgcctgcccggctctgagtccctgaaacctcgggcagagcctgggctctcggccctggtgagggagaggggttatggaccccaccaccacctcgggcagtggatgggacactctgaggctggcctggctcacaccgtgttggtaggaagcctgacccccactctgttcccacccccacctagggcctgttttttcaaaagtaaccgttttactgagatgtgattcatatactgtacaattcagcctttaaagtgtgcagtaaatgacttttagtacatatgcagagttgtgcagccgtcacctctaattccagaacattgcatcagctcaaatagcaactctgtccctgttagcagtcacccccatcccgactcccagccctggcacccacatccctttcctgcgtctgtggatcagcctgtcctggacgtgtcatagaagtggaatcacacactgtgtggctttctgtgtctggcgtctctcactgagtgtagcgtcctcagggttcattcgcactggggcccgtgtcagagccttgctcctgttcatggctgagtcgtgttctggygcgtggggcgcccgtgctgcacttgtcctttgctgcgtcatggacgctcgggtgcttcacactcctggccattgtgaattgtgctgctgaggacacgtgtgtgtgagtctgtgtggatacatgtgttcgtttgtctcgggcagacacccaggagtggaattgccaagtcacgtgtaactcggtgtcatcttttgagaaactcgcaaactgttctccatagcagcggtaccgttttcacacccagcaacagtgaatgaggcccagcgtccccgtgtcctcaccagcactcgtgattgttgtctctgattctggcgtcctcatgggtgtgaggtggtgtctcttcgaggtgtctttttgtttgttttggtagagacaggggtttcaccatgttgcccaggctggtctcgaactcccaggctcaggggatcctcccaccccggcctcccgactggccgggattccaggtgcgtggcccccctgtggtttgatgtgctttcccttggtgcccagtggcatggagcgtctttgcgggcttcagggccgtttgtatgttatctttgggcacatgtctgttctgtccgtggcatctcggggaggtgaacatacaggccagaccccccaccacccagagtgtggcttaggagggagacaggccgaaactgggcagtggcagaaaccaactcccaactcccgacctccctccctgccacctcgcacctgcgacaggagcactggagaccggaattagagagcggaggtatgagccggcttcccagggctaaagtgaacatggcgcgagagcacacagtgagaataatgcaaacgatgccaatggcaaaaataacagcagccggccgggcgcggaggctcactcctggaatcctagcactttgggaggccgaggcgggaggatcaccagaggtcaggagttggagaccagcctgggcaacatggcgcaaccttgtctgtactaaaaatacaaaaaaataattagccgggtgtgctggtgcgtgcctgtaatcccagctcttgggaggctgaggcgggagaatagcttgaacccaggaggcggaggttgcagtgatccaagatcgcaccactgcattccagcctgggcagtagagcaagactctgtctcaaaaaataataacggggccggcgtgctggctcacacgtgcaatcgcagcattttgggaggcccaggcaggtggattagctgaggtcaggagttcgagaccagcctggccaacatggtgaaaccccgtctctactaaaaatacaaaaattagccaggcgtgacggcgcgcacctataatcccagctactcaggaagctgaggcaggagaatcacttgaacctgggaggtggaggttgcagtgagctgagattgcgccactgcactccagcctgggcgacagagcaagactctgtctcaaaaaataaacaaataaaaataataacagcagctgacaccacgtccgcaagagggccagaaccattgtgcccatccctgtctacaggcagggaaactgaggcacatagcggccatgtgggttgcccagtgtgaccacgtgcgttacatagaaagcagctaacgggaacctgcgtctgcagatgtgaaagtgatctgggcatctcgctgtaaatggtaccccctaaaaacaaactcttgacagtgaatcgacccttttgctaagttggagctgtttcaaaatgggagaacctttagaacctagctagccaacaggactgggagggctgagtgacgtggtgcggcagttgcagccgagccctgtcctggctgtgtggcccgagggagggtggcttcatcccccrgcctgatgtcgacagctcagcagccgcaggacaggcagccccggggaccaccaggagggggttggcaggtgccgggtcccaagctgcagctggtcacgatctccaccccccggtgcacacagggggtgcagggcagcgtggggagcagccgggggccctgacactctggtctccctgcagaccacctcctccaccctgaagggtgccatccagctgggcatcrgctacaccgtgggccacctgagctccaagcccgaacgcgacgtgctcatgcaggacttctacgtggtggagagcatcttcttccccaggtgggccgggcccccggagcctcagggctcacccagcacacacgtggctctgaggcggagtggcctgtcctgagcgcccttctctgctgaaagcagcacctggcccctcctggcgcctccttggccttgagctctggccctctgtccgtcaggacgtttgtttgctgctgaatcagagacccaatgtaaaggcagtttaagaacaggaaaaagaaaagatagaagttagctcttttctaatctacaaataaccagtgggcagtgcagggctggtcaggaggttccatggtgttggggtcctgggatccttctggtcaccccacaccgccatcctcaatatacagctctgtgaccagtggtcccaggtggctgccaaagctcctgccatcacggctgcattccagccacaggaggcaacagaaggagaacaacagcccttccctttcggacatgaccagtgtttctgctccactcgtgtcattggctgagtgcagtcacgtgagcacacctagctgcaagaggctggggcggcatggtcctgttcttggcggccatgtgcctggccaacactgtgggccccgttgttaatgaaagaagagagggtggttactgggggacagtcccatcgggagccccctgttgcttgtgggattgggccgtttcaaggaagtcttggagctgagccgctagaggctcagctgctagaggcactaggagggaccatggcgggggtgggggagaggtgcccaccacccctcacaggtttcctcccgtccttcctccacagcgaaggcagcaacctcacccccgcccaccacttccaggacttccgcttcaagacctatgcacctgtcgccttccgctacttccgggagctctttgggatccggccagatgattacttggtaagcatatttgctgttaygggcttccaggcttgaaacagaacatgttcagggtctcggagggtctgtgggtcaggcatttgggggcagcctccctgggttcctcgtgtagggttatggtcaggttcagggccggagtctcctgtgagactcaccgggaaagcaggagagatcggcctccaagctcacatcactggcagctgcaggactccgtcctggctggcgttggctgggagcctccattcctcaccatgtgggccttgtcatcagagcaggcgagggtgtccactcaccaaacagttggtatagtcttctgcagcctggtgccaaagtgactgacccatyttcagacttaagggttagaacaaggcactgggacgtgggtgccactggggaccagcgtagagtcggacctcctagctctagccatggctttattgtttcaggttagcaaagtcaaaatctaggccaacccctttgacctagcagcccattatccgggctcctaaaagaggtgtttggagggtggtgctccccacagtggccctggagctcatcagcgccagcacccccttttttttttttcgagacagagtctcgctctgtcgcccaggctggagtgcagtggtgcgatctcggctcactgtaagctccgcctcctgggttcacgccattctcctgcctcagcttcccgagtagctgggactacaggtgccygccaccacgcccggctaattttttgtatttttagtagagacggggtttcaccgtgtcagccaggatggtctcgatctcctgacctcgtgatctgcctgtctcagcctcccgtagtgctgggattagaggcgtgagctaccgcctcagcctcccgaagtgctgggattccaggcgtgagccccggcayccaacctgcgccatcaccacttctaaaagctccgggtggccttttcccaagcctgcctggtcatcccgagaactttgtatcagggaagactggaactctgtagacaagtgcggttggcgttctggttgtcacgacagcacggtccccggggccgggagcctgtggttctccgatcctgccctcacccrcggtggtcggttccttgtgcctttctttggtggttgctgactgtgcgtgcgtttggtttatctcagtctgtaggaagcgcccgaggctgcgctcttccagggagaactagcatgtgctccagccaggggtacgtgtgacacccccccctcccccgccccgagaactccagcctgttcaggtgcccgggagtcaccatgctccgggtcgtgtcgccaaggcccagcctccggacttcagtgtcccagcgtttgcctgagcttggcagggcagtggggagtgaaaacacagctggggtttttgcctagaaatggccctcgggtgacctggacgctaccgtgtgaggcggccaggaacagaaggcagcagcctggctcgtagcagagagacagcacccgtgtccattagcaggagtggacggataaaagccgatctggggccatctgggtctcacctagaacccgataagatcgcattccagggccttaggccaggtgtgcacccacagcatctggggagccagcccggtgttggtgacccccgaatccttctgctcatctcaggagtgtgagaattctcttgggggccyccggtgctgagcaggcggcagccccctagcctctgtccaggctgtggtgtgagtgtggccgtgygccacagcgggaggacgggctagtgtgcgtgttgctgtccacagggcccctgagcttgagtggggacaggtagggttcggaggggactcgaggttgccggtgcttctctgattggacagctgaggtcacagtcccccctggtaaggggggtagctccagsaaggcccacagctcaggacagccaggaaggagaaggcggaggtgggatgcagggtggggctcagccctgcccagtggtcagcagagggtggagaggaggccaaggtcagcggcgcagctgccgagagccccagcaccgacgaaggaggctgtggggggttgtcctggcactgcctggctcagaaatccacgcatggggcctgcttccccgtagcagctgaggcccatggaggccatagccctgcaactgccattagtcatgtggcttcagaatttccctgtcatcggtgttctttgtacaaagccgaacgtgccctttccacagtgttttccgctctgcaggtgagatcggcctccccctcctgccaccgtggacaggcagcagtgatttgtgtctcggagggacactccggctgcttggggtgtcccctgctccgggtgacctgaggacagcggcccagggcttggcggggtcccctggcctcccagggagggcgccagccccaggagagacccgccttcgctctgcgctgctgcgcctgtgtctgggaggctggagggcgtcctgccgtggcggggaaggcggaggagccgcgtgggctctgtgtttcctgtggatatttgtggctcgtggctgtgggcagaaaaaggcaggcagatggctgggctgggcgacagcagtggcctggacagatctccctccagcctcagagtccaccccacacggctctctcaccctgcaccatcactcccagccaggccatggcagaagcagcgmatgcaggaggaaggaccctcgctgttctgagctgccaaggttggcagggctgttgctgactccgcaaaatccagcctgtgttgaccgacgtgtgataactgatggcgccgttccctggcccgagagcacctcgggcagtgcagggcgggggtggtgacttgagcccaaggagggactggggcattcccaggccctgggcctgatgtgacctcatgtttccggcgtcctctggtccccaaacatattcacasatcagagtgtgtgtggcgctggggacccaactcacgcctcaagcccctggctcttccagcattttccaaaggtggttcccctcacttgttggggtgtttttttaaacactcttgctctgttgcccaggttggagggcagtggcgctgtcacagctcacagcagccttgacctcctgggctcaagtgatcctcccacctcagcctcccaagtagctgggaccacagatgggcaycaccatgcctgtttttgttttctttcttttttttttttagtacagatgaggcctcgctctgttgcccaggctggtcttgaactcctgggctcaaatgatcctcctcagcctcccaaggtgttgggattacagagtgctgggtgagccgccgtgcctggcctcccctcgcttctgctcgccaccactcctgactctcgtggacaccccccacctgtttatcacagcagcattggaggcggcacgcagcactcggagaccacccttctgtcgtccagcagatacggacccagcgttgaccctggggggcctggcttgctccgctgatggggagctggctctgacctcatccgtgtacaccaatggcgaccagttaggattttaaagggcgtgacacagatggccttagccccatgcacacttcattggttccatacccggaagacgcagggtagcacccgtgggtctcatcttcattctagtccttagcaaatcgagcacctgtcgagtcagtgacacaaaaaaacttccacctgcacggaccttctgcctaatgtccaggagagggcgtgggggcagagagacagcgagcacatcatgaaacaaacagcaggggctgagaaaaaggggcagagaagtggggaggaagggcttggactgtggggtgccaggggccagagtggggcctgcccatcagagatgcagcttccatcccagagcttaccttctagtccagtgtggctgctgaggttccagccatcacatcagcatctcaggagggaaataggtgggaaggagagaagggcaaatacgcaggtatgccagctgcctgtcgcccatctgtggagccttccctgagttccacctgacagcttctgcttatgactcatggggcagagctrgcgttgtggccccacccagcttcaggggtgctgggagcaccttttagccacgcgcgtcagcaccccggtgcgatcaggtgtccgctcctaaggagagcagcaggcagcctggggagtgcgccctagcagaccagccctcgggctgcagagtcagctcggcctcaggctccagtccttgctggctagcctcaggcaagtctctcgccctctctgagcctctctttccgcatctgtaaaatgcagcgaccygtcatcagttcctggggctgttgggcagaccggaagccagtgctgtctgtgtgtccggcagcttggggcccgctgacccgcctcctctgcttccagtactccctgtgcaatgagccgctgatcgagctgtccaacccgggcgccagtggctccctcttctacgtcaccagcgacgacgagttcatcatcaagacygtcatgcacaaggaggccgagttyctgcagaagctgctccctggctactacatggtgcgtggcccgccctgcggggcagatggctcctcggtcaacccccttctcccggctggcgggagcagatgtctgcaaggcttgggcaagcaggcatccttggggcgtggtgagaggcatcttgggtcccggggactcaccctcgggggtcccccgtcaggcttcaccagcaccagtgttcaggagcygccctctcttcctcctgtggccacacgccttgggggccgtccccgggcagggctgggtgggcaccggcccctgcctggctccccatccccaccttgccaacaccccctatgagccgtgggccccagaaccagcagcctgcgggcagcrtctgtcagctgccacggaggcccaaggggcccaagggtgactcagagggttccagagaggagggggatgggccaccagatggtaccccacaaaagaccagctgctcaggcaggcgtgaggcagctccatccggcccacccctcatcccgcatgactcacagaaagggtgcgtcaggccccgggaggggggagtaggagtaggagccggcggctgccacagtgttcctgggcctgggattccggtactcgcccagacgaggtgggcgccttccatgttgccaggcccaagctgctgcccggccctgggcagcacagcacagcctgtgactcagtttcccttgaggcctcctccatccactctctgtgatgcttagcgaggggcccgggctccttagatcaggctcagcaaactcagtctttaaaggcccagagagagtgtttttggctctgcgagccagtgtgctgtgtctccaggactgagctctgcctggatggcagcgagctgctgtgaccacatgagaatggatgggcgcggccatgtgcccatacgcattatttatggaccaagaaatgcgaattccatatcactttcacgtgtcatcaaagactattttctatttctccacttttttatttatttatttatgttttgagacggagtctcgctctgtcacccaggctggagtgcagtggtgccatcttggctcactgcagcctccccctcctgggttcaagccattctcctgcctcagcctcccgagtagctgggactacaggcgcccgccaccacgcctggctatttttttatatttttagtagagacatggtttcaccgtgttagccaggatggtctcgatttcctgatgtcgtgatctgcctgtctcggcctcctggagtgttggaattataggcgtgagccaccgcgccyggcctcttcattttttttttttttttttttttttgagatggagtctcgctctgtcacccaggctggagtgcattggcgtgatcttggcttactgcaagctccgcctcctgggttcaagcgattctgctgcctcagcctcctgagtagttgtgattccaggcacctaccaccacgcctggctaatttttgtatttttagtagagatggggtttcaccgtgttggtcaagctggtctcctgacttcatgatctgcctgccttggcctcccaaagtgctaggattatagatgtgagccactgtgcttggcctttttttttttttttcttttgagatggagtctggctctgttgcccaggctggaatgcaatggcacaatctcggctcactgcaacctccatctcctaggttcaagtgattctcctgcctcagcctcccaagcagctgggattacaggcatgcgccaccactcccagctaatttttatttttaatagagacggggtttcaccatgttggccaggctggtctcaaactcctgacctcaggtgatccgcccgcctcggcctcccacagtgctaggattacaggcatgagccatcgcactgggccctttccaytttttaaaaatggaaaaaccattcttagctcacagccctacaaaaataggtggtggccggattcggcccaggggctggagttcacctagcctgcccaggctggtgcctgagtccgcgcccctcactcctctccctgtgggtctgtctcagccccgacacctgggcagcttcccactgggttcgtcattgagaggctctgggcagggggcgctgttgcttcacttgggtgcccctgagtcacccagtgcctgcttggggtctacagggtacagcaggacccagactcgtcactgcgcctggggacccagatttggagtgaaagtctgagttgatcagttcaacacaggcaaagcataaccaacatagaggctgggctcacgcctggagtcctggcactttcggaggctgaggtgggaggatggtttgagccctggaggtggaggctgcagtgagctgtgatcgcaccgttgcactccagcctgggcgacagagcragaccctgtctcaagaaaatacatgtgtgtgtgcgtgtgtgtgtatgtgtttgtgtgtgcatatacatacatgtatgtattttaggatacagcattgcgtttccggcctccagacctcccaacaggcgagcccagccagggcgatgtctgtgggcaggcagggagtgtggaagcttctgctggaacagaagcgcctgccttggggcctggctctgtagaaacagaccctcctggagctcacagttgtggcccatgagagtcagggtgccgtgggaaggccagctgggtgcctgcataggaacggggtccccgagggcttctggggagagaggggggctggccaggggcatccatgagccccctgaggcagaggcctgctttgcccgcccccgtgagtctgtggcccagccgccctccacgacttgccctcttcccccggcagaacctcaaccagaacccgcggacgctgctgcccaagttctatgggctgtactgcgtgcagtcrgggggcaagaacatccgcgtcgtggtcatgaacaacatcctgccccgcgtggtcaagatgcacctcaagttcgacctcaagggctccacctacaagcggcgcgccagcaagaaggagaaggagaagagcttccccacctacaaggacctggacttcatgcaggacatgcccgaggggctcctgctggacgccgacaccttcagcgccctggtcaagacgctgcagcgggactgcctggtgagggctcggccccggccggggagggagggtggcaggtgggactgcgtggtgagggctcggcctgggcaggcagggccagggagggtgccaggccgaggcccacctgccctgcagcctacagcaggccccaccccagtgtgggatccagaagcgctcaagcttttatggccttaacctaaaaygtggccggacacagtggctcacgcctgggatcccagctctttgggaggcaggcagatggcttgagcccagggtttcaagaccagcaggggcaacattgtgagaccccatctcacaaagaaaacaaaacacttataacatgtccccagacccagcccttgggggtcgggagtgtctgcactgctgagaagtggttcctctggaggttacacgatgacagtggtagagtccccccaccccccagagaagagcccagccttcagatgctgtggtcacaagcccagagctcccagccagccatgagagcttgctgtgcctcagtttcctcacccatcaaatgggatgactgcttgctctgcaggccacagtgagggcccatgtgcgtccagtgagggtctggctcctgtccccgtggagcctgcgtyggctccgtgttagcgaaagaatgatatgcacggctcttcctctgcctgggttagctccgtcgtccccgtcccaccccggcagcttcgaggcatggagccaaggaggggaggccccagcctgtcaggagcagagcctgggacctcccagctccccaactccacccaggccccgctgctgaccatccccagctccccgacccctttgagaacttgacccatacccccagaaaaccgcccagaccactcaggggccttgaggctaccctgggcatccacccacctgggtgtcacctgtcaggccgggcacgtccttgcccatgggcctgggctggtcagagcataggcccggctccctgtctctcaggaaggagtaaagccaggaagggaagtccctgtctcagtgcccggggcagcctgctgtgaggctggaagcccccattctctggcctgctctgatgccgctgtgtgaccgcagcccctctgttcctcaggataacactagaacccccactcctgcctggccgtgggactccatctctcacacccgagcccacggggccatccgtgctgggaaccccatagggtccgggagccgttgtgggggatagagacggctgacggcgtggcgtgttcctgcccgatcccgccaggtcctggaaagtttcaagatcatggactacagcctgctgctgggcgtgcacaacatcgaccagcacgagcgcgagcggcaggcgcagggcgcccagagcacctcagatgagaagcggcctgtgggccagaaggcgctctactccacggccatggagtccatccagggtggcgccgcgcgcggggaggccatcgaatcggatgacacgtaggtgggcggggggccgccggacccgtcccgcttcccttccccacaggctccagttccccatccccgtcccaagtgtgaaaacaggcagggagggctggcgagggcatgcgtgggtgacagacagagtctgggagccttgtgccagcgcctcagagcgaagccaggccgtagtgcgggccgcaggctgagtgcagggttccgggccttggcttgcaatggtgggggcgtttcccattcacccgtgactgggccgaggccactggccatccacaggaatgagagagagatagcgtttcccggtggcactcagaggggtctacacgccacccgtgcagagaggggccacaaaggtgtggaaggcgcatgggaggccagagggatcgggcgaggcagggctcacagcaggacacagcccacgaagcagagggactgcaaaatccgattccacacagatcaaagcagctgctggctgggcgcagtgtctcatgcctgtactcccagcaccttgggagaccaaggtgggaggattgcctcagccccggagttcagtaccagcctgggcaacatggcaagaccccatctctacaaaaaatataaaatgtagctggacgtggtggcacgtgcacctgtagtcccaactacttgggaggctgaaggcgtggcaggcgtgagcgtggcaggcggaggttgcagtgagccaagatcacaccactgcactccagcttgggcaacagagtgagaccctgtcttaaaaaaaaaaaaaaaaacgctgggcgcggtggctcacacctgtaatcccagcactttgggaggctgaggcaggtggatcatctgaggtcaggagttccagaccagcctggccaacatggtgaaaccccatctctgcttaatacaaaatattagctgggcgtggtggtgcacgcctgtaatcccagctacttgggaggctgaggcaggagaatcgcttgaacccaggaggtggaggttgcagtgagctgagattgagctattgcactccagcctgggcaacaagagctaaactctgtccaaaaagaaaaaaaaagtggctgccacagaagataggaacggtggtggagagaggaggccacatctcagtggcctgcagtcatgtctgctggacaccaggggcagagggaccaggcaggccctgccctcacagggctcagggtttggctggggagatactcacagagctctcctgggacactggatgtgagggctgggtcattctctggggtggggctgtcctgggcactgcagggtgctgagcagcgtcccgggcctccacccactccgggccaggagcaccccccagttgtgacaaccacagatgtccccagacatggccccggatgcgggatagacaggtgtcgtatagcagtgctgagattgtgccctggtcacagcagcaccctgacagtgggggcaggcccgagccttcactttggtacctgttcagtcttcacagcggccttggaggagggaggtgggcttcccctgtttccagctgaggaaataggctcctaggttggggggcagccttccccagtgcagccacgaaggtgtggagccaagttccacctggcctggccccagggacggtgctggctggcactggctggcactaggccaccagctgggctttggtttgcagcggtggtggtatttcccatggatggcagaggaggagccggggccccaaccagggtgtagctgcgggggggtgcgggagccaaggccaggcacagctccccctcagaccatcctggcgtttgtagggtcttcgctggcctggcgggggagcaggtgagcgtaccagcctgtggcgtgagcagagcgtgcagggcgccagcccagcgggtctgggtcccagtggcttcaggatgactgctgcacgtgtggcctcactaaccgcgctgggcaggggacgtgtgggcacggtgccgggtgacagttaactcccgcgctgggcaggggacgtgtgggcacggtgccgggtgacagttaactcccgcgctgggcaggggacgtgtgggcacggtgccgggtgacagttaactcccgcgctgggcaggggacgtgtgggcacggtgccgggtgacagttaactcccgcgctgggcaggggacgtgtgggcacggtgccgggtgacagttaactcccgcgctgggcaggggacgtgtgggcacggtgccgggtgacagttaactcccgcgctgggcaggggacgtgtgggcacggtgccgggtgacagttaactcccgcgctgggcaggggacgtgtgggcatggtgccgggtgacagttaactcccgcgctgggcaggggacgtgtgggcacggtgccgggtgacagttaactcccgcgctgggcaggggacgtgtgggcacggtgccgggtgacagttaactcccgcgctgggcaggggacgtgtgggcacggtgccgggtgacagttaactcccgcgctgggcaggggacgtgtgggcacggtgccgggtgacagttaactcccgcgctgggcaggggacgtgtgggcatggtgccgggtgacagttaactcccgcgctgggcaggggacgtgtgggcayggtgccgggtgacagttaactcccgcgctgggcaggggacgtgtgggcatggtgccgggtgacagttaactcccgcgctgggcaggggacgtgtgggcatggtgccgggtgacagttaactcccgcgctgggcaggggacgtgtgggcatggtgccgggtgacarttaactccccagtctgtacctgagaccccgtggccctacctgggcatgcagtgtgcgtgtgtgtgcatgtgtgtgtccaggcacacgtgtgtgtagggggtatgtgcccaggcctcctagctgggactcctcagcagtgcctgggcctgggtttgaggctgggggtgatggagggatgtcaggacagaggttcccgggtgccaggccccactccgagagcttggccaagttgccacccacaggagcagatggactccctagccctggagtccccagccccgcctgccccgagtcccagctctgcgggatgctgatggtaccctcggcctctctccccaggatgggcgggatccccgctgtgaacggccgcggggagcggctgctgctgcacattggcatcatcgacatcctgcagtcctacaggtgggtgcccgggtctgcagtccyacaggtggacgccccgggtctgcagyccyacaggtggrcgcccgggtctgcagycccacaggtgggcgcccgggtctgcagccccacaggtgggcgcctgggtctgcagtcccacaggtggatgggcgcccccaggacacccatgcacagaggcgcttgcccgtggaaacagccgcaccagcagctctcggggcttcctcaacctggaaagctcttgcttggctgccccttcttgagccctaaagggaaggtgtttggtcgccttgaaaatctagagtgagttgggcgtagtggtccacacctgtaatctagcactgtgggaggccgaggcgggaggattgcttgagcccaggagtttgagaccagcctgggcaacatagcaagaccccatctctacaaaatatcaaaaaattagctgagcgtggtggtgctcctgcagtcccagctacttgggaggccgaggcaggaggattccttgggcccaggagtctggggctgcagcagtgagctatgatggccgtactgcaccccaggctgggtgacagagcaagaccctgtcccaaaaaaaaagaaaaaagaaaatccaaggagtgggtttgaggcctcactttggggctcgaatatttgttttttggtttttcatttgtttgttttaagacaaagtctcgctctgtcactcaggccgaagagcattggtgcgatcttggctcactgcaacctctgccttctgagtcgaccctattctcctgccccagcctccccagtagctgggattactggcacgcgccagcacgcccggctaatttttgtatttttagtagagatggggtttcaccatgttggccaggctggtctygaactcctgatctcaggtgatctgcctgccttggcctcccaaagtgctgggattacaggtgtgagccaccgtgctcagctggggctctagaatgtttaaaaacagtcaccccctcggtactrtggacattgggaccagatggttctctggggtggggccgtcctgggccctgcagggtactgagcagagagcctccacccactccctgccaggagcacctgccaccctgagttttgacagccacgactgcttgaggccatggcccagtgtcctggggggtgcacagtggcccctgagtgaggyggcctggcatgggcttggctgatgtcagctgccactccgggtgctctctccacaggttcatcaagaaactggagcacacctggaaggccctcgtccacgatggggtgagcgcctgcaccctcctcccattcctcctcccatccctcctcctcctgtgagtgcctgcaccctcctcccatccctcctccctctgtgagtgcctgcaccctcctcccatccctcctcccatccctcctcctcctgtgagtgcctgcaccctcctcccatccctcctctgtgagtgcctgcaccctcctcccatccctcctctgtgagtgcctgcaccctccccccatccctcctccctctgtgagcgcctgcaccctcctcccatccctcctccctctgtgagcacctgcacccctcctcccatccctcctccctctgtgagcgcctgcaccctcctcccatccttcctccctgtgagcgcctgcacccctcctcccatccctcctccctctgtgagtgcctgcacccctcctcccatccttcctccctctgtcctcctgtctgtcgtcccagccttcctcccatccgtcactccacaaacgcagagtaccgcctggggccaggcactgaggactaacgtctgtgtgaccacagcctgtagaatccaagatcccaacaggcacccccatttttcaaaagagcgtgtagaaggtccaggcaggagcttccagaataagccttgagcgggtcaggatggcagctggcagaggcctctggggatgtcttaaaccttgccaaggcccggaaccygctgcccagggcagataggagcgctgtctcggctctgacgaggctggccagggtgtcctgtgctgccgccgcatgtccctggggttgtccttgtcccctggcccagagtggccgggcaccacctcccactgcagcctgcgggggtggagtcgttcacagtcctggtacgtggccactcctcacccaaggaggctgggaaaggaggttgcattctgggaggccgagatcacatcccagcagggccccagccaggccatcctgcctcagcctcccctacaagtccacgtgggccactgtgcctggccggaatactttattcagctggtttaaaaagtcaaaaatgctaacaggtctctagtggaaaagcctccacccattccctggcacccagtctccctccccagagggagccactgttccctgttccgtgagcccctcccaggaagccatggcgccatggacccatctcgagccttttcacacagaaggtgccccccacacacatacagcgtctgtctggggctgtccccagctgttgattgatgcaccctctgcccccgggcaccccccccaactctcttccaggacacggtgtccgtccaccgccccagcttctatgccgagcgctttttcaagttcatgagcaacacggtctttcggaagaactcctgtaagccacctgagccccgcaaggygggagggaccctggggaaggcccagagcgccgtggggcaggagggactctgcgggaggccgagagccccctgggcagggcagtaaactcagagcccytgtgcccccctcagaccgggcctcatccggaggtagggtagtcgggatatttgctctgcacagcggtagagcacgggtctggagccaccgccagagcctgaatcctagcctggcctcgtcctgcccatgtggccttgagcaggcacctgcctctgtgccttggtttccccattggcacagcactgtgagggtacagtgtttatatatgggatgggtgggcctgactcagcagatagctcacagtgtgtggggctgcccacagcatcaccatcgccaaggaaacgcaccccgggcaggggaacgcaggaggctagcccagcagggcatggtcgggaaggtcccagggcaaacagtggtggggaaggtggggactcgggattcacccacagggtgcccgggggaggtccccatctctcagggctcagcttcccctcatgggccactgtagcatctggacgcagactctgggttccaggcccctgtgcagacctcagcccgtggccaacctgctgccagatggattcccccctggggtctgtttctcagccaccctccccaccagaaggctcccgggctccccagcatcctgcacaggcctggcccacagagatgcttgggaagtgtctggtggggggcatgaatgatctgcgggtccgcacccacgggggttgcagggaggtggcagggacaggcacgccagtgcccagcgcttgcaggcaggctgctcttcccggcctgcacacttgctcacggcctcgaggtcagggaccccctctcatcaacaccgtgggaattggcagacaccacgtgtcaggatctgtctccagagagccagccgttgagcctgtccccacaccccactctctgggaccgatgccacaggatcattccgtcatccagggctgtttgccagcctttggtgattgtaggaagctgcacaaggcaaactgagcacctactgtttaccaggagctgtgtgggtcattctgggggcagaggtcacaagagcttggtgaggaggcagagctcacacagcactgaggacaggcctggccctgtgcgggacatcacctgccccacctcaccccaccgctaaggtcggcccccagggcccagagagaccgagccgcacagccagcgggtgagcctggatctgcgctcaggccctacatgctgagccacaggcttctctaaccacaacacctggtgctccccaaggctgtcagtgtccatctgaaagtgggggccctgcccgggctgggccgcacatagaaggggttgaagcctgcaggcatccctggccagctcattagatgggagtcactggtctgcaggatcccrggaggggcaggcactgtgccaggtcccagtgtgtctcatagagacagtcgggtgggcaggacagggaactcgggctcgcagtccctccccaggcagaccccrgttttccaccaagaggttgtggtgcttcctggcctcagggaccggtaggggtctggtgggccacagggaygtggggtatatgtgggcggcggccctgtctgggctttgctatgagcccccagcaaccccaagcaccaacccccacccttccctgcagccctgaagtcctcgccctccaagaaggggcgcggcggagccttgctagctgtgaaaccgctggggcccaccgctgccttctcggccagccagatccctagcgagcgggaggaggcccagtacgacctgcggggggcccgcagctaccccacgctggaggacgaaggtgaggggcagagggcagagtgygcttgtgggcgctacagggggtgccagcagcagccccgtgggtggggtgccgcctcatcctgagtgcccatcgctcagccaccccctycggatctgcagggccgcctgcccagggagtgggggctgctgggaccgccccagggaagagcccakggggagctgagtatagaaggctccaccaggtggggtggtgacagctcccgccttctctcacggccactgtcatctgaggtgcaccaggatgccatcgaaggcatgcagcccccaggctagggaatgaaggaagggacatagccatgcaagggccctggggcaggaccacacctgctgagggaacagcaaggagcccgtgtggccaagcagcgcggaggggaagggaggggkggtggggaggggaagagagcagtggaggggaagacagcggggagggagagtggagaggggacggggccaggctgcacagggccctctgggctgtctggattctattttgagagcggtcagaagcctttgtgtgagggggaacgtcgtccttccctgccgtgtggggaggtgggagtgtctgggaggcgggcgggcactgggctgtgggttcccagggtgagccaagcctcagggagaatcgactgtgtgtttgggggctcggaggctccgcaaggtgcccacagtcctctcccctcaggccggcccgacctcctgccctgcacgccaccttctttcgaagaagccactacagcctccattgccacgactctgtcatccacatccctctccattcctgagcggtccccctcggagacgtcggagcagccgcggtacaggtgggcgaggcatccgcagtgcatgtgggcggggcatccgctgtgcgtgggggcggggcattcactgcatgtgggcgkggcatccgctgtgcatgtgggtggagcatcgtatgtacrgtggatgtacatacactgcatgtgggtgcgygggggcggagcatccaatgtgtgggagggaggagcatatgtacaggtgggcagggctgccagggggcaggtaggcaggcgggtaggcaaggcaggtagactgagcaggcgggccactctctttcygggtgtcacgtgtttgctgtatctctgcaggcggcgcacacagtcgtctggacaggatggcaggtgagacccaacccccttccttccctgggtctcaccagctcctcctgcacagctcccagctccgtttcccrccccccagcccctctgctctctgcccattctctcctggggacagatttaagattgtagcactcggccctagcaccgcacacaatcttccagccactttgtttttcttacagccagagccagggcagctctggtctgtggatccttccttatttcttcttctattaagttttttttttaacttaaaacaagatacaagagggaatatcgtgaaatgcgccccctcctgcccacggcctgtcccctccccaggagcaaccactgggactgtgggttttgtctcttggaagatactttctgggaacacagcagacgtgcaccaggcttgtggttcccttttattttgacacaaatgggcacacccgtgcacgccgcccacaccttgctgttgtcactcgactgacggggatctcaggggtgggtgcgcgccgttcctgtcacgcctgcgtgccgtccttccatcccatggactgcacctggctttaagtgcccagccctcggggacatttgcgaggtccctggggtctcactcttgtgaacactggggcagtggcgcggtgttgcttttcttaaccgtgttttaatcgctgccgcctggtgaaagaaaccccttggtgccctgggtgggatgtgaccctccctgcagtctagcgtgccatttggagagacatgttacatggccaggcccggcggccgggacactgagtcacttgtgtcagggcctcggctgccaggtgcaggcactgcctggagggtgggcagggtctgtggcacccacrccggtcggggctgccatttgctcatatgcccccagagcccgctacaccccaggccctgctggcaccacagtcaccaagggacccaggtggacagtccccgggctgggagtgacagccagaaagaacagacccaatcaggaggctcccaactcccctctgggactggccctggagttcactgggcactcctgggggtaggatgggggaagtgaggagggaaaccgaggcacaacctcccattgcctgcaggccgcaggaggagccacccgcggaagaggatctgcagcagattacagtgcaggtggagcctgcgtgcagcgtggagattgtggtccccaaagaggaggacgcagggtgagcacggcctcggcgggaggtcggggcrcccacctgctgcgggcccagaggagccaagagcaccccgaggtttcatcatgaagcagttctttcttactaggttgtattcacagatggtggattttcccataagtttattttttgattgaagggagtggttctcgactagccggggtgatcctagcccccaggggacactgggcgatgcctggggacatttgtgactgttagaactggggggtgctcctggcatggagtgggtggaggccagggacgctgctcagcatcagcctgcagtgcccgggatggccccaccccagagaaggacctggttccagtgtccacagggcccaggcaagagaccctgggctaagggttgtgtaagagcatctctgaacttccaagtatttaactaatttttttttaacctttttagtatttattaatttaattttattttatttttaattttttaaattttttttgtgagacaggatattgctctcttgcccaggctggagagcagtggctcaatcttggctcactgcagcctccgtctcccaggttcaagtgattctcctgcctcagcctcctgagtagctgggactacaggcacccaccaccacgcatggctaatttttgtgtgtgttttcagtaaagacagggtttctcccatcagccagctgggcaggcttggtctcaaactcctgaccttggccaggcacggtggctcatgcctgtaatcccagcactttgggaggctgaggcaggcggatcacgaggtcaggagatcgagaccatcctggctaacatggtgaaaccccatctctactaaaaaatagcaaaaattagccgggcgtggtggtggacacctgtcggcccagctacttaggaggctgaggcaggagaatggcgtgaacccgggaggcagagtttgcagtgagctgagatcgcaccactgcactccatcctaagcgacagagcaagactccacctaaaaaaaaaaaaactgacctcgagtgatctgcccaccttggcctcccaaagtactgggattaattttattgatttttgtattgaagaaaaaggcttaaaagaaatatctgtttttttaaaaaacacaggacacaatagttctggcccttttggggatatggtgtcagctgctgttattattattttctttgagacagaatctcgctctgttgcccaggctggagtgcagtggcacgatttcggctcactgcaacctccacctcctgggttcaagtgattctcttgcctcagcctcccgagtagctgggattacaggcatgcaccaccacgcccggctaatttttttgtatttttagtagagatggggtttcaccatgttgaccaggctggtctcgaactcctgacctcaggtgatcctcccgcctcggcctcccacagtgctaggatgacaggcgtgagccccgtggcggcccctgtatgtttttacttttctgtcatctgtctggtgtgtataatcccatgcttgcactgttaccaaattcttcttgcctttgtaatgatttttgcctgagatgcttttgtatttttgttccaagagagcttttttagcgctcacagcagcgtagacccaaaactaaagccctgggggtttatcttccacccagtgctcctgccactgtcaactctttgccattgccaaaccttgcaccgtgaaatttcaggttttgctgaaaggaactgtacctccgacatggcaggagggcatgtttagcctcattcctgggatgaacacgatgcaccgtgtggccatagccaaggccaaggccgttcctcacctcctctccgtgcctccgtttccgcaaatgcaacacaggggcagtagccgcaccctctccatcccccatgatagactcagtgggttaatcacgggagccagccctggcatgtagtaagtgctcagtgaaaagaacaaagaggctgggctcggaggcttccgtctgtgatccctcctaaaggaggctgaggcaggaggatcgcttgaccccatgagttggagaccagcctgggcaacatagtgagaccccatctctaaaaaaaaaaaaaaaattagttgggtgtagcagtgcacacctatagtctcagctacttgggaggccaaggttggaggatcgcttgagcccgggcggtggaggctgtagtgagccgtgatgacagcactgcacgccagcctggctgatggagccagggcctgtctgaaaaaacaaatcaatgaaagaaggaagaagctctgatcccagcggctaggtgccatctctccccacttgacagatgaggaaactgaggctcagaggaggaacaggccctcccagggtggcacagccggtgagggtgaggccagcacgtgcccacaggtgtgtgtgtctgagctgggagtggcagggccgagctgtcagcgggctggcgggtcactccaggtcactcctggggccagcatgaggggcttcttggggaggtttgttctgatttgcgataaatggcagcgcaggagcgcgcggcctgtggtcagctgcctggcttttcatctccgtgatgaccgtatgaagcccctgcctgggtcctgagtgggggcgcggggagtctccgtgtggggcctgagggtcaagaccctctgtctactcctgtccccagggtggaggcttccccggccggtgcctctgctgctgttgaagtagaaactgccagccaggcctcagacgaggagggcgcacctgccagccaggcctcggacgaggaggacgcgcccgccaccgacatctactttgtaagtgccccgggctcctcctgcyrccggctcgtcaaccggactctctctcacacacgctccaccgtgtgcacaccgcatacacacacctgcacacaggcacgtgagtgtgccctgtcgacccacccacatgctctctcaccagccagcactctcacgacacgcccacacgcacccaccagccacgttcacacccaccttctcttcctggtctaaccccatggggtgggaagctcctccaaaccaggcctttctgaggccccagagccacccctgtccccttccccggccttgtgcccacggcaccttctgtgccacccgtctccctggaagtcgtccggagtcctcagactcttggcccctcgggaggccctggcacaggctgaggtcctgtgtccttgacagcctagacgtccagacagggctgtggcggcaggaccttctccctgttgccgtgggcgtggccaggtgggcttatccttgaggagggccgggggaccgggcagtggcaggagggcttcacgctcccacgccgtgggctggggactcgtggctgctactgggcagggcagggtctgcccggccctggggacctgggatccctgctctcccttgccagggtctgggtgaggtggctgccgggcggccagcgaggcctggaatgtccaggcagcgtctccactccccagtggtcccactcagatcaggcagccccaggtcacagggagggccggaggctgcagcccacttcccagatggtttgttctcaccctgcaccccctgggaaggagggctgggcacgggcaccaggccttagggcctgttgtgggggcacctcctsgctgcttcataactaactcccctgctctgtctccagtggcgcctctggggtccccatgcacccacctggccctggagaagggagggacgggccgcgtgcctgtgcccctacccaccgcacgtcgtcaccccttttcctgggactggtttgtgcgcgtcctggtctccggatggtacggggggcctgggggccatgtcgtgctgtgtgtctgtgtcctgatgccctgccaggtgggcagcagagaagggagaagggtcctcggtcctgcccctgccccggcaccccccaccttctgcttggcagtcagctgtccccacctgctccccgccacctccctccgcctctcccacccgaccacgggggtggccgcctcatccgctgtcctctgttttccttcctcctccggcccacccggcccgccccgtccagttcacggatgggaggtactggatttactctccccgccatcgccgactgcgggccgtgacgctgagcgcctcggggactgtaagtgaccgcagccggccaccctggggagaaggggcagtgcccctcgggcagcagggagccgcaggtccccggccggaagctcagtgtctgacgtcagttgttttccagaagggctttgggtaaatcacggctgcaattgaggtcagccacgctggccccggaccaggcgctgggctgcatgcgtcactgggaatgtcattcggtcccacgtcgaaccgggcgctccatagggcagcaccatcaccaggtgcacagctgaggcccagggtctgcttcggaccccggccagaccccagcgagcccctctctgcccctggacccagccctctcgtgtcagggtgtcttgggtggacgcttctcactcgtgcagacctggctgcccgtggccccgctggctgcacaggggaggttgcacaggtcagcagagtggctgcagggccgggctctgaaccgcagggccatggagacggggaggagatggtctctccacacccacctcacagatggaggcgctgaggcctcggctcccctgggagcctgggagaccacacggtttagtcaaaatccagatccccaagctctcaaggaggtccccctgggacgccacatgggccccacgtagctgtgagatcctcagggcctgctgttgtcattatgaccaataagcaaggggcccagagagcctaagagacctgcccagcaccgcacagccagaacggggcgcagacccaaagcaggagtgtcccctcgagacaaagcctccgccgaggccgccgtgactccccgcccatcagcaaacctctccgagcacctctgtgtgccaggcactgtggagtgaccccaagaggtggagaccacttccccggctgctctaggcagctccgtcccacggagccagcgggaagccagccaccgcgaagccgtgccccggagatcgtccaggagctgcccagaggggcctgctgggaggaggagcactggagagacccagcggccctgctggccaccccaccataggcagggagcagttcgcagaggccgcctacggaggggggtgcttggactttgaaaaacacctgacttgaaggggcagacgtggggagggtggtctcggcagcaggcacagcagaagcggaagtgtgggggccagaagggaggcagggcagccattgaaagcaccccaaggcctgagtgctgaagaggctgtgcccttggttctggtcttcctggggtcacccggttctgggtcccagctgctactgccccccacttcccctgtctgcccagctgctggctgagggtgtccctctctgtccccccaactcctgcaggacaaggaagccacctgtcctgccctttcttttttttcattttttgagacggagtcttgctctgtcgcccaggctggagtgcaatggcatgatctcagctcactgcaacctccaccccccaggtacaagcaattatcctgcctcagcctcctgagtagctgagattacaggcgcctgccaccatgcctggctaattttgagttttttgtttgtttgtttkttgagacagagtctcgttctgtcgcccaggctggagtgcagtggcacaatctcggctcgctgcaagttccgcctcccgggttcacgccattctcctgcctcagcctcccgagtagctgggactacaggcgcccgccatcatgcctggctaatttttttgtatttttagtagagacgaggtttcaccgtgttcaccaggatggtctcaatctcctgacctcgtgatctgcccgcctcagcctcccaaagtgctgggattacaggcgtaagccaccgcgcccagccttgtttgttttttttgagatggagtctcactctgtcacccaggctggaatgcagtggctcaatttcagctcactgcaacctctggcctgggttcaagcgattcttctgcctcagcctcccgagttgctgggattacaggctcctgccaccatgccccaataattttttgtatttttagtaagagatggggttttaccatgttggccaggctggtctcgaactcctgacctcaggtatctgcccacctcggcctcccaaagttctgggattacaggcgtgagccaccacgccyggccttaatctttgtatttttagtagagatagggtttcgccatattggccaggctggtcttgaactcctgacctcaagtgatccacctgccttggcctcccaaagtgctgggatgacaggcgtgagctcctgcacctggcctgtatccccgtttctaatgctgtagcagaaggatactgtcatccctgcccacgtgctgtgtgtgcccgggatgcccctcccagagagcggctctgaggtggctgctgccaccctcctccctgcgggccagttctttcagggctcaggtggggaccctgttttggccccacattttcaagtccccatgggatccatcagtgcagccaccaaatcagtactgagcacccacataggctccccatgccgggctctcaagggacgttgggtggacctgacctgccattcccacgtcagggattccaggctgcatttgctaccctggaggaacaggcaaggcctgcgctggggtcctggcccctcagtgcaggagtcagtcctccgcgatgcggcctcgcagggcaggagtgcgctgccctcggtgcccagggcccgggaacaggggtcttgtggaagctgtaggatcgggcagggtggagtgagcacagaggtgggccctttagagggagcatggaggcagagcccgaggcagggagaggcagtgctcctgcaggtgaggtctgggctcacctggagcacaagggaggcccctgctggcccaggctgggcaactgggagctggcagaggcatgggttggcctgggcagcaggtgggcagcgtcatcctgactggaaggacgagcagtgggtcttggggtgatggactgggttgtgactgtggcgagtttaggggccgagggccgccaggtggacgtggccaggcaggtgtgtattcaggcctggcacttcaggccgaggccaggcctggtggaaattcgcaggtcatctgtgccgggaggggcgttgaaggctgggttggtgacagaggcccgagagagaggaggacacaacaaggaagacagggcggccaggctggagccctgagaaagcagagcagcctaggggcaggagaagcagggggagcttgagggggtgggggctcctcaggaggcgggacggaggtgttggaggaacgcaccctccctccctccccagatcccacccagacctgggacccctcacgcaggcacagctgggaagagctgtccgtgtccctgcacacggccctgcctgtgcctagccctgaacttggccctcactctgccctgctgctcaggaaggcgtctcctggctcttgcagggtgggtggtccgagcctcagtctctcctagcacgtctgtgctggcagaggggactggccctgcccgcaggcagccatatattcaggtcccaaaaggcttctgggttgggaagtaggtccggcaccccgacctcccaggacccccatagagagcttccaggagcctgtgcgctggtgcccgtggcacaggcaggattgggggctgtggtggggccgggctgtggaggaggaggaggaggaggaacactcggtgctccaggtcgcgacccccacccgcttccgccggctctgtcacctgctatctcaggccctgcctcgactgaactaactgctttctgccgcccgccgtgccccgccccgccaagctgagctgaggccccaggcccgtccaggttgggagcaagtccaccgggtcagagagggcagctgggctgagccacccctcgtcttccatgggggattygcctcttttatgttctcctgtctcttccttcctccctctgcctctcttgcacctcctcgcaccctgctcttccgcgccctcctgcacgcgcgcccacctgccagcccaccgatgagaggagctgggtgtactccccgctccactatagcrcccaggccyccccggcctccgacggcgagagcgacacagtaagtgcagcccaggtgcacccgccggtcccgtgggctccaaggttctactgagcgtggtccccagctactgggataggcagggactgaggcccggggcgggagggcacaggtggcccagagctccaccctgggctctctggctctgaggtggccgtgggstaagtgtctcagggcctgtgttggcccaaggaagccagtccctggcagggggcctggggtgggccctcgccccgcccaccytcacctgtcctcttgctcttgcagtaatttctatgcagcccccgacccagagccgagctccacttctgctccggctkcccccgaaggcgctgcccaccccgctgaggcccagagctcgggagatgcccgcctcgccgccccaccggacctcgtcctccccctgcacggatgccgacggccgggcccctccccgacaagcctcccagggccccggcaccccggtcggcagcctgcccctgtgagacccaccctcccgagcggccaatcgcatttgagtccttatttggcacagagacggaagcacgtgtgtgccgttttaggaaaagaacaaaaaagacacaaacaaaccaaccagagggagaagagcccctgcccactgcactctttggttctctgctgtgcctgcctgtgtcctgaggaagaagccaggctgttcgcggtggcctctggggacctgagccccgggggccccatcggcctgcagaggggacggctgggrtcccgagcaactctgcctccatccacgtgggaagcggaccctcctgccctcagcttgggtttgggggcctcagtgcaggacatctggcctgaacatcractgtggggacagccctcgccctgccaagcactgcrgccactcagcagctatgttcccgccgcagtggggccctgacgcccacctcccaggtgcccctcgagcaaaaacctctggcgcctccaatccagacccaccacagctggagggccaggcctcctcttccccaggctgccacccacgctggcggagctcagggctggggacttgtccttctcttccaacgtaggccactcagcaactggcatggagggcccaggcaacggagacgttttctccatggcaggacagagcgggaggccgggccttgggccacaggagaccagctcagggcggaaggtcaggctccccgccccctccacgtggagacatggcctagggggccaggcccggctccacaggagtctccttcaggactggtgtggatgtccgccgcctctttcttgtttaagtgatgtgatgtctccgaggaggggagagaagactttgtttccgactcatcaccctccaagagggcagcgctcccagtggtgggactcagcccagactgccctggggcagcttcctgggcccgctgcgctcagagggtgctggttggaggccagagctcggcagagtcacccaccctgcccttccccaggacccctgagaggggcttattggtgatggctgtgggaatcccccacttccaagatgtgcccaggatgtgaggagctggagtggaagctgcacctttgggaagaattcctctccagacctggcagagcctggtgtggggtctgagacggccggagaacctcccaggcagggctctgtgttttgtctgttacaacctccgtatgacgccacgccacccgctgttcacgtcccgtcggcctcctgcacagcccacacgctgcgccyggaaggcccctgctgtggagaagccggacccatccccgaggtccccagcgaggacacacactccacgagagcagcccctccactctgcccaggagaggggccgaccctcctcgggaaccggccasccgcgtggctcccagcatccatcaggacaagcccacgtggggtcctccctgcgtgctcagagggtctgtccagccctgggaagcgaccttggcctcagttcacagcctggtgctcatctgctggcaccgggcatccacccatcagcccccgccctgtccctccgaaggacacccagcaggcaccccccggggaggcaggggcagaggtcagaaggggtgtctgggacctggatggccagcagggacaggggcattgtcatctcaaaggcccaacccccagaggccacaccagtcctcccagggagtcctcgagtcgccctgcccagagccctggcaccagagacgccaagagcctgtggggtgactcggagcagcaggtgtggccccgggcgggcggcaccgcgtccagggcagcctccctccgctgagtgacacgggacaccagtgcccggccgacgcgcctttgcaggagaaatgtgcaaacctctgtggataccatttcatttccattcttgtgttgtctccaaggcccytttggagatatacttggtgttggttgtgttttttggttccttttcagagaactgtaaaccgaggctgacgtgctccactgactgtgccgaggggcgggggcaggaggacggcaagacctatttataatatttagcgaactcggtctccctcagatcccccgcgagggaggctgctggacccaccccgctgtcccccatgatagaagtctgtaaataccttggtgaccaatgcccacttcccctcctgggtcacctctgatggctgctgtccactgagaacgtgggcagtgtccaaattcctgtactgtaaagactaaaaggcgtttgctctgagactgacaaggcggaaacttccatgtgtctcctgccaggctctgtccccctacgccatcccgacacgtccccgttcccccgaaacctggctcagtgcaatactcccattgccatggggtccttcaccatggtactgtctccacagccctcagtccccaccccaggagaggcgcctgccacctcctcctcatctccggtggttcaatcgctccgcctgtccccaacccagtcccatttttatggccaaactgattctgaaacaaaatgaaactgcaaacctcgtgtgtcttaactccccccagggatgccactccattcctccgccccgtggtctggtgcgtgacaatccaaagcgccgagacgagggtgctgtgtccctcaaacccagagtggtgggcgcctctgaaaccatacagccactcctggccccaaacactggtttgcatcccaggttcctcgcccacctacccccgccacaccccgtctttttagagatctctctaataaatcgggtaataagcatccgcctgtttgcctttctgtgggttccggaggtctggttgggagtctgaggagtgactttgttctgtgttttttgttttctgtttttgtttgtttgtttgttttctttttaagagatggagtctcgctctccacccaggctggagtgcagtggcgcaatctcagctcactgcaagctccgtctcctgggttcacaccattctcctgcctcagcctcctgagtagctgggactacaggcgcccgccaccacgcccagctaattttttatttttagtagaggcagggtttcaccatgttagccaggatggtctcgatctcctgacctcgtgatccgcccacctcggcctcccaaagtgctgggattacaggtgtgagccaccgcacccagcctgtgttttgttttttttttttttgagatggagtctcgttctgttgcccaggctggagcgcagtggagtgatctcagctcactgcaacctctgcctcccgggttcaagccattctcctgcctcagcctcccgagtagctgggaccacaggcgcccgccaccacacctggctaatttttttgtatttttagtagagacggggtttcaccacattggccaggctggtctcaaactcctgacctcaaaggacccacccgcctcatcccaaagtgctgagattacaggcgtaagccaccgtgcctggcctgaggactgactttgaatcttagagaagagagaaacctttgtgagattgatgctgataccagtaataggacccaaacaccttaccagctgtgaaccttcttcaggtcccagttcagctcagaaaacattttattgtttccaacatctttgcagccccccaaagtttgtatttgttctgctagagcggttccaattcagtcacgtttggaccccttgaagggaacacatttatcttggactcccaggttgagaaactacattgaaaacaagatcctggccaggcgtgatggctcacacctgtaatcccagctactcgggaggctgaggccagagaattgctccaacctgggaggcagagtttgcagtgagctgagatcatgcccctgcactccagcctgggcgacagagcaagaaaatgtctcaaaaaaaaaaaaaaaaaaaagtaagatcctgtctgtaagggagccgttggaacgtttcagcacagctgttttataaactgaacatggaggtgatctcgttgttttaagtttgttttttgtttttttgttttttttttttgagatggagtctcgctctgtcacccaggctggaatgcaatggtacgatctcagctcactgcaacctccgcctcccaggttcaagcaattcttcctcggcctcctgagtagctgggactacaggtgcctggcactacacccggctaaattttgtatttttagtagaggtggggtttcaccatgttgacaaggctggtctcgaactcctgaactcaggtgatccacccaccttggcctctcaaagtgctgggattacaggactgagccaccgcgcccggcccatgcaagtgatctcttaatgtgctgcaaggatgcatctgaattttgggaagcacagggtcaggccttcgctttgttttgggccatcccatcagcatgacaacccacatctcaggaccggcaaggtcatcatctagagcggcaggagatggtctcttcttcctctgtaaggttccatccttgccttaacaccaagcaaagcatacaaagccagcgtttacggggatgttatgaagttgtattccaagataaacgttttatttatttatttatttatttatttatttatttgagacggggacttgctctgtcgcccaggttggagtgcaatgatgcgatctcaactcacaggaacctctgcctcctgggttcaagcgattcttctgcctcagcctcccgagtagctggaattacaagcatgccaccatgcccagctaatttttgtatttttagtagagacggggtttcgccatgttggacaggctggtctcgaactcctgacctcaagatccacctgccacggcctcccaaagtgttgggattacaggcatgagccactgcaccccactcaagataaacattttaattttctttttttttttgagacggagtcttgctctatcgccgaggccatagcgcagtggcacgatctcggctcactgcgacctccgcctcccaggttcaagcaattctccctgcctcaacctcccaagtagctgggatcacaggtgcatgccaccacacccggctaatttttgtattatttagtagagatagggtttcaccatattggccaggctggtcttgaactcccgacctcaggtgatccgcccgcctcggcctctcaaagtgctggggttacaggcgtgagccaccgtgcccgggcaagataaatattttaaaagttagcttaaattactatcatcctccataaacaggccttcccagccccgagtggttagaactgcacggggtggtggtagcagccaccatgggctaggggagctcaggatgggacatcagcgtcttctaggtctctggcctccagccttgcccctgaagtccgtcctcccacgccaaacttgtttcaacagcaagtcccccaaaccctgctcacaaccctcccacgggtccccagcacccacaccacaaagctgggcagcctgggttgagaaggcaagtgttaagagtgactttccctctctgagcctcagtttccccgtctctaaaatgggttgatgggggaatacagggagttatcaaagtttttgtttttttttaaagcttaactcccaaaatacataggtgttcattggcaggtggtggagcataacgatgactctcataagaaggcttttcagtttctgtccccgcgcccgccctctgccctctggagctgcctggcacctaacaccttcccggttcctcgcctttcggggacctcgctccccggacacgcctctcctcggccacgcccctggccacgccaatgaagcgctacttccgacctagacccgcttcttattggtctcgcctcggcaggcccctccctgcacaaggttcctagtttgcccttgccccgcccacagtttctcaggccccctgaggcgtggggacccgcctagggctgcctccagcactgcctgaaaggagactccgccaccctggaggcaacaatcccactggagtcaatcacgcggtccacatttgcagacgtagtggaaagtctggggtgtcggagtccttgcgggctggggcgacgggatgggttgctctttcccggctcaggcgcaaacggggcagcctggagagcgccgtgggcgaggaaggcccccagcgcaggcttcggctattggtgttggtgccgcggccactggcccagccgatgggtcgggacacacgctcgcgctcgcggtccgcgggtcgccggggccgaaggcggcagagtcagagcgggagccgaagtcggagcaggagccatgggcgrcgaaaccgacggcgccgggaggacgagggacggcgcagacggaggcggcggagccgggagcgcaggtggggtcgctgcgggagcagcgctggggatccggctcctacctcaggagcgcccgaccgagggttggagatcccggggaaccgggaaacccccgacttactcggggagggcttcctagagaaggggacaattgaccaccggttggaattaacctggcagcggaaggaaggcgagaggcgttccaggcaggggaccgggcggttggagggacagcccggagccgggtgagcgaggcggcggggaggtaacgagagatcagatcatatcatatcgagccctgtgtgctcagcacattagatcttggctattagtcggagggaaatggagagtcttgagaggagtttgggtaggggagtgacgtggactgacttaactctgcatactttctggctttgaggtggagaagggatggagcggggtaggcaggagcggcatcagagtaggacggcacaattgtccagacagtagatgatggcagtctcgatgggagggaggctgtagtcaaccacagcgggcaaagtgcgtagatttcagagggattctggaagtagaggagacaacatttgctaatggaggtgggctgtgggagggaaaaagactcggtgtcagctggcaggactcacagctgattcctagtgcctgaatctcagcttccccatggtccttttcttctggagatggggcacttggtcggatttgccttgagccggctccagtacagagaaaccaaaatggggacagggactgattcccagaccggggccccagtgctggctcagccccttcgtggctgacactcaggccagtcttgccccgctctgggccaagttcactcatcggttgttggtttttttgtttgtttgtttttgagacggagtcttgctctgtcgcccaggctggggtgcagtggcacgatctcggctgttacctctgcctcctgggttcaagcgattcttcagcctcagcctccccggtagctggggttacaggtgcttgttgccacacccagctaatttttgaattttttcgtagagctgggatttctccatattggccaggcaggtcttgaactcctggcctcaagtgatctgcccgcctcggcctcccaaagtgctgggattacaggcgtgagccaccgcgcctgcccataagtcttgttaatgtcatctttgtgttttttcgcctaccattttctggtattggaattattcacaataatttgccactctagatatgtaattagaattaatgttcacgaaaattcagttgaacttgtggccaatatttaagggctctgcaatgattggtttcaacatagtttagatttttttgacatgagcttaatgggtagagcatttaacaaaatatttggcagttctctgtgtacaaagacccctaaacgtgactgagcgcagtggctcacatctgtaatcccaacactttgggaggctgagacaggaggcttgcctgagcccaggagttcaagaccagcctgggcaacatagcaagacccctctgtacaaaaaaatgtaaagagttacctgggcgtggtggtgtgtgcctgtagtccccgctactcaggaggctgaggcgagaggatggcttgagcccaggaggtcaaggctgcagtgagctctgatcatgcactccagcctgtgtgacagagggagactctgtctctaataaataaaaatatagaccttgtctctagtagactctgtgtctagtagaccttgtctctaataaataaaattaaaggcccctgaaccacccctgaggttgtgcatcttccattccctgcgctctactctgttaactcctgtccatcctgtgggactagttcaaataccacttccatctaggaagccctcccttgacagcctaaatgtgttcgggtcccctggttcgtacccttataattcctgcgccaccagccccagccacctccctgcccgcgcctcctccctctcccccacactctgtctcagccatacagcctccttgttgttcttagaatgtggcaggtcagtgcctgcctctaggccctcgctcttgctctgcctcgagcactctccctccgaatccacccatcgctgcctccccactccctccagaccttggctcagtgtcagctcctgagagagcccctctctgacctcggccctgcagccccagcccctgtgctcggcattgctactctttgtggcttctgcctctgcctagtgttgcgtggtgtgtttatttgttgatgtcttccttgttggggcccaccagagggtgagcccaggaaggcagaagccatcggtatttgggtcactgctgtgtccccagaacctagaacagtgcctgctcccccacgggcacccagtaagcatctgtggagcagatgacagctgcaggcactgagcaggcatcc

SEQ ID NO: 95156 - DNA, 19565 bp, Homo sapiens
gacgctacattgttctctgcttttttctctaaatccagaatgttcttttaagacctcttttgaaagtattttcttctcctgggttgccattccccatctcattgcctagccatgtgtgtcttgtcttgagatgcaagaaggggccaggcgcggtggctcacgcctgtaatcccagcactttgggaggccgaggtgggcagatcacttgaggtcaggagttcaagaccagcctggccaacatggcaaaaacccttcttctaaaaatacaaaaattagctaggcatgctggtgggcacctgtaatcccagctacttgagaggctgaggcaaggagaattgcttgaacctgggagccggaggctgcagtgcgccaagatcttgccactgcactccagcctgggcaacagagtgagactctgtctcaaaaataaataagataaaataaaataaaataaaataaaaaccatagcatgagtttcagaataggtttttctttttctataaaaaaaatcctttgggattctgatagggattgcattgaatctttagtactgtcacgatgaacatttcttaaccctggcagtgcattcaattacctggggaaaaaaagatacaaaccccagtctgatccctaattcccaccaccattttgatgtaatggctgtagggttggacccaagcctcacgaatggtgcatccatggttttgctctcttctctgcaatgacaatttagctctccttggctgaacagtacatgtggtcctccgggatggaccaggtcctgctgacctcttcaaccacatctctcgctatttcccacaggcatggatgctctaccccaggtaactgaaggacttcaagttccctttctccacgttggtagatagttgccactccactgtctggcacacccttttccttcttttctttttattttcttttccttttcttttccctccctccctctctctttctctctttgattttttcttttctctttctctttcttctctctctctttcttgtttttgagacggagtctcaatctatcacccaggctggagtgcagtggtgacatctcagctcactggaacctccacctcccggattcaagtggttctcctgcctcagcctccctagtagctgggattacaggcgtatgccaccatgcccagctaatttttgtatttttagtagagatggggtttcgccatgttggccaggctggtttcaaactcctgacctcaagtgatccacccgccttggcctcccaaagtgctgggactacaggcgcgagccaccatacctggctccttttcccactttcttaacagccaactcctccttcaagacttagccgacatggcaacacctccaggaagactttgagacaagaaatagctttagcctggtcttctcgtctatgagcctctggccatctctctccgtctttcttctgttctcattcttacctgccttcaaagggcttccgctccacttggcctcccggctgttctaacaggcctgtcgcactgctgctctcccgtctctacctcagaattatcttcccagggtcggcctggctcagtgcttccactcctctaggtctttgctcatctgtcatctcaggaggccttttatcacccatcctagcacccccttccactcttacctgctttttcgtgttgcttttgtttttttctgagatacagtctcactctatcacccaggctggggtgcagtggcatgatctggactcactgcaacttctgcctcccaggttcaagtgattctcctacctcagcctcccgagtagctggaattacaggtgtgcgccaccatgcccaactaatttttgtatttttagtagagacgaggtttcaccatgttggcgaggctggtcttgaactcctgacctcaagtgatctgcccaccttggcctcccaaagtgctgggattacaggcatgagccaccgcgcctggccttccctgctttttttctgtagcactttgaatcatctgacaacttaaatcgtttactttgtttaccgtttctcctcctttagaactctggctcaccactttatccccaacacttaaaattcaatgaatattgtacctgtaggaaaaggcgggggggggggaagaaagggaggagggggataaaaaggaaggattaaatgtctttcaaatttccccgttttcataaaacagcactgctgagacccctgacaaccttggacatctccacatagccacagagccaaggcctgactgcggtctaccctgagtcctcgccgaatgcctgtgatttccctgggagcaaggcaaggcttcccttttttttttttttttttttttgattgagtgcaggaaactttattgatggtacacgacaaggtgaggctcccatggtgtctccctcttcagggcgtctgcgtggaaactgtgaggaggggagattctcagtgggggcgggggctgagtggggcagggactccgcagcagtgagagcctctctcgtcctctcgtgctctcactggggctggtggtccgggggtcttactccttggaggccatgtgggctccgccaccctgttgctgtagccaaactcactgtcatatcaggaaatgtgcttgacaaagtggtcgtcgagggcaatgccagctccagcatcgaaggtgaaagagtgggtgtcactgttgaagttggaggagatgacctggtgctcggtgtagcccgggatgcccttgaagagccctctgaagcctgcttcaccaccttcctgatgtcatcctatttggcaggtttttccagatggcagttcaggcccacaactgacacgttggcagtggggacacaaaaggccatgccagggaggttcccattcagctcagggatgaccttgcccacagggcttccctatcttgtgggagagtctcacaaggctgtttctcatccatgtccctagtttagttgagactagggctttccatcttccccttctttctccgcaccccctacaacctgctccactttaggatggagccgcaggcttctgtgtaaatctgtagaactgcttgctgaagtttagtttgttcctcgacagagtgacccaccactcataagacctgtcatctgacctctgagattgggaatgctgtcccatgggattagagatgcagggagctgacatcatgttggtcttgattttgctgttttgtgagacctgcgaattgctcaactgcttgaaactcctcaccttcacttgtctctatggacacagatattctttggagtactataccgttccaattagtaaagctttcagtattcattttgcatctcatcattaaagtttattcttagtaactgatttaaaataatgaattgtttacataacaactactgttacataacacacacacacacacacacacacacacacacacaaacacacacacacagctaaggtcagaataccatggaggaaaagaagaatctggtggtcaattcccttacattcttctattgacaaattttcttgttgggaccttcacttatttcatcaaaggattgtggctaatgatctaatttattactcagaatctttttatttatttgttttggagacagggtctcactctgttgcccaggctagagtgcagtggtgtgatcatagctcactgtagcctccaccttctatgctcaagcaatcctcctgcctcagcctcaggagtggctgggactacaggcacacaccaccatgcccagctaattttttttttttttttttctgtagagacggggtttcgtcatgttgcctaggctggtcttgaactcccgggctcaagcaatcctcctgcctcagcctcccaaagtgctgggattacaggtgtgagccaccacagccggccatcactcagaatcttaagtcattgtcaaataatggaaagcatacaaatcaaacagtagtccaattctagaattaatataaaaagaaagctctaatatacaaagaccaaacagattttacaggataaaacaactgtcattaaaaagtaaaactggcaggtgtggtggtgcacatctgtaatcccagcactctgggaggccaaggtaggagcattacttgagcccaggagtttgagaccagcctgagcaacatggcaagaccccgtctctacaaaaagtacaaaaattagccaggcatggtggcatgctcctgtagtcccagctactcaggaggctgaggtgggaggatcacttgagcttgggaggaggttgcagtgagctgagatggtgccactgcactttagcctgggcaacagagcaagaccctgtctccaaaaaaaaaaaaccgtttcttcagaataggatatcaaatatgtaaagtaataatttgagaaacatgaaaaagcgttatgtgtaaagaaaatcagaagacttaatctgtattagtttaatgtaaaagcatgcacatatgtgaaacaaagtagaagggaacactaaagaaaaaaatgggtgtgattgggtcatgggagaatgttttttactttttggttgtaatgtttgtgtgatacaagagggacagaaattactttcgaaatgtacttgttaattttagcaaaatcctcgtggaaattatactgctagttttaaaataaaacacaagcactaaaataataaaggttatgtttcatttttattaacttagttttgccacggttgagactggatttgccatagttcaatttatcaagcacttaactatgtgttccgcacataataatcatcttagcatagaggaacatgtcttctaatccgcacaagagatactatttttatcacgtcatagaggaggttaataaacttgcctaggtcataagatcttcagttgatgaagttaggatttcaacccagagccaagtaatgtaatggctgatgttttccacagagaaaatgtaagccgagatgatgctcaaactataaatctggaaccttagggggacaaaaacgtatggatgtctccttcccattactttagcattttaattagattcctgtgtctctatttgtctttggaaatgcaagctgcttgcagttcatcatagctaactcacacaattcattttatgaaacacaaacctgttctcacaaactcactgtcatctctttttaatctttctaattgtgataaaaatcatactgcactttaccctgtgtaacctccaatgatctttgaccaaaagccaaatcttttttttgttgtgtttacttatggacagttaggttctacataggtacttaaacatgaaaattgaaatcatagaggctgggcacagtagctcatgcctgtaatcccagcactttggaaggccgaggtgggcggatcacctgaggtcaggagttcgagaccagcctgactaacatggtgaaacaccgtctgtactaaaaatacaaaaattagctgggctggtggcccgtgcctgtaaccccagctactccggaggctgaggcaggagaatcacctgaacctgtgaggcgctggctggagtgagccaggttcgcgccattgcactccagcctgggcaacaagggcaaaactctgtctcaacaacaataataataataaataaaagaaagaaatcacagaaactataccagaaaataggatacaaaaccaacagtgaggagattgagaaaaggaggcagatacgtaaagaggaaaaggaagggggcccaagtaaggccggaaaaagcggggagaaggaggaggctcattaggtcagaagcaacctgccgtcttctaagttctggccaagggtagatcaacagatccagattcctgagctttaaaatgttattcggccgcttcatcacttgtccccgactttgcagcgactccgatggtagcctgagtctccattgcttggagcagccacagtggacactggacgggatattctgtgcagctgttgctgaactcaaggcaactcttactgcctttctcttttcgggctcaagattccctgcattattgcccataggcatgtgttttaccccatactccttctcccttttatcttgattttcgcggtgctggggagtctgcagggattccatggcgacgggctcactgggacaggggctggggttgtgcgtccctgaggcaaggcaaatacagaaaagcgaatagagacagagggctaagattccaaagcactgaaaggtagaaactgggttagaagagagaggggagcacaaacgcccggagagagcgagccctcgggataccattggctataggctggcctccgaacaactggacggtccaagtcctgagcgtctggttacccgggcaaccgcatggtctcgcgatacatacctcgcgcctgcgcactgcccctgtagcgggggtggggggacccggtccggagactccaccccggggcctaaactcgagtctaaaagattgggcctcgttgtgtcgtttccgggtcgcgcgacgctgtgggccgctttcccctctccggagtgacctaacacaggataacgaaacctgcactgctccgagcgcttcctccccggcccstcgcgtctgcgaggcgaggccgggaggcgagggctctgcgcacgcgcggcgcaggcgcactgggcgccggtgctgttgccttcaggtgaccacggattcgccatcgtgagttccaggtgggcgcgcggggcccacgtagggcaggaggccagccccggggggatcgggcccgggactctgcggaatctggaggccgaagcccgcgcgcacgcagggtctctgctgcttccccaacgcctgttgcgtggccgcaggacccgccgccctcccggttgggccgcccagtcccgggccgggcgcgtgcacccagagcttccgcgtttctagtccggctcctctgytggattgcagcgccggctgggcaccaggagtacaaagcgaaaacccccgccggcccttctgttctccacggtctccaaggagacacggacaacagaacaacacttccgtgtgctaaatagtaaagcaccaaggtactcgatccaggggcggcgtgcagtggggaggtgagctttgggtcggccgtcgcccctcggctaccggcgggatccagaaaccgggagtcaccaccaataccgttctcaactttacttccagctggtcactactgtgtcgggagattctaccttcttttccgactaacatgtatttttctccagtcctttctgcggcgtctctagtgcaggccaccgtcatttctaacctggacgactccaggagcgtctttgctgctcggggactcttcctttgcccagatccacaaagatctataacgtctttctaatcacgacacctctgctttagatgttaaagttgcttcacactggaacgcttgcaaaggtcttcattatctggtccttacccacctttcctagtttctcaccgctttctctagcatctctgccccagccacattgaacttatttgaacgtgtttttttttttttttttttttttgagacatagcagtcgcccaggctggagtgcagtggcgcgattccggctcactgcaacctccgcctgccgggttcaagcgattctcctgcctcagcctcccgagtagctgggactacaggcgcctgccaccacgcccggctaattttcgtatttttagtagagacgggtcaccacgttggtcaggctagtctcgatctactgacctcaagtgatccgcccgcctgggcttcccaaagtgctgggattacaggcgtgagccacctcgccagccaacttatttcttttaatactgagatacctttctttactccatacttcctttggtaggcattgtttagatgtaggttaagaggtccggcccggcgcggtggctcacgcctgtagtcccagcactttgggaggccgaggcgggcggatcacaaagtcaggagatcgagaccatcctggccaacatggtgaaaccccgtctctactaaaaatacaagaattagccgggcgtgatggcccgtgcctgtagtcccagctactcgggagtctgaggcaggagaatcgcttgaaccctggaggcggaggatgcagtgagccgagattgtgccactgcacttcagcctggcgacagaatgagactccgtctcaaaaaaaaaaaaaaaaaaaaaagttcctctgtgaggactgccttttcccacccccctcaactaagctaggcctctgctggatgttccctaagcatactgttccctgaccttcatgtgcatcaggctttattgtataattacttgctaatattttttcctcgtggactctaagctcatgaggtctgtgagaaaaaatacttaatctttatggcctggcacatcgtggataatcgataaatatttgttgaagaaaggaaggggcctgcggctgagggtgggagtggtattccaggcagagggactaatgtgtataaagacttgcaggtgggaaaatgctggcctcattaaatagtatgttgttcggtgttgaggacttgtgcttggtggggcctaaggagaaagagggcctaagtgggagattgagctggagtgtggagggccttttatgtcacattagagtttaggcggggcatggtagctcatgccctcaatcccagtacttttggggaggccgaggctacgggattgcctgagcctaggagttgaagaccagcccaggcaacaaagcaagaccttgtctctatagaatttcttttttttttttttttaagacggagtcttactccattgcccaggctggagcacagtggtgcaattacggctcattgcagcctccgccttctgggttcaagcaattcccctacctcagccacccacctaagtagctgggattacaggtgtgcaccagcactcctggctaatttttgtatttttagtagagactgggtttcaccatatttgccaggctggtctcgaactcctgacctcaagtgatctgtccagcttgtcctcccaaagtgctgggattacaggtgtgagccaccgtgcccagcctatacagaaaatttaaaaattaaaaaaattttctgggcttggtggtatgcgcctataatcccagctattcagcatgaggctgaggtgggaggattgcttgaacccagaagttcaaggctgcagtgagccatgatcgaacgactgcactactgccaggtgacagggcaagactgtctagtaaaaagagtttgcccttgatctacaggcagcagaggcctcttgagacagctctaaagggccctcagcaaagcctatttttctctctttctctaaagctataaaatcttatcagtcagtactttgtttctggattatattgcgtgagattatgcttatccagactacttggctctctttatcgccccagcagattctgcaggtgggacaagtttatagcctgttttgtgatccctctggagcatgattttaagtatttattctgtggtgtttggatgtggagacatcatctgacttgcagttggcaagagctctgccccatcctatttgtttcaccccctgtcacttatttccctcttcctgaccactttgaacctgatgccagcccctcacagtcactgcattgcatctggatgagccacttttcttcctgatttcctgagctctaggggagcatagagataatggggtcaggggacacagtgtggccaccgtgaaggaagcagcttaggccccagaagtctccaggattgctgtaccgagatgaccagggtgtgatctctcaccctaaggagctgaatttggcttttctgtgggaaagtgtctgggaagaatatcagagaccaatagcgctcagggggccctttctcggggctgtccagtgtggaaacaccctgtcctacaccagtggttcctgattccggctctgaatcagattcacgagggcaactttttttttttttttgatatggagtcttgctgtcgcccaggctagaatgcagtggcgcgatcttgactcactacaacctccgtctcctggattcaagagattctcctgcctcagcctccaagtagctgggattacaggcaggcaccaccatgcctggctaatttttttgtattttttagtagagacgggatttcgccatattggccaggctggtctcgaactcctgaccttatgatccgcccgccttgggctcccaatgtgctttggttactggcgtgagccactgcacccggcctggggcagctttttataagcacagatgcccaggccttattattgaagattccaattcagtagatctgggttgaggaccaagcatctgcatgttttaagaagccacaggttatttttgaggtgtagcaaggattgaaagaacagaaaacttggatttggaaaactagttgtgactttaggcagtgagtcagtttcctaatgcacacattgggggattctataggaatgctgtaagaagcaaataatacatggagagagtgctttatacagcgatacactgcacagacacacttgccttcaacatcagctgccagcctagtaagtggtagtataaatgcaaaggatataacttcctttagttttgccaggtgggtccctgtgattctagctgagccccaggaaggaagggaagaaaactgagggaagagaagggagtgtgtagttgcctctgggaaggataaaaggatatgccctctggaccaatagtttataacattttccccattaagcatccttctactcatttttcctcaatggattagtatctttaaatttcattacatttccctagtcttcatggaattgccagccagagaagtcagctcggggtccccctaaaaaggaggactggccgggagtggtggctcgttcctgtaatcccagcactctgggaagctgaggtgggtgaatcacctgaggtcaggagttcgagacccgcctggccaacatggtgaaccccatctctactaaaaatacaaaaattagccaggcgtggtgttgggcacctataatcccagctactccggaggctgtggcaggagaatcgcttgaatctgggaggcagaggttgcaataagctgagatcatgccattgcactccagcctaggcaacaagagcaaaactccgtctcaaaaaacaaaaaaaagggagtgtatgcctgcatatgtatcaaatgctgtaggaaggatattcaagaaatttagggccctgggaggtggggagacttacaaaagtggacgtgacagtgttatttgaagttttaatcatgagatgactgttcagttctttaaaatatcacacctgattggttgtgaatggcagaggccaccagagtatttgcagattgggagctctacgtgggtggacatcgggtcttgcttactgtgagccccaggacctagaacaccacttgcatactggaggtgctcagatcatttttttttttttttttttgcagacagggtcagatgtgttactgggctggagtgtggtggcacaatcacgctcactgcatccttgacctcctgggctcaagtgatcttcccacctcagcctcccaagtagctgggactacaggtacgcctcacacttagctaatttatgtattttttgtagagggtttctccatttgctcagagtggtctcgaactcatgggctgaagtgatctgtccaccacagcctcccgaaattctgagactgaaggcatgagccagtgtgccaggcctagaatatttgttgagtgaatgcatggaagcccaactagatagcattttggaaaacagtaacaagttagaagattaataccatacagtcactagaaggttaattatgaacaagtagaaacagaatatttttaataaatgaaatagacaaatggaattgtactatgattgcaataattaaaactttcacatattgcttgtataggaataaagacaaagtcatataaaaaaatggggaaaattaaacactactcacccatagtcctgagtattttaaagagccttcgtagagcattcaaaatcgggtaagaaaaatggggaaaaataaaattacttaatctttaaaaggaagacaagcgtatgctcacctaattggacttatataatcaggcttgctctagcttatccagaatcagagtacaggccgggcgcagtggctcatgcctgtaatcccagcactttgggaggccgaggtgggtggatcacctgaggtcaggagtttgagaccagcctgggcaacatggtgaaaccctgtctctactaaaaaaaaatagaaacattagctgggcttggtggcgggcgcctgtaatcccagctactcgggaggctgaggcaggagaatcgcttgaacccaggaggtggaggttgcagtgagctgagattgtgccactgcactccagcctgggcaacaagagtgaaattctgtctcaaaaaataaatacataaataaataagaatcagagagtacagtcaagatattcttaagtcatgcagttgtcgctaacatgaattttttctgttgtcattttgcttcttggaaggattttcaaaatggctgcagctcctcaagcaccggggcggggatctctccgtaagacragacctctggttgtgaagacgtcgttgaacaacccatacatcatccgctggagcgctctggagagcgaggatatgcacttcatcctacagacgcttgaggacaggcttaaagctattggacttcagaagattgaagataaraagaaaaagaacaaaacaccttttctgaaaaaagaaagcagagagaaatgcagcattgctgttgatrttagtgakaatctgaaggagaagaaaacagatgctaagcagcaagtgtcagggtggacgcctgcacacgtcaggaagcagcttgycattggcgttaacgaagttaccagagccctggaaaggagggaactgctgttagttctggtgtgtaaatcagtcaagcctgccatgatcacctcacacttgattcagttaagcctaagcagaagtgtccctgcctgtcaggtcccccggctcagtgagagaatcgcccccgtcattggcttaaaatgtgttctagccttggsgttcaaaaagaacaccactgactttgtggacgaagtaagagccatcatccccagagtccccmgtttaagtgtaccatggcttcaagacagaaytgaagattctggggaaaatttagagactgaacctctggaaagccaagacagagagcttttggacacttcatttgaagatctgtcaaaacctaagagaaagcttgctgacggtsggcaggcttctgtaacaytacaaccccttaaaataaagaaactgattccaaaccctaataagataaggaaaccacccaaaagtaaaaaagctactccaaagtaatcttgcataaacttgtcatgtcatacagtttgtgaaaggacaccttgtaaagaagccttgaaactaataaaatgagttatacttacatagattcatagggtcctgtttggtaatattcaaatgtgtaagactctttgtaactatggcacagatatactaagtgcaggaaatattcaaaattaggaatagccaaacagacatttattgaaactagtgttcatgcgtgtgtaaattgactttttctttttcttttttttttttttgagacagtttcactcttgttgtccaggctggagtgcaatggtgcggtctcagctcactgcaacctcctcctcacgggttcaagcaattctcctgcctcagcttcccaagtatctgggactacaggtgcgcaccaccatgcctagctaagttttgtatttttagtagacacggggttttaccatgttggccaggatggtttccgtctcttgacctcgtgatttgcccacgtcagcctcccaaagtgctaggattacagctgcgagccaccgtgcctggcctttttttttttttttttgagacagagtttcgttctgtcgccaaggcaggagtgcagcggcgcaatctcggctcactgcaccctccaccacccagattcaacgattctcctgtctcagccgcctgagtagctgggattgcaggtgcccaccaccacacccagctcatttttttgtatttttagtagagatggggtttcaccatgttggtcaggctggtctcgaactgacctcgtgatccacctgccttgtcctcccaaagtgctgagatgacagacgtgagcagccgcgtccagcctaaattgactttttcaaaggctggtagagtgcctgtgagcaagaatatctgtgtcatacaacgcttagcattttcctatcaaacctggaaaatgtaccacagtaaatgttctagtcagtcaggtagatggaactgaattggggaagcattatcagttttaaaggaaagatcccaaatgccaagcaatccattgtcttcagaagcaacacatcatttttcacttcatgtcaatttgacttttaggaaggaatagacatgagcttgggagaaagacttaatatttagagaaaaaatatcaaaaatatagaaaaagtcagataaggttattttgactgggtacagttcacccccattacgtgattcacttacctccttggaaatctaacgtataaaaggtatgatggtaattggatgaaatgtggccaaaagattaaaaaaactgaggagcttgggttctcagaggtgggtgtgtgacaagagtccttcaggttaggagatggagcataaccgatgctctgttagagtgtctgctgtttacagtgtgtatggaaaagttactttctgtaatttagaaggaaggtatttactaaagatttttccagctgaaagtctggctgactcatggattatgccatctctcgatttaaattttacttagtgccatcttggccaaaaagaagaaaaaaagataccttattgaatagaacattttcattatagacaaagtacagtacaatgcagttttaaatctacaagaaactatccattgcatttcaatttagttttaatagctacttcataagcaagcagtttaattctcgaaaatgttaattagtaatctgcttcaattatggaggcaaatgtagttattattctatttaaaagtggttaataatttgataacaaattatgtaaatgactctttaaaggagcagtgtaactgtcaccgtgaggtaagctcatgacaaagtttccaactggcaatgctgcagttatttattttactttcgagatagagtctcactctgttgcccaggctggagtgcagtggtgtgatcccggctcactgcaaccccgcctcctgggttcaagcgattctcctgcctcagcctcctgaatagctgggattacaggtgcacacccccatgtccggctagtttttgtaattttagtagagatagggcttcaccatgttggccaggctggtctcaagactcctgacctcaagtgatctgctcaccttggcctcccaaagtgcagggattacaggtgtgagccaccgtgcctggctgattctgcaattatttgaaaacctactttgtatagactttgtggcatgaaaatgagtgggaagtaaagtcctaaattagagccttgactccaggttaagtcaaaatctcatttacttaatgctggtatctcaaaccctgttccagtgaatgaggactgttttgtttcttgaagcctttctcctgttaagaaagaacgctaatgcaattagggtggaaccatctgaaattccaagtcttccattatctccaagagaggtcctatattatgtactactgtggggcccagtcgccctctggtggtagtctcagggatgtcacagctgtgggttggtctttagaatcacggcaacctatagaaaggagagttccaactccttcgtagtgaccaaggtcaacaaactttctgtaaaagaccagagagtgaatatcttaggctttgcaggccacacaatctgtcacaacaactcaactcagctttgtagtgtgaagcagccataggcaatatgtaaatgaaagtggctgtggccaagagtggtggctcatgtctataatcccagtactttgggaggccaaggcagaaggatcacttgaggccaggagttaaagaccagcacgggaaacatagcaagaccttgtctctacaaaaaatgaaaaacttagccaggcgtggtggtatgcacgcccagctagttctttttcttcaaaaagacgctgaagcaggaggatcattttaacccaggagtttggggctgcagtgagctgttgactgtgccactgtattctagcctggacaatagagtgagaccctgtcctaaaaaaaaaaaaaaaaaagtatggctatgttccaataaaaccttattgagggacaccggaatttgaattttgtgtaatttgcacatgtcacaaaatgatgtcattttttggctttttctcctcaaccattccagaaaataaaaacattcttagcctgtgggctacacaaaaataagcaatgggctggatttagcccacaggccatagtttggtggcccctgcctgggataagatatgattggtttcactggactcataacttgaaggaaatgccatcatgtctaaaacaattaacttctgcactgaacttcctaggcactggcccagtaaaagcagggaaaagtatctacttttgttttttgagacggagtcttgcactgtcacccaggctggagtgcagtggcacgatcttggctcactgcaacttccgcctcctgggttcaagtgattctcctgcctcagcctcctagcagctgggattacaggcacccgccaccacacccagctagttctttttgaatttttagtagagatggggtttcaccatgttggccaggctggtctcgaacccctgacctcaaatgtttcgcccgccttggcctcccaaagtgctgggattacaggcgtgagccaccacacccagccaaggcatctactttgtggtatctgagttgaggccaggctacgtggcctcggttagcatcttatttttcccgcagattattggcaatataaacacacatctgtaagccatgaaagtttttcaaattctagattaaaaacaccatcagtaacaaaattatgaatacttatttacaaataagacattttccattagcatgacacatgacagttttcatgataaaatcagcatagaggagtatgtgcaattttgcataagtaataaaaacattcaaactatcaatgccctgatagcacgaataagttccaccaggcatctcttttgactttacagttttttatttccttttcttcatatatccttgatgttgctgagaagaaactgaactttgcacaacagcagaaaagtctagttagtcgcgggtacaggctctttctttttttttttttttgagacggagtctcacgctctgtcacccaggctggagtgcagtggctcgatctcggctcactgcaacctcacctctcaggttcaagcgattctcctgcctcagcctcccaagcagctgggactacaggcacacgccaccacgcccggctaatttttgtatttttagtagagatggggtttcactatgttggccagaatggtctcgatctcctgacctcatgatctgcccaccttggcctcccaaagtgctgggattacaggcgtgagccaccacgcccggcctcaggctctttcagagagcacagtgagtgcttgcacaaaactctgcttttgaagcaatccactgacctggtaaagatcaaagtacaaacttgcatgtttattgattcggcaactctgcttatggagaaatacatgtactagtcaccagtacattttaatattgctctgcacttaaacaaccaccacctgtcactgagctacagaagtgttgattccataaatgttcccagtgataccatgtaaggtgataccagtaaaaaaaatttccaaatggatcttttgttctgttacatggacaaatgtaccatcacttaagaaacagaaatgcagcaatttctctccacacaatagcaaagattttcttacatgactctgtaacttctacttagtccatagaaaaacagtcccttttctaagggtgaaaaaatacctcttcaagagacaggcaaaaatttgaaaattacaagaatgtgctctttgtagcctttcatccctcccacaaataggtcaacagtaaaaaaaggatgaagtttaacattctagctagaaacgtacaaatgtcacatgtggacttttgtcatcttttctgattatcgactacttcaatttcacttgagttgtgcttttattcttctttggaatggcagttccagaaatcattaaatattaacaaatgatgatgtcagagttctagaaataaaaatatccatctattgtagtactagtccaacctgaagggagggaagaaatggaatagtaagaaaaattagattgcaatgtagtacaatagatctgtctttctaaaagctgtcttaaggctcagctcacacctgtaatcccggcactttgggaggccaaggcaggcggatcacctgaggtcaggagtttgagaccagcctggccaacatggtcaaaccccatctctactaaaaatgaaaaaattagccaggcatggtggtggatgtaatcccagctactcgggaggctgaggcaggagaatcacttgaacctgggaggcggaggttgcagtgagctgagatcatgccattgcactccagcctgggggacagagcgagacttcatctcaaaaaaataaataaataaataaataaaatgaacaaaaataaaataaagctgtcttaagtctaagtgaagcaagtatgaaattgtctaggtacatttgttgagtttacaagggctatatccatttcacttaccttttcagaatctgtacctggacacctccaattgtacaggtaatactgcaaattgccatctcctataccaaacttgagtttttccaagaatgtcttattttccatcaaatccagtgcattgaatacatcaaatcctttctgccaatttaaaaaagatttaaaatttaaaacaaaggactagtgttttctgtattacatatctcagtttaacaattctactaatagctcgaatatgcatttctaataggatttaacgtccgtgatatatagcataggttaagaattcagggccggatgctgtggctcatgcctataatcccagcactttggtaggctgaggtgggtggatcacttgaggtcaggagttcgagaccagcctgaccaacatggcgaaaccccatctctactaaaaataacaaaaataagccagatgtggtggcgcacacctgcagtcccagctactcaggaggctgaggcaggagaactgcttgagcctgggaggtagaggtggcagtgagccgagattgtgccacggcactccagcctgagcgacagagtgaga

SEQ ID NO: 95157 - DNA, 55299 bp, Homo sapiens
  misc_feature (1)...(55299): n = A,T,C or G
acaaaactaaaggtttgtttgcttaagtcaagcttgagtctggggagttatgtaagtaacatagatatctggttaatctggtaggatagcctttccaagggagtttacattggtactttgaaagaaacattttaagtcgcagaaaggtaacaaaaattaagttaactgtagcatcagcaccagaaagttactgtttcattgaatgtaagataatgtctggctcggtggctcacgcctgtagtctcagcacttcaggaggccaagacggcaggatcccttgagcccagcaatttgagaccagcctgggcaacatagtgagatcttgtctctaccaaaaaaaaaaaaaaaagaaagaaattcgggacgtttgccaggtatggtagtacacacctgtagtcccagctactcaggaggctgaggtgggggcatcgcttgagccagggaggttgaggctgcaatgagctatgattgcaccactgcactccagcctgggcaatagagtgagaccttgtctcagaaaaaagaaaaaataataataattatatatgtatatatataatctttgaaattaggtgtgtcttttatatataatctcctataatgtcttttatatgtatatataaaatctacatctaatttcagagatactaagatgtggggaaatgtacttagaatcaatgaaatacggtgttggtgaatgcaaaacttgtcagtcatatttattgatttcttctgtgtacagataatgggcatttggtatttattcatttatattttttttttggtcttaatgggacatggtgtctgcttatttgaattatttccggtctgatttctatattccattgtagaattttcatttacttaatatttatatctgtgccattgaagagaaccttcaggaaagcatcctctggggaaggccatcaaacaagcaaacagtctagtaatattttgcagtttgacttatgagagcttcataggaagcctctgcctttaggaagtcagttgtatgccttaagattcacagactcgccgggcgcagtggttcacgcctgtaatcccagcactttgggaggccgaggcgggcggatcacgaggtcaggagatcgagaccatcctggctaacagggtgaaaccccgtctctactaaaaaaaatacaaaaaatcagctgggtgtggtcgcgggcacctgtagtcccagctactggggaggctgaggcaggagaatggcatgaacccaggaggcggagcttgcagtgagcggagatcacgccactgcacctccagcctgggcagcagagcgagactccatatcaaaaaaaaaaaaaaaagattcacagactcatcatgcttagtacagccacatcttaacgctcaggaggctggcctggtcatcgttacatcgtgaagttaagtttacaagatatgtggtggtattgaatcatacctggtgattttccacgttccctgattttaagcagtctgctgttctgatgggaagttccaggttgggtttgtgtctgctgttttcaactctgagggcccctttctgagcttcagctcgcttatctagaagttaaatcagaagctttttgttaagatcaaacaatgtgcagtgctgttgcaacttgaaaagtgcttttcaagtattagatacaactgttaattctcttgtattttaaagtattggggcttggttttagctatatttaaacacaaaaatagcagtttcttgtttttccttacctgcttcatgtccatctacccagatcccttccactgggcctggcctcttaatgtttacgttattattcagtgattattcccatcccttgatctttgctcctgtttctttctttgcctagagtatttattttgcttcctgtccattccctaagccctgctgatccttctaaatccacctccaatcccacttggcgagtccctgctccagctcccctcagcgttcagtgtcgtcttagactccagatttccctttcacactgtgttccatgttgtttagcaattggctgtgtcctgcttgtggttcccttattttatcacatgtattattaggctcgtctctcccactggatgtcagtcagcatatggaatgtcatgatattaccaggtgatggagaggaattgtgcacgtggaatttggtacacatccctttttcaccctcttcaggctttgtgttaacttgggaagttacttactcttttctcatctgttaaacgggtactattacttgtgaccattacagggttgctgtgaagattccagaaaatgtatggaaagctctgacaaacaaacacgttaactggtaactgttcagaggctgttgtcttaagagaccctcttgcataggaaaatagctgactctgtcacttcagggagccagtttaagaaaaatgaagggtaatgcaggggccagctttcagcttggcacatctgaaaagttcacgacagcataccaaagggctgctagtgctggctgttggaaatagaaatgcagttcttgccttcaggaaacgctgtttggacacagacaagcaggtgggtccttgcaccatggctggaccagagcacactgaggcaatgtgaagaagtacccagtacacagacttgggtagggagtggaggggaggacatcagggtataagaagagggaggaagggaaggggaggagaatgttccaggtggagagtgcttggtgtggaggttggacagagcatggtatgttctgagaggtcagtgcttggcatggtcctctggcagaaaagggagtggctgtgatgagcaggaggctggctggggccacaggatgatgaataaaggacttgaatcgtgtgctcaggactctgagtgattgtgagcttttcagatcctaagcggaggagcgacatcagctttgtttttaacaaggtcactctgccctttggagagtggatggtggtgggtaagaatggagataggaagttactgcaataataaagattgggaaaatgggcttactctagtttcggggtggccaagcttttttgtaaagggccaaatggtaagtatcttagactttcaggccatcctgtccctgttgcaacgactgaattcaactctgcctttagcaggaagacagccatagaccctgcagagatggatgggcgtggctctgtgccctgcttccacaggagcatgcctacagaaaacaggcagctggccagatgtcgcccaggttgtggtttgctaaaccctgacctagagttggtttgcaaagtcttttggtgctggaataattttatactcttaatagttatattgaggatccagagagcctttgtttgtgctggttatcgctgttgatgttttctatatttgaaattaaaacagaacaacttacaatatttattttactttaaaagaatctactacatgttaacataacctttttaatgagaaacaacttttcaaaaacaaaaagattaagcaagaagaacagtgttgttttacacttttgcacatccttttaaaatatgaggtttaagaggtgacggctggattctcagacctgcttctgcattccgtgtgttccagttgctttattgaaacgtgtaaggaaaatgtggcgtcacacttccatgtgggcagaagaggggtcatcctggaggctcttagcgatgcaccataactcgccaggtggcagcgtgtttgagtgtgccggcctttcggagtcagtgacgtttctgtactctcttccgtcagaaccctgaggtctgtcttgtgctcagagtgggtcttttgctcatggacatgatttggtaacatcacacgggggttgtttggaaatattgttacatggagttgtttttttttctaaatgttaacacattccattatgtaaacttgaagaaaatcctattttttaatgtcatcactgatctcatcagaagaaaaagtgagaaactgtcaaattagcagtagtagagaaaagttttccaaaattctaattttctcttgaaagcttggattttatcattggtaacaaatactgtcagttactttctgtgaagtgagggacgcagtgtgttcattttcaagtcaatttctgccagataccaaattcttaataaccaaagttggtcagttgttctttcaaataaaaatggcattccatgaaaaaaagggctagttcagcttgtgtgatactgtggaatatgtatttggtcttccctagtacacaactcctaaaatcctcgggctcgtcagtgatgtcttcgtaatgcgttggctaagggccggcaacccctgggtagcttcagaacaggggctggtcaccagaaagacctaggcaggattagaaggttgggactttcagccccgatccccaacctcggggagtggtgaggggtgggggagctgaaggttaagctgatcaccagtggccaaacagtcttgcctatgtatggactgggtttgaagatagcttccagatgtttctggaggggggcccacccagagaggacacgggagctctgtgtctcagcccccgtccctcgccctgtgcatcacctcagtgtcctctgtagtctcctttataataaaccgctaaactaaagtgtttccctgagatctgcgtgctcagtgagggttgtggacactctgattgatagccagtcagtcagaagcacaagtaacacaacctgaggcttgccgttggctctcgaagtggggggcagtcttgtgggacagagcactcaacctatgggatttgatgctttctcccagcatcaagatttaatggaatcaggaccccagccagtgtccggctgcagaactgactgcttccttgctgctggggagaggtccccacacctctggtgtcctaagtgtgctgtgaggatgtgatgggagaaactgaattttgttttttgtttttcaaccccaacaactgtaccgtgtgctttttcttgagacagttgtacttggggatgcagcaaaagttcttttgtggcacattttatcacagggttggaattgaataaagtggtgaattattttaactgttcatcagggaataagctaagcaaaactggcctttttcctttttctttcccttttccctgcctgtgcagggcgtggagaggagagctcggggctgctgccacagatcatgctgagccgccagcagctccacctgcccttggctttgctcatccgtggaaatgacaacagcgtgaaaacggcagatgatgtacaaggattatgatgaaaatagtcttgacctcacggaccctctgagaggttcttgaccrytgcaccctcaagggcccacagaccgcactttgagaactgctgcttgaatgcaagctattagcagtaggagtgtcaaggacagggcagacttcaggattaactgttccttctcatctttaccagattgtactggttttgtctcaaaatacaaaaatagagtgtttattatgtaaagaaaatcaaatgatagaacagctgagaacagctggatcaagagcacagagcggaagttcctcttcatcccactgctgtcctggagtcttcctcaggacccactgctcctaactgtatctttgtagatcattttctatgtgtttatttatttatattttaaaacctagtttgtgtataagcaatcttttttaatccacaaatgtggaatcttattctagactttgaataagattttctgtattagtcagtattgttttttgctacttcttttcctttcctttccttttttggaaatagggtcttactcctctgtcacccaggctggagtgcagtggtgcgatcagagctcactgcagcctgatcaggctcaagcaatcctctccctgctcagcctcctgagtagctggaactataggcttgcactgccatgcccagcttttttctattttttgtagagacagggttttgctgtgttgcccaggatggtcttgaactcctggactcaagtgatcctcccacctcggcctcccaaaatgctgggaatacaagcatgagccatggcatgtggcygccacttgccttttttcattaagagtctataattggagatcttacagggaactgggctttctgctcagccatactygagctcatttgacccccggccactgccccttgaratgtaagtactactgtgttgccttcatcatacacatgagacgatcaagtatcaggaagatgaagttacttggtgaaggtctcagagctaataggtgctatacccattatttgcatgcagacmttctgagtcyagagcccatacttaagtttttaaccaggctgcctttttatgtggctcattttatcctttttgatggctgcatagtattcccttagttatttagtccactgtttctaatgacagtgcaggagagtctcgtccatccttctgcccttcctgggtggcagacatccaggagtgggtacacggtgtcagaggctgtgcacatttcttgtttctattctttgaattgctttgattacatcttttgtccatttttctgctgaacttaaaaaagtcagtctgtaaaagtggtttttttggtttgtgtgtttgtttttttgagatgaaatctcgctctgtcacccaggctggagtgcagtggcactatctcggctcactgcaacctccgcttcccaggttcaaacggttctcctgcctcagcctcccgaggtgtgattacagggatgccaccatgcccggctaattttttttttttttttttgtatttttagtagagttggggtttcaccatgttggccaggctggtctcgaactcctgagctcaagtgatccgcccacctcggcctcccaaagtgctgggattacagttgtgagccaccgcacccagcttgtaaaagttctttatgcattatgaatattagtctcctgagtttttaaaaattgttgaccttgagttttaattcctctgcccccattccacactctcctctccgagtacagctgaatttattatacatgtgtctttgactagattttttgtattgctgttgctactctggaaatgaagaaaaagggctgagatccatgtttgggtcagtaatggggtggaagaggaataatgtgtgggacaaaaggcgattggtgaattgaactgaaatatcatgtgaggcttaatgatgggggtggatattttctgagcaatgtgtcgttaggcgattttggcatgcgagcatctgagagtacacttaccaagcccaggtggtagggctcactccgttacaggcctccattattgtctcatgggaacgccatggcaggtgtggactgtcaggagtttagagctcagaggcaggggcaaccatgaaaacaggcaatcctggagtagtgacagaagtcttgctaatgatgttagatatctcagagcatgaaagagacttgagcttattttatctggatctccagagatgataaaaccacaactaaaataggaatgcagccgtgtgaagacacaggctgtgctgatctttttctgtatcgtgcacaacacctaccactgcaccggcacacaggaagggcttttatgaattcttgggtgagtcaccatacctgcctgaaaggggcagcaggtttgctgataattagcaacatttgagtgaaaaaaacacagacaataggtctgcatgtttaaccgcatctaatggctggtttgttttaagtgggtggtgagtaaaagagttaacattaatcatcatagaaatggtattaatgagcaaagatatgaccggcctcacacctgtaatcccagcactttgggaggccaaggcaggargatcccttgagcccaggaggtcaaggctgctgtgagctgtgatcacaccactgcattccagcctgggaacagagtggaccctgtctcaaataagcaaagacattctaattaaagcaataataatgttccatttttcctagtcatttctggaaggagtgtctgtacactcattttttggagggtaatttgacatttctctctcaaacttaacacaagggttaggaccccaaggttccacttgtaggaatcctacaggaaataggccagcatttcagaaagatgtgcactgcagtgatacaacgttgaaaacactaaatgcctaaaagtagtgaggcggttacatgtgttagaacacacactttgtggagtaagagtgttctgggcccctcggagagcagtctgtgacacattgggtgaaaacagcagcttttgcagaagaacggtgaccccaggcgaagctgagtgtggttgtaaatgctgctctggaaagcagatatccaggggtgacatcgggggtgcctgtggggaaagggtggtcacgcctcactgaacagagactttggcttttattctgcacatttctgtattattttatgttccacaccaagaatgcattgtttgtaggtataaggagaaaagtgcccttaagaaaaggtaaagagggagttctagcaactcgaaggaggaaggtttttctctccgtgcacccctaatagtgactcagcactgcttagcaccccaccttctgttgtgctccggttttctggaattttaatggttttaggctgccattttgtcatgtttgaaaataccttaaattttttttttttaatttcaatagttctgttccagaatctagaatggcgaagtagtatccctaaaagagtattcattacaaaagctctagtacataactagatttaaaagaaagcaaaacaaaaactcagctagtaataatgattgaaaaggggggattcgtgccttacgtgtaccagtgcgtttgtaaacgttcctggctttcgtaggcattgaaggctgcgtctcagctttgctcccgtcctttgcagtaacctgtgtacgggaggctccgttgtttgccacctcacattgggataggttgcttttagaataaataattatgtattatttgcataaaataaataaacacccacatactccacacttaacaacggtccatcttgttttgggtttttgaagagatgaaggctacggtcatgttgaggctgtccatctccgttttaactccccaactccgttgcccgcactccttcctcactggaggcactgtctgtgaaattggttcatagcctgtccctgctcttgagtgtttatccaaatagatccatgggttgccttttatcagacagaggccgatggggaattgcrgctctgccgtggccgcgcttctccagctccctgcaactttgtcagaccctagagatctgttcagtgtcacaggtcacatttcttagatgttgacttcgtttatggtaacagatagatgttgttaaaggcatctgaaatattagataatcgttgaagtagtattaaccaaaattattaatctcctctgccatagagccccggttaagttcaggtgtgtaatagtgatcttaaaatggagagaatgagaaagtttttactttaaccattctcaatttgcttactgttcattaaagaattcagtagtaaaaggcgtaatctatttggattatgaaggtatcagcatacggctttctgtgtacgccctaaagtactgatcacagtcaaatatgtcgtaggtaaaatagtaaccatagaaatccattaaatgtctgctgctgggttatttaaaaagtagatggaacctttctctggccacgcgccctgataacctccgtgttccccgcaggacaggctgtggtggaggcgcacacacagcacccagaggcgggctctgtggagttcgcatctgtatgtcagcaacttagggtggtttgggccatgtttcacttgacctacagagagaaatgtgacacccaggttggcatagattgggatttttttttttttttttgaggtctaggaattttttttaattgtggtaaaatatacatggcataatatttatcattttagccgttcataagtgtacagttgcgtggtggtaaatgcacttacagtgttgtgtagctatcaccactacctgttcccaaaacaacttcctcattaccaacacaactttgtcctattaaacaataactccccttctccccttccccggcccctggcgaccaccattctactttctgtctctgaatttgcccagtctagggacctcaggcgggtggaatgacacagcgtttgtagggacctcaggcgggtggaatgacacagtgtttgtagggacctcaggcaggtggaatgacatagtgtttgtagggacctcaggcaggcggaatgacacagtgtagggacctcaggcgggtggaatgacacagtgtagggacctcacgcaggtggaatgacacagtgtttgtagggacctcagtcgggtggaatgacagtgtttgtagggacctcaggcgggtggaatgacagtgtttgtagggacctcacgtgggtggaatgacacagtgtagggacctcaggcgggtggaatgacacagtgtagggacctcatgtgggtggaatgacagtgtagggacctcaggcgggtggaatgacacagtgtagggacctcacgtgggtggaatgacacagtatagggacctcaggcgggtggaatgacacagtgtagggacctcacgtgggtggaatgacacagtgtagggacctcaggcgggtggaatgacacagtgtttgtagggacctcacacgggtggaatgacacagtgtttgcagggacctcacgtgggtggaatgacacagtgtagggacctcaggcgggtggaatgacacagtgtttgtagggacctcacacgggtggaatgacacagtgtttgcagggacctcacgtgggtggaatgacacagtgtagggacctcaggcgggtgggatgacacagtgtttgtagggacctcaggcgggtggagtgacacagtgtttgtagggacctcaggcgggtggaatgtcagtgtttgtagggacctcaggcggatggaatgacacagtgtagggacctcacgtgggtggaatggcacagcgtttgtagggacctcaggcaggtggaatgacacagtgtttgtagggacctcaggcaggtggaatgacacagtgtttgtagggacctcaggcgggtggaatgacacggtgtagggatctcacgtgggtggaatgacacagtgtgtgtagggacctcaggcgggtggaatgacacagtgtttgtagggacctcaggcgggtggaatgacacaatgtagggatctcacatgggtggaatgacacagtgtttttagggacctcacacgggtggagtgacacagtgtttgtagggacctcaggcgggtggaatgacagtgtttgtagggacctcaggccggtggaatgacacagtgtagggatctcacgtgggtggaatgacacagtgtttgtagggacctaacgcgggtggagtgacagtgtttgtagggacctcaggcaggtggaatgacacagtgtttgtagggacctcaggcgggtaggatgacacagtgtagggacctcacgcgggtggaatgacagtgtttgtagggacctcaggcgggtggaatgacacagtgtttgtagggacctcacacgggtggaatgacacagtgtttgtagggacctcacgcgggtggaatgacacagtgtggggacctcacgggggtggaatgacacagtgtagggacctcaggcgggtggaatgacacagtgtagggacctcacatgggtggaatggcacagcgtttgtagggacctcaggcggatggaatgacacagtgtagggacctcaggcgggtggaatgacacagtgtttgtagggacctcaggcgggtggaatgacacagtgtttgtagggacctcaggcgagcgggatgacacagtgtagggacctcaggcgggtggagtgacacagtgtttgtagggacgtcaggcggctggaatgacagtgtagggacctcaggcgggtggaatgacacagtgtagggatctcacgtgggtggaatgacacagtgcttgtagcgacctcaggcgggcggaatgacacagtgtagggacctcaggcgggtggaatgacagtgtagggacctcacgtgggtggaatggcacagcgtttgtagggacctcaggcaggtggaatgacacagtctttgtagggacctcaggcgggtggaatgacagtgtagggacctcacgtgggtggaatggcacagcgtttgtagggacctcaggcaggtggaatgacacagtctttgtagggacctcaggcgggtggaatgacacagtgtagggatctcgcgtgggtggaatgacacagtgtttgtacggacctcaggtgggtggaatgacacagtgtttgtagggacctcaggcgggtggaatgacacaatgtagggatctcacgtgggtggaatgacagtgtttgtagggacctcaggcgggtggaatgacacagtgtttgtagggacctcaggcgggtaggatgacacagtgtagggacctcacgcgggtggaatgacagtgtttatagggacctcaggccggtggaatgacacagtgttcgtagggacctcacgtgggtggaatgacagagtgtagggacctcacgtgggtggaatgacacagtgtagggacctcaggcgggtggagtgacagtgtttgtagggacctcaggtgggtggaatgacacagtgtttgtagggacctcattcaggtgggatgacgcagtgtagggacctcaggcgggtggaatgacacagtgtttgtagggacctcacacgggtggaatgacacagtgtttgtagggtcctcaggcgggtggaatgacacagtgtttgtagggacctcagtcgggtgggatgacacagtgtagggacctcaggcgggtggaatgacacagtgtttgtagggatctcacacgggtggaatgacagtgtttgtagggacctcacgcgggtggaattacacagtgtttgtagggacctcacgtgggtggaatgacacagtgtttgtagggacctgacgtgggtggaatgacacagtatagggacctcasgcgggtggaatgacacagtgtttgtagggacctgacgtgggtggaatgacacagtgtagggacctcacacaggtggaatgacacagtgtagggacctcacgcgggtggagtgacacagtgtagggacctcaggcaggtggaatgacacagtgkagggacctcacgtgggtggagtgacacagtgtagggacctcacgcgggtggaatgacacagtgtttgtggggacctcacgtgggtggaaggacataatgacatagtgtttgtccacttgtgtctggcatatttcactacacatgatgtttcaaaggctcagccatattgtagcatatgtcagaatttcattcctttttttggcagaattagatgtggatttttgatgtaggaggtacgtttctaacctacttttgtttatttaaaaaattattgctgggcacagtatctcacgcctgtaatcccagcactttgggaggctgaggtgagtggatcacctgaggtcaggagttgggagatcagcgtggccaacatggtgaaaccccgttgctactaaaaatacaaaaatttgctgggcacagtggtgcatacctgtaatctcagctactcaggaggctgaggcaggagaatcacttgaacccgggaggtggaggaggttgcagtgggccaagattgcgccactgtgctccagcctgggcaacatagcgagaccctgtctttacaaaaagtgaaacaggaatctcagggttgtgtgtgtttctaataaatgttaatagaagatgaatttcaggaacaagttattgggagagaaacattagcagctttgttttgctaatatgatgggctaggttcaaggatcatttcctaaagtttgagatgtgcttttccccttttgataccagctctcagagtgatgatcgtttctgtataggcaagggaaatacttgtcactgccttcttgctrgtttgactgactctgaaatacttaaagatagttgtatttgttgttgcatgtctagatctgccacgggggagaggccagagaggctttgctgacgtgcagggagtgaccgggggaatgtcccagcctcactttgcaggtgcagttgagaaggcaccatgagtaaaggcgctgccccacgcacccagggtcctaaggcttcggcagttaagagttcatccgttgccatttgatgagggctctgggagtcaaaaggcttccctgaacaaggaacccttgagctcagatgcaaatgagggatgggcctggacygggatgggggatgggaggagcctgcaaaggggagagagggtgggaggacttgacatgggagaagaacaggctggggcaatggggtgtgaaagcaaagggagtaagatgagcattttggtctttactaagggcagtgaggattcaaaacagcatggttggatttgagtttaaaaaatagaactcactggctgcagtgtgcggaggtgggctggaatccatttttgctcagttggggagagtgtatttttaattttccaaagtgactatgttggtgattgtgtcagagcccctggcctgtcgttggtggttataaagcgcttttgatttgcctgtaaatcagagtctaccatggctcacatagttatttgcaaaaagaacttctaagcatgaaattgagcataaaattgcctaggagtaattcagtttgcttaatatgtttgagagaaaggttaatatattcagtcagacagccttttgtttttggataaagacgttctcatttttcagcatggcatgagggaaatagcctggaatattctcagtaaatcagattttcccttgaaaagagtggccctacctctcatagacttcaacggcagtggtttaatatggttcccaaattctgaagtcttctgaaatttgttagacaaagcaagacttaacgatcacagcatgatgcaaatactaattttccgagtaaaacacaataaaagattgaccgtttctctctcatgtcatttacgtatgtctatgactgtgagaactaaagtggccgtatttacagtaaggtaactattgttaatgctgatgtattcttgagaaataaaaagagtgaatgttaagtattcctcatcacaaaaaggagttatgtgggctaatacatttgttaattagctaaatttaattgttccacaatgtatgtatactttagacatcatgttgtacatgatacatacttatctgtcaattgttttttttttttttttgagacagaatctcacactgtcacccgggctggagtgcagtggcttgatctcagctcactgcagcctctgcctcccaggtgcacacgattctcctgcctcagtcccccgagtagctgggattacaggtgcacaccaccacacttggataattttttatatttttagtagagtttctctatgttggccaggctggtcttgaactcctgacctcgtgatccgcctgcctcggcctctcaaagtgctgggattacaggcatgagctactgcgccyggccattatctgtcaatttttttcttaaaaaaaattggaaagtagccaaaaagaaaacaaagtccctttaggtttaaataggaaaatgaatttagtaatttgtggaaaacaaatttatatcagatttttgtttgttggttatttttaaaacttggaataatttagtctacttttagagtgtatttgagaatggttgcaagttgtgaggcccttttagtgacttgatccatttgtttttatggggtagttttacttacaacagcttttgagctgtaattcattgagcacagagctcatcctttgtgaagtgtgcgggtgaatattcagttttgtggccatctgaattggataattctagaacctttccatcacccctaaaagaaacccactrgcagtccctcccattccctccaccctctgccctctggtaaccactgattactttgtttctgtggatttgcctgttcacgtgtcatgtaaatggagtcatggcccacgtgtccctctgctccccggctgcttctccccagcgtgatgccggtcaaggcatatcctgcagcatgcgtcagtcctccctcctttcctggtcaaacagttttccatttttgtttatccgttagttgatgggttgttcctagtttttggctctttcaaatgcacctgtggacattcttgtacatgtttttgtatagacatgtgttttctgtgctcttgggtatattcctgggaatggagcttggtcatatggcaactgtgtttaatgtatttgtggaactgccaaacagtttcccaaggtggctgcaacattttgtaatcccgccgtcaatgtatgaacagtttttcttcacctacgcttgttattgtctgtctaattttagccatcctaatagttgtgaactggtatctggtggttttgatttgtatttccctagtgattaatggtgttgagcatttcctgtgcttatttggacatttatatatatatatttttggaaaattacattttcaattggcttgtctttttattttatttattttagagacagggtcttgctctgtcacccaggctagagtgcagtggtgctgtcatagctcactgttaactcctgggctcaagcgattctcctgcctcagcctcccaagtagctgggactgcagatacacaccaccacagccggctaacttttaaaaaatttttgatagagattgggtcttgctgtgttgcccaggctggtcttgaattcctggggttacagtgttagccaccgtgcccgggcctttctttttattgttgtaagagttcttcaggtattctggatacaagtcccttatcagatacataatttgcaaacaattcctcccattccatgagttgtgttttcagtctcttgatggtgtccttagatgcacaagaatttttaattttgatggtgtccaccttatttttttctttcagaagtttgtgcttttggtattatatgtaagagaccactgtctaatccaagattgtgaagatttattcatttagctcttacatttaggtctctgatccatgtttatatataattatatatagaatttatgtgcagttaattacatttatatataatttttatatgtggtgttaagggttcagcttttttcttttgcatgtggatatttagatgtcctggcatcattgttgaaatagtattcttttaccattaattgtcctggtacacttgttgaaaatcagttgaccgtaagtgtccttctagactctgacctctgatccattggtctatatgtctgtcctcatgccaataccatactgtcttggttactatagctttatggtaaggtttgaaatcaggaagtgtcagtcttcctcctctgctctttttaaagatcattttggctattctgagtcccttgcacttccatatgattctagaattagtttggcaatttttgcaaaaaaaaaaaaaggcagctgggattttcatagggttaataccttgactattgtagaacactttggagatactttcttaagttttccaatcgtgacacaggataactttctgtatattcaggtctttaatttttttttttacaatattttgcagttttcaatgtacaaatcttgtcattctttgattaaatttattcctaagtatttattctttttgatgatattgtaaacagagttgttttcttgcttttatttctgaatttttcattgctaggtgtagaaatgcagttgactttattggccttgcatcctgtgtccttgctgaacctgtttattatctctgataggttttgtgtttgtggattccttaggatttcctgtatacaatataatgccatctgtgaatagagatatgttactcctttttaatctggatgccttttatttattttctttgcttaactgccccagctagaatttccagtagaatgtttactagaagttagcaaatcaaacatccttgtcttgttcctgcttttaggggaaaagccttcagactcatcatgaagtgtgatgttagctgtggttttttaggtactctttgtcaagttgaggaagttgcattttattcttagttggttgagtgtttttatcatgaaaaggtgttggatttgttaaatgctttatctgcatttattgagatgaccatgtggtctttgtcctttaatgttattagtatggtgtattacattgatttgtttttgtatgttaaaccaaccttgcattcctaggatatggtatacttmtcatatttcaaaaatattgtttgttcctgtagcagagaaatttttagttctttctgasttctgtattttagaataatttgccacaaacttttttttagtgcttaagtgactagaaagtagtatgcagaattttctattttgtcacattttatccagtctagtcataatgatgcaagattttttttgctccttagttcagctaaattcagcttcttgtcttgcaaccaggaaaaattaggcatgcggatacattgaagggtgaggaggcagaatttattaagcaaaaggaaagctctcagcaaagatagggattctccaagcaggtttccccctcacaaattgaatacgaggccaccacgcagaggttgaagaagccaggcccctccccagcataaggtgcatattcctagtggctccgccccgtttttcagcgcacacacaggcccttagtctgagccactccatgttgatttatttcccttactgggcatgtgttaagggacgggatttttcaatgtgggcatgtttaggcgacttcccccaccccatgcacaatgacctgggcggggcagagattcccttgggacctttccctgtttgcctgtgtattgcatttggctgtctcctgcctctatcagtaattcggataaactcaattttggatgcttttagattatagtgtctctagagtcttactgggtctcggacataaatagttttccatttttttaatatatggtagaggcttataattcacttctattagtttatgtctggtttttgaacagaatggactttttgcctttgggtgagcttctttgaaaagacacagaaacgtgtgtatatgtgtgtgygtgtgcatctgtgtctgcttgtagaaaatttcttacttccagctgagcgcagtggctcacgcgtgtaattcagtactctgggaggctgaggcaggaggatcgctygagcccaggagttcgtgaccagcctggacaacatagtgagaccctggctccacaaaacattaaaaaaggtagacaatttcccacttttcttgtctgtcagtttgtcgtatccagagtgccctgttgctgagctcaccgcctggcagcctcggtaaactctgcctccttggagggcagctctactcctctttctgcatatgtactaaattcttctcagagaagttttatgtgaaggagttgtgatttccaaaaactctctggctggatgtgttttttgactgttgtgtgtcatcgtttgagtccctgcagtatgcacacagctctgccaggtgccgcagagcaggaaacaaatggccttgcccggcaccttgcctctgcccagcgtgtagaggagagaagtgattgggtsggtaatggtaggaaacgaactcgttgccagagtaggggtgcgttgaaatggktgaacttgccgagtcagggtagcagagcgctggctacagcgagttcatgaaggactgggaggagagggtgtggtgaccacgagtccaaagagctgcctagcttgggtcatcccgctccaggtggtctctgctggaagcagtggcttcttccactgcagggggtgtctttgacggggagattatggctgttctcttttgggttcttctgtttttcatgaaataagcagattcattaatgggaagtggggtgagtggctggggtgctggaagtttgaggggagaggagaggtgtgagacagtcattttgaggagggaggagccgtggtctgggagcatcaaatgaaggaaggagaaactctccccccggggagtggggtgtgagacaacagagagcccccatggagagggcctgggagaagctgctgtcagggattgcaagtttcagactaagaggatgaatggagccttcagagagggcgggtgcgcgggtcggacgggtgcgcgggttggagtacaggaggcccagagcttggcggcggtgagagtccgagtgaagacggatagctgcttgggcctgaagtcagcgggatgatgtttgctgcagaatggaatacctgcagagggcacaggtcccagatatgcagtactgactgtcgcccagcaaagacccccagtaaatacccagccccactaggagcacgttgccaggacgccaggccctccctccctccggggcagctcctaccccagctggcatcgcacatcggacaccccgttcttgaatgtggtataagtggaattgcaccctaagtcctctgcagtgtttggctttctgtaactaacctggggtgttacgcgatggtcatttgttttcattgctgtgtgatgttctgttgtatgaatatgccacagtttatgcatcttttctactcttgacggacatttgagttgattcttttgtgaacgtgctgtgaacattctcgtaagtggttcagtgatgcacatatgtagttctgggggctgtgtgtctggagtggagtttctgggtcacgggatatgcatgtttcaccttagtggatattgtccgatggttttcagagttgctgtacccatgtttgctccaggagctgtctacgagagctgccgtggatacctggaaaagtcagtctcatttcagctggtgtgtgagtgtgacattgcagggtggcttgtactgacccttccctgacagctagggagggtggacaccagttcatctgcctactagcctagggtccgatttgctagtgcctccggtagggcgctagttttccttataaccacytcctgggctgctaggccacctcagttcctggtggccaggtggagaccatcaggaaggggcagtggcctcgcgagcagcacctggtctgtggttatgtgccaggaagtgtgtttaaatgacccactccagaactagccgaagaggacctgcgggaaactttcacatcatgtctgtcagggatcccttttgttttgacaatgactcagtaattttaggtgatgcgttttaagtactgtatcttttttggtaatagactgattgtggtacttgggtattgacagggttttttcaggctggtaatgttatctttatgcttttcaagagcttcctcccgctgctttctggacattgggctctgaggcttaggagaggaaatgggggaaccccttgaaggctgcggcaaccctccagcagaggtggtgggtgccgtgggcggaggctggcggcagtgaagatccagagaagtagagaagtgaaatagtcacatttttattttgttttgaaaaacctagtgggttttcaaaaactattaagttaggaaaagtctcaggatatgagccatgcagccagcaggcctccaaatggccgtccaggcaggggagacgggtcagacgggtcaggagacattgtctctcgggacaagaagagctgagagctgatctgatgcattcatatttgacataccagttaaaggaagtagttagaaatgatgtacgtataaaagaaaagtagaataataatacaacaggcgcctctgtcctcaaccccagaactcacgcctggagttgtttgtctgccttcgttgtgtttctctccagatgcagtttctggatctcctgaaggctgatgaccccagacggccttgtcattgccccctgtactacctcggaaatcttggtttcaggcacccccttggatttctgtctcctgtgcttcccgcagagtggccctgctcaggcgccccctcctgatcctctgagcctctgcctcctcccagccactgggcaggctggaaatgttatcatgggaatgggcaggctggaaatgccatcgtgggaactgtgctgggtggtctggtgttgcccttagtgtttcgttcactaaagcgtaagccgtgtgaagacgggctttgtgttgtcttgaggccacccacgcagtgcttggtttagagccactcagatgtaggagcagcttaaaaagataagctgctggcctcaggtgtgaagtgggcgtggatactgggaggcaggcctgcatttctcaagactcgtcactcttctctcttctgaggggacttccgccataggctctccacatcgcccgtgtcctctctttcactcctagcaggtgaccctccctcatgcctcgtggaaacagtgcagcctgaggggctgtgctctgcccgccacacctgcccgctccattctcacagcagctcccggctgtgctccgtgcctccctccccgccaccaccggcagctgactctccctggggcacatggtcctgacttctagggcatgttttacagatcccactgactccgtttccccttccccatccacagctccttagtctgcttcctcatagcacccgaatgtcctttaaacctgggacctcattcctcgtcacctgcccctcctctcttgccacctgaggccgccccggttgtaactcctgtgctgggactgctcacttttcattccgtggtttcgaaccgtcagtgccaacctcctgtatggcaaccgatgattccgccttttactgataccaccttcagcccacgtgtatccccactccccacaaaaaaagaggttgaaagagatctattgcaagtttttgttacatagtattccgttaacaggtaaatattgtgtattactgaactgtgccttttctttttcacacaagttttcactttcctaggtctaatgattgcctgattttctcatatgcttagttatctgtgtctttagtgcatttttttttttagcaaacacttcaacaggtctatcaaataccaacacatcagatcagctctcagctcttcttgtccccagaccagtctccctggcctgaacggccactctgaggcctgctggccgcctggctcatgtcctgagattctcctcaccattttttggaagtcagatctgccatcttccttctcttggctttttctctcattttgccaaattgcctctcgcagcagtttcctgagaaagcatttgtttgttttggctctttgcatattcgaaaacatttttactgctccctcagatttgatygaaaacttgactaggtctagcatttcaggttgaaaattgttttctcccagaattttgagggtagtttgaggtttcatccaccatgtttcctgcaacctgtgtgatgccatctgactcccttcctctccgcatgtgacctgttcatttgctctggaaatttttagaatctcctttttatccctggtgttgagatgtgcgcggcctgggtctgccatcagccatgcggggcctctgagcctgggaacggggccttggatgcttctgccttgctttctctgttgtgtttctagaamtcgtcagctgggaggtgggccaccgaaactgatcctctgattgtcttatccttcctgtcatccatgtctttctttccactctgccctttggaggagatctgaaggttttgatgattactgttgccctttggatttcacatggcactttctcctcctctttccttctttagcatattcttcctctcctgggggccccactgggtgtcctggctgagaccagcccaggtgtcctgccccactcacccgcaggggcttgctaccttgagcacgcagggtcccacgtccagcatccctctcctctcccctccatcaggcggggatgatgatagccctgcttcctggggctcttagaggcctggctacgttagtacagggcttgtgcgtggttaggatagcacctggctcctagtaagcattcagccaaaccctggtactgtagcggctggtagtagtcagcagatctccagaacatgattcgggctttcccgtctctctttgttcagattccatccttgtttttgtttttttgttattttttactgagatggaatcttgtttgttgcccaggctggagtgcaggnnnnnnnnnnnnnnnnnnnncagtggcgtgatctcagcttcctgcaatccccacctccctggttcaagcgattctcctgcctcagcctcccgagtagctgtgattatagatacacaccaccatgcctagctgatttttgtatttttagtagagatggggctttgccatgttggccaggctggtctcgaactcctgacctcaggtgatccacccgccttggcctcccaaagtgctgggattacaggcatgagccactgcgcctggccccacccatctttgttttggtgacttcttgaggctctgcaggtcgtggctgttggtttctatttctgagtgtagcgaggctgctgtttctgtgggcctgggcttttcagctggcagcttcactgtggttggccatgtccttgtaaaacccaaatgtttgaatattgaggccctttccccagggctggagtatttcggagggcacccctggggatggcggccggtagccagtgtctgaggaacaagaaactgtgtgctcccacctggcagggtgaatggggggcgacctggggaccaagcagctctgtgaagactttctgcatctctgtgccagccccttgctgcccccacgtttgttaaagctgctcacatagatgctttttctgctttcttctgamacctgggcgggggtgggagggtaaaggagatgaacacacacgcatggcccaccatgttcggcgggaggtctgagaggactyggggtggctgcggacactttgcggatttgatgggacccggatgttgaatgaggattgcacagccagacagccagctggcagcagtgccacggcaggtggagtgtgacatggcagtggggcctgtctggctgagaagagacccgatgtctccatgggatggccaggaggtgccaggctgtaccgtgggcagaagcactcccctaccccagcagggaaatggaggcagaacgcagccatggtgaagtttatggtagtttaaaatacctaactcactttgggaagctgaggcaagttgatcacttgagactgaagcgggctgatgacgtgaggccaggaattcgagacaattctggtcaacatggcaaaaccctgtctctactaaaaatacaaaaattagctgggtgtggtggtgcacgcctgtaatcccggcgacgcaggaggctgagacatgagaatcacttgcaccctggagatggaggttgcggtgagccaagatcgcgccactgtactccagcctgtctcaaaaaaaaaaaaaaaaaaaaaaaaaaaaaaaaacacaaaaaaaaaacctaacttggtgcctttagtaccatatttatgccttcagcatcagtctggtttttaaaaactgtctccatcagattaatttgatgttgataatttaaacgttgttggttttgtaattttgtgtatttagtttgggtttagagattgagcactgcagtgtttctaattttaggttcacgcgtgtttgtgtagcttaatgaaacttcccagcaccgacagttacaggagtttctcttttaaaagactcagtccattataattaagtttgaaaatcactgacagagctagaatacmattaattatgtaattttatacaccctctgggtataaatgacatagatttagacctttttaatccaatacataatattttagtttcatttaagcaagttaggttattttcagtaatttaatagtgacgcttctaagaaacaacctaatccttcttccaaagtctgaagattttgaaaagaaagaactcccaggccagggattcccgtgtgaggccagcgaacagtgccagccgcgggagcttgctgtgtagatgttggtggaaatccttcactaacacgattaaaaygcctttgcagacctgtcagaattgcattctagccacttttggagggagctgtttgagtcacttcagctttagggcccatttcttcttagtaggttgtttacaatagccatttagttgtttttttacttcctactataaacgtaccgtgggccctgggtgtgcccaggtcactgcgagcccttgagttggtgcccagcagggaggcgagcttgtagtgttctagctgttcctgagactcccccacactgcagggtaaggcgaggagtcccactgtggccataggacaagctctgatggcccctcgggaggccacgccaggccttatcctcagtccgcacgcgacacagcagcactgcggagaagccagcctcctccagagtctgtcatggaactccccctgaaaacagaaaatctttgtccaagtcacagacctgggattttttttttttaatttaatagttggtcataaatccagacactcccttcccaacccgaagggttagcctcaggacacctgaggactttctcactgcttagtggtggtgttccttctgccccggggtcttggcctctgttgagctggtgtctggggtctttgttatgctgtcagagatctcaaggcctccctgacagttgtctcacttggtaatgatgtcatcattatcagtggtggtaactgtatccagacaatgacatggaacttctactgtctagaatattacattgtacagaarccaacaaaagttattgcatagaatattaacaacatttttattactattatataagaatcagatttattttaaaagttaacattaggtatgcattataaaattaggcaacattcttcaggacccatttttttcctctatttttttcttttacagatgaattttctaaatttctaccctttatccttttatcaagacaacctagtctagataaatcctggtgctccaggggcccaggcatgggggtggagtaaaactcgcccattcacctgtgccggcaggttctctgcaccagaaccaataagtggccacttggtaattacaagtttgccaagacagttttgctttagtctcggagaaagttgtatatgtttatcgtccttttgctcttttttattaattttttggtattgtgactcctccccaaaaccgcatccggtaaatcgcttctgtattttgttgacagcggacatcatttccaccgttgagtttaattactctggagatcttcttgcaacaggagacaagggcggcagagttgttatttttcagcgtgaacaagaggtcagtaattttcagtccacaaatcaaatgcaattattcaacctttcgcatataacttagaagggaggaagcaaaattattttctcattgtctcatttcattaagattcagttccatcacattagccatacagaatctcctttcagaaattatctaagttctggcctcagctgctgagccccggtgaagtctccaaggcctttgtcttcagagtagggaggagattccgctggggaccccatgaaggatgcagggtggtggtgaggtgcatttatgtgctttcattccataagaactcacgcggctctctctgaaaatccctttatacgcctatgcaggtactggcccagccccgccgtcctgccctgccatgaagtgtgagcagctttctcagcacttcctgcagagaagtctggcaggggtgtgaattctctcttcccttcagggagaggtgagcagcactcactcctccatgcccccttgaaggcttcacctgtctggagggaagggaaccttcagagtgtgggccttggaggagcccacagctcataagcaagcactggcttcccggtcacggcactgccttttcactgatgccttgccagccccctccctcttctttctgttgagcctcctcagaggtcctaatgagcagtgataaaggaagcaagatcatgatttggtagtcaaggattcctggcaagaaccctggctctgtgcagctaagcctggggtctgaaatatttgtcctgccttttccttataaatacagtcccttgcccttcctgtctctgagtttcctaacagatgaaagggacagtttatcatctccaaagtctggtctctaaatttgtgtgacgaactttggtttagaggttggtgggccctggttcccctctctgcagatctgtacacaggaagtgctggccctgccccccaggaaggggagcctggaggaggactgtccctgggccacatgaggaaaattgacaggtgctaaccaatttcattatcaaaacatacctgttgcagctttattttgattatgtccaggtagttaaagatttttttaaatcctgttttctctgatttgggatggtaagaaatccttttgtgaataataagtatatcgttaatatttcttcacagtttgatacatttataattttgcatttttatctcagaagtagaatatcacacaatgctacttaagaaccatataccttggccaggcacagtggctcacgcctgtaatcccagcaatttgggaggccgaggtgggctgatcacctgaggtcggaagttcaagactagcctgaccaacatggagaaaccctgtctctacgaaaaatacaaaattagccgggtgtggtggcacatgcctgtaatcccagctacttgggaggctgaggcaggagaatcgcttgaacccaggaggcagaggttgcggtgagccaagatcgtgccattgcactccagcctgggcaacaagagtgagacttcatctcaaaaaaaaaaagaaccatacaccttacctttactcaacagaagtaaaagtgggttgtggtgtttaaatgttnnnnnnnnnnnnnnnnnnnnttttaaagcaggaggagtttttgtttttttgagatggagtcttgctctgtcacctgggctggagtgcaatggcgtgatcttggctcactgcaacctctgtctcccgggtttaagtggttcgccctgactcagcctcccaagtcgctgggattacaggcatgcaccaccacgaccagctaattttgtattttagtagcgatggggtttcaccgttggccaggttggtcttgaactcctgacctcaggtgatccgcccacctcggcctcccaaagtgctgggattacaggcatgggccaccacgcctggccagcaggaggattttttaacaaattgttgagtcatggctatcttaatgcaagacttcacttttagcttatttaaaaagtctgtcattgtagcgatagccttagggaagatgcctcatccctgcctaacagattttaggttagaaaatggaatttctcttgtttttgtgaatcgttgcttaacctaaataatartagtctcaaatataaaacaaaccctgataaaagtcaagcatctcgttctaaaagataytgggtattatagagtgttaagtgcttttttaagatgaagttgttatgtgagtgacagatttatacaggagcaagtccctactgaagttgttcagccagctgcaacttgacaaaccccaggcagccttttttctttttcttcgtatttcggttcacgtctgaaaggctttcacggtccatccattttagagcattcggctggttgccccatgtgcccttccctgtggacttgagtgtgtctgtgggtaagggcggcagtgcacgtgttcatccatggccggaggccgcggatggtgttgcagccgccaagagggtgaagctgctgcccatcaagcgaccccagctcccagttagaagctgcagcaaggttcacaggcgtccacgtgtgcgkcttagaatcgaaggagcgtggaggattcggaaggctagtgagtgagcaccagattgtggaaggtgcagggcctgagattcaggagtcaggtccatagaggcccgttgggaagctctggctgtgcagaagacgaggtgggaagcatagtcagcaccttgagtttcaagcttttcttacttttctgtgcagattaagtcttacaggaaagcccagccaataaaactaaggcccacagaacgtatgggtgtggctgtgcggcccactgccctccaggctcagctctagccgccaggaatcaggtgaaatcagaaatcagcacgtccaaaaagagaaggtgctcgcttcctcctcttcctgtgtgttacttccctgctctcctgcccgtgtccccatgaggcttcctttagaattctctcctagcagagcggcactccatgagatctgggagtgttggagaaggctgaggggttgcttgggtttggggtgactgggatgggagttggaacccgttcatggcagagagacaagcctgcagcctagggaccattcttgttctggctcttaggagaaaggccagggcagtgcaggcagcactttgacttggacattttatttttttgcttctattccgctgttttttcttggtagatgaatgtcttgggcataggactaatttagttatacagatttttctttttaaataatttggttccacttttctcccttgaaatagaactgtctgttgaggggctgtgcttttttgtagagtggtaggagagggtcaaaggagaacagtttcaacatctgccccgtgcagcacacgcggggcagtcagcagcaaggcgctcagctcctgcccgtggaggcttcggttgaaggaatgcaggaatgccctgcctgtcagactcagtgcggcggacaggggcaggcgaggcactcagctcctgcccgtggaggcttcggtggaaggaatgccctgcacgtcagactcagtgcagcgacgcggggcaggcgaggcgctcagcttctgcccgtggaggcttcggtggaaggaatgccctgcacatyggactctgcagcagtgcgggtgtgggtagcttcttgggatgtcttctcctgatacttgatcagattggaaatatcaaggaacatctgtttagacttgaaagttcgtttagttccattcctttagcatatgtactaaagtgttaaacacctaagatattagatattggttatagagcaagaatgaaagtactggcgtccttgattttgaattatgamatatttaatacttaatagaaaatttcacttagggcatacagaagattcagaggttaatatagatgtacctgcaaacccaccacccagaggttatcccttcatcaaaggaaggagaatgctcgggatacagatgaagctcctgttgtcccctccccatttcagcctgctactttcctcctggtctttttcactctccctctagcttcccagagttgctcatgattttgaagatggcatatgtcttcccaagcatgtttctccacttctgtaacagacwtgttctgtacgtacgtaagcagcacctcactctgggcacctgtgcagcctgcttcacttgtgcagcactgtgcggttgtctgtgctggctcatttatctcagcggcttcgtggtggtccctgcatggccctgtggcttactgttgcccttcgcctctggttggcatatgtgtggcgtctggttcactaccactgtgttggagctgccacatcgctgtgtcacgctcctcaggcccgtgctggctctcctctagagcagactcagcagacactttctctccagggccagattgcaaacatttttgcctctatagctcatgcggccttttcacaaccactcacctctacccagatggtgcagaagcagccagagacagtatgtgcacacatgggcctgactgtgttccactaacacttgccttaaatacggcaggctgcattcrgcagacctgctccagaaaayacggcaggctgcattcggcagacctgctccagaaaacacggcaggctgcattcggcagacctgctccagaaaayacggcaggctgcattcggcagacctgctccagaaaacacggcaggctgcattcggcagacctgctccagaaaacacggcaggctgcattcggcagacctgctccagaaaacacggcaggctgcattcggcagacctgctccagaaaacacggcaggctgcattcggcagacctgctccagaaaacacggcaggctgcattcggcagacctgctccagaaaacacggcaggctgcattcggcagacctgctccagaaaacacggcaggctgcattcggcagacctgctccagaaaacacggcaggctgcattcggcagacctgctccagaaaacacggcaggctgcattcggcagacctgctccagaaaacacggcaggctgcattcggcagacctgctccagaaaacacggcaggctgcattcggcagacctgctccagaraayacggcaggctgyattyggcagacctgctccagagaacacggcaggctgcgtttggcagacctgcttcagaaaatacggcaggctgcattcrgcagacctgctccagaaaacacagcaggctacattcgacaggctgaattcggcagacctgctccagaaaatacggcaggctgcattcggcaggcctgcttcagaaaatacggcaggctgcatttgacagacctgctccagaaaatacagcaaggctgcattcggcagacctgctccagatgcatacctagaagtggagtcgaagagtcggaaatcaagttcgttcttttttttttttttttccctgagtttcatctgagatttttttgagccrggattttttagctttaaaaaatatgtatggtcatttgatattcaaatttatagtactgaaattttctctacactgtgctttgttcattaaaacagctctcatgtttccttgcagaataaaagccgccctcattctaggggagaatataatgtttacagcacctttcaaagtcatgaaccggagtttgactatttgaaaagtctagaaattgaggaaaaaattaataaaattaggtggttaccacaacagaatgctgctcattttctactgtctacaaatggtaagaattgtgttctaagtggctgtttgatttagttttttatttttaattttctgtgtgtgtgtagattcctttttattttagaagttattcctgctttaaattttggggggagggtaagttatctagggtagcaagtgataggttgaaaattcaaagtatgcaacaaaaaccacacgtgcactttattatgctgttactctgcacgtctgcacatctttctttattgtacaaaacacctccaattggaaatattcatgttcagagaccccatagcttataacccaatataggaccacaccgctttctaataccagtactcaaacagtagtgatgcatgttatagtttttcttttcatatggagaatgaggtttttattttcagataaaactataaaattatggaaaataagtgaacgggataaaagagcagaaggttataacctgaaagacgaagatggaagacttcgagacccatttaggatcacggcgctacgggtayacgttgcctttgctttatccaatgctgttgagaagttaagaataaacgtttcagtctgctgtctggagagtgctgcgcggtggagtactgtgaggtctgctgtgaggtctgcctcgtgattcctgaaagtcgtttgcactcatgtgtgtgtttaaaagcaaggtctttctcctgttttcacaaaggcagaaagtcacatgtggtccttaggaaacacagcaatactaaggggaaaactcatatttaattctacagcagaaatctttgtggacatagcaaccacccttctctcagaaggttcagaacagcacctgggaggttggagttcagatgaaattcagaacacctcacaggtgcagtagcacaggttgcaggtcgaaagatgagctgtgggccacaggtacattcaggacgcttctcggggaatttctttggggttggtttaggcagatgctgatggttcagaactctccacctgtccatccatgagcatcattacttttttaattgttaaattatttgctccattgttggtagtatgaaatgatcatatttcatcaattctgatgcctaaattttttcatattttaacatttatgaaaccggctaaaactcaaaacctcaatgtcttataattggcctggtgctacgcaccactgatgttgtcttaaattagatggaacatggtgaagggtgtccggcaaactgggctcgagcccaggtgtgtcttggtgagaaaccagcacctgtgcagaggtgtgtcccctggaaggaaactctgcctggtcccaagggggtgccgttactagattggaaaaccgttggttgtttgggtggttgggtggtttggttgcggggggtgggtggttgagttgggtggtttggttggtttttaatgagatttcagccccttttacactattgtttatcaagtgaagactgagtgagtgagcccattccacattagtcttggagagtgctacagaggacgctgtaccgcagaagcctttccctaacacatgtgcctctgggagtgatgttgggtctgttctgatgccatttctccagctttgccgtgtggggtggctacacctggggttgtgcattcctcaggaggagtgtcctcagacttctcacatcgatgttgtcaccgtatttcctatgagttcatcaaagcgagaaaggctgtggcatttgctgaaaatctagtttatagggtcctaatttgaaccaagatgttttgatccaaaatgttggtgatgtctgatacacagtgctgccgcctttgcacccctgaattagtgtaaatcacttttagtgacagtaacacgagttgtgcagttccatcatcatgaaactgctgatcctaaagtagaagtgtgatgggacccccgagggtgggcacttgaccccctccagccttgtccatctcttctgcagccaacaccacctcccacccagttacctgtgcacaccccaccctcagaaacccctgttcctcctgatcagaccctgccacaacccatcagctcacgtgctcattttgggagaacagtaggcctttactaggcccagtcttggttttattcaaggctgcttttgtaggtttagcctaaataaaacgggtataattggtggccctactgaaggtgtgtgagaagtctagttatttcattagttggtgcatggggaagagaccacagacaggtaattctgtacattgacttaggtcggtatttgagatcttacctctctaacagttcagagtgggctatttatgtatctgagcctaactgggtaagagtcagacatgttgctgtttttaaatttttgctcttaaattattttagtgccagaaaagggatataattaaaagaagaaatcttggccaggtatggtggctcatacctgtaatcccagcactttgggagaccgagatgggaggatcacttgagcccaggagttcaaagaccagcctgggcaacatagccagaccccatctctaaaaatgaaagcaaattattttatatgcaaattaaaatgttttcaataaaagaaggaatctttgtaagtattgcagctatcatatgttttgattaatgggaaatttgttagaggattggggtaggtgtgtgtttttaagcctgaacttggtagaactgactcttcttgctctagagaatccaagggtgtggtcagcactacctgggttaaaatgagggaagcctccctacacacacttttccaagttggttttttacagaattcagccagacaagactcagttgagagcttttctttttcccctaagctttcaaggctctcccttttggtttctaattacaagaataacaaaaaatactatcattaattttttgttttgattttaaagcttatgtttttcttccagctggatgttagtgagacacaggcctttttccttttttcatgtgtgatgctattcctcacgcctgagctctcacctctgaccataggcggcctgcagccagcgcccactcctctctgtcctttctatttctgtgcgaattgggcttccctaggaagcctccctgaccacagcactcaacacagagatgggggcgggaggtaccttctactttttgttttaacctcaagtgaagtgtaatatataatacatacctccagataagacatctgccctataagtgaccagctccatgaatgtttgtagggtgcacatgcccatgtagccagccccagaccaagaaatggaatatcctcagctccccagcaccctgctgtgcaccctgccagtacctggagccagtggaggtttgtggggtttgcaccgagaagcatagtcctagtgcagtgagaagaggtgtgtgcatctagctgcaaggagaggacaaagggaggggtgcagctgagccacccaggaggactttgctgtccagcgcctcagtgtggccactggaggacacacaggagagggagccgcaggcctcggtgcctgggcagtttgttaccctgccagctgatcttctcttcagcaggaacatgtcgacctcggtaatggaagcaaggggaagacttggaatagacagtattccattttgtagcatattttcataactctgctaattggttatttgggggtattgcctgtacagaattattacttagccatgaatataaacttgtcctctttcgttatctactataagtgttctaattatgtgctgctgtgatctttgttttgaattcctatttccttccatttttaggtcccaatattgaagcccatggatcttatggtagaagcgagtccacggcgaatttttgcaaatgctcacacatatcatataaattccatttcagtaaatagtgatcatgaaacatatctttctgcagatgacctgagaattaatttatggcacttagaaatcacagatagaagctttagtatccttcctcagagggayactggcgtcttcccgagggtgctctttagatagtaatttctctcgtccctttatacacctgtatctcggagtctagtcttgtaaataccatcgctgcacagcagcctgtgatgtaagttctctgtgatttgaaatgtttgtccctaaaaatacaaatttctttctacctttgggaaaaagttatctgtataatgggaattacctgaagtccactgcctgcctggtttaatcagaggcagttttaaataggctacatttgaaaaaccaacattatgtgttcttttttttttttctaaatttgctaatgaataatagaaaatactggcttaggttagagcagtgtttaatcacccatctgagcagcagcttccagttagaacctgtgttcttctgtggctgtgcacagtctgggtggccccagccctcctcacatgggcccctttccagccagcagccgggagcatggggcttgcttcgtctgcagcctctccagggtccctgccgtcctccctctgctgtccagtggcttgagctggggttccatgtcgtatgttggttttcttagttgtttcagcttgaagggtgaaactgggmctgctagtctgaattggcccacagctgaattctgccctttcttatttttttcagttgaaggatttctgtataggatttctgttggatctgttctarctacacagaataagctcttcrtgtcaggaagagcagcatcttttggaatttggcggcattcttgtgttgtagttttgtgtggsagtgtgggattttgcacagatggtactagcttggttttcctatttatatgattaagtatgtactatcttgctattaagggctttctgtataacattaataatagcagcaagatgaaagcggtgttcgcttgtctgtgtctccccctgggccggggcgttgctgtagtctgagtgtgctcatcccaatccccttaccaggcgctcctttggaattcgggatgtgtaaccagccttcttaatagctaatcccttaaacctcactgcgtggattatttggcgtcctatttcgcgtgactgaatgtagactaattaacaaccagctgagctgagcactgtgccttaaccatgcactcccagacatcgtggacatcaagcctgctaacatggaggagctgaccgaagtcatcactgcagccgagttccacccgcaccagtgcaacgtgttcgtctacagcagtagcaaagggaccatccgcctgtgtgacatgcgctcctcggccctgtgcgacagacactccaagtgtaagtgcgtctgttgttgagatggagtctggctctgtcacccaggctgcggtgcagtgacacagtctcggctcacggcaagctccgcctcccgggttccagcaagtcttctgcctcggcctcccgagtagctgggaccacaggcaggtgccaccatgcccagctagtttttgtatttttagtacagacagggtttcaccatgttgaccagactggtctgacctcaggtgatccccctacctcggcctcccaaagtgctgggattacaggtgtgagtcaccgcacctggtcacgcctggcgtcttttaaagcatctcatttagagccacttgttcttcagacactccaaagacttagagagttcttcctgttccccaagtgcctttgcacaactggggagccctcctttgctggggccgtccgagtgtggctgtgtcagaggctgctgctaataagtggaactcgaggtcatgcttcccacaggcttatggctgtagggtgagtgtgcttttggcaccaccgagaagcggggtcacttctgcccagagcctgggtgtctcctcagaggctgccagcactgagtcccgccaagagccacccgttgcctctgcctctgtgcgtgagacctgggctgaggccgccagcacacaggaggccattcccagctgttggaatgagctcctgttcatgttgagcttggctggattggaagccacttcccttagctgaaagtctagcattttaatccagtgagctttcaagctccttttaggtgagggaggttctggttttgtttttatttttagccataaagaatgggcttgactttatagagcactgtagtcagcgtgtcccagtgtcctgaaacattgctgacccttcctccagtgccagcaggtagacacacgtccagtgacttcctctgatggggaagccgccagtcaatcccaccagactgagccgctgctcatgtgcagcggcgcccccagtgcctcggtggaatgtgcccacrgaccgtgtgcagcagccttttcgcctgttctctttcctgaggttgagtgtgtttttaagaattcgtatttctactagaattcctgcgatgaggatgagtgtttcgtagcatttggcctgtatcttaagcataaaattcttgagtaaataatttcagattccagttctatttgtcatcagagtgatttatttgagtaaatgcttggcgtcggcacagctggcttcaagttaatttcagatgctaagccgacaaacacaggctcctgcatcaagaaaaaagagaaaaaacctaaagcagcttcaggtcaaggaagcacaagccaggtgcagtggtgctcacctgtggtcccagctaccctggaggttgaggcgggaggatctttctgaaaataggaatccagttttgtcacagtagagcttgtgtatattcagtattggagacaaaccttggctggctggctttgaccggcgggaccgtcttggtggttaaaatcaggaccacagcgttgccagtcaaggtggtcactcctgcagacccacaaactgtcgaccctccaaaaagcaggcagtttgcttagaggcacagaccgctgtgtctgcatgaccatataatgctgtttgtgtcttcctgtgatgtgtatgcgatagaatttcacgtgctcgggcctggtgccatgaggacgcggagacactcctacaggaatgcggtggtgctgaacctgggcacacatcaggatgccccgaggagctcccacagatggcagtgcccaggaccttgcctagagattctcattcagggtccgggtgagacttgggcgtctacgcttctcatgcccatcccttgtccatagctggtgctagaatgtcttatccgaagctcttgcccacggaagtcacagaagatcagaaaacctagagaatcagaaagatcagaagacctagtgttgaggccaagcccttccagagtctctctgaaggggccacttcctacttgaacttgaaaatgatttgttctctgatttttaaacagaagctgaaaacattttattttgtttttcagtttttgaagagcctgaagatcccagcagtaggtccttcttctcagaaataatttcatccatatccgatgtaaaattcagtcatagkgggcggtacatgatgaccagagactacctgtcggtgaaggtgtgggacctcaacatggagagcaggccggtggagacccaccaggtccacgagtacctgcgcagcaagctctgctctctctatgagaacgactgcatctttgacaagtttgagtgttgctggaacrgttcggataggtaaggcctgcgtggagatgagctgtcgccccaagcttgctggtttccgagagtgcaaggtcagtgagggaggcgagctgtcctccagcgtcagaggaggacgctcatagggtgttgttttccagaccttttgattgatggatgatagtatcaaggtagagaaaataggatctctgagcaagtttctcacctagcttgtcattccatttatatttagacaagaagtatagcactaggtacaggccggctatgtgttaaatgcttagtgaatgatagtgtattactttttattatgctgataatgagtgaaaaggaaggaagtggggaagtgattcacctcactggaatgaccgcgttgcagtctgcctttccttctggagagaagtagatgaaaacaccccagagccactgcctgtcatgcccagacacagcgtggtcatggctggtctgaaacaccaatgtaatttataatgtgatggttctagtaccttgataatttattttgtatacattctttaaagatagctatgattagtgtggttgagagttacgttttttttattatgcaaaaagttacgtttcagatgatggaagattgtcttgcaccatttttatatagaatttttgttcagaattcaagagaacagaggagtctattggcaataagtgattgactggatattctgcaaaaccctctggcataaacacctagaaatgctggatatgatacagcaggtgtctcttcaggtgcatagttgagctcacagataagcaagggaaatctcacaacggccagaaactaagagggagctgaaaccagaatggcagcctctgaaggcgtctattccgagagcagccttgcagccccggctggcctcaggagcatcagcccatagcaggaaccactgcccctgtgaacagcaggttatggtgcaaagctgaagccttgtcccacacgaggtgacttgctcatggtggcttttcctgtatgtgcttggtaattttcaagagctgaagccttggcccacacgaggtgtagagttggaacagggacccctgaagatggtgtctccctccactggcagatagggtccaaagggcagtttgtctgtctgaggccttgcatgggggtggccagcactgccctgagaagtggaagcaaaacctcccctcacaagggtttgcagtttgggtttgtgccagctacatcatgatctgtaaaatctcacactgtggagctcctgcctccacgagggctgtgtgcgggcatcgggagggaccggcgtgtttccagatctggcttctactctgtttgcagactgacctgccagcctgtagcatctcacrgatgttgactgaagacatgaggttcccgggttctcatggcacagctggcagcatgagcctctcgttggcctgggttccccacgggtggacacttgaggccgtggctgatgcacactgagcttggagaaccccactgctttcacagcgggcagtaaacacacctgcactttgactagaagagacatgacctcattcctcaaggccgcttgctggaagcacagccctgagaagtggcccaggtggagagaatggcattggcaaactccgtgagaacacgcatgctgggtagctgctgccagcacacccaggtctctctggatttcgtcacattaaaatcatctaaacatgagctcacaggtgaaaattaccaagcacatacaggaaaagccaccgtgagcaagtcagcagaaccacagcagaactgaacctccgagaaggcagctgttgagatcctaagttaaagaagataaactaagaatgcttgagatattcacagactagaggaaggaaacagcctgaaccaggagccacatgaccgctaaacgtgacctggagactggaaaggaatcagagggaacatctagaaatgacaagtatgatacatgaccgccaaacatgacgtggagactggaaaggagtcagagaacatctagaaatgacaagtatgatacatgaccgccaaacatgacgtggagactggaaaggagtcagagaacatctagaaatgacaagtatgatacatgaccgccaaacatgacgtggagactggaaaggagtcagagaacatctagaaatgacaagtatgatacatgaccgccaaacatgacgtggagactggaaaggagtcagagaacatctagaaatgacaagtatgatacatgaccgccaaacatgacgtggagactggaaaggagtcagagaacatctagaaatgacaagtatgacagatgaaactgtgtgggtttagcagcaggtccattttggctaaacagatcttgtattagtggatggaaaggaaaaccagaagaaatgcgggctaaagagccaaacagaaaacaagagacactaggaaccgtggaggccagggtgaggcacagcacacgtttaaacaaagtttgggggtgtgaggcttaaagtgacagtggccagcaattttctctaaattatgaaagcctgaatacacaggatcgggagcacagcatccatccatctcataatgaaattgcaggacaccaaacgcaaagagaatatcttaaatgcacccaaggaaaaaacgcaaattacctctgagagcggacaccgagactgagactcggctttgccacggccacagtgggagccagaagccgtgtgacagatccagcaagtgtgactccttactctccaccgccagcttagaatcaagccttgaagtagatgctygttcaagaatctgcttgtgataaaggcattttcaaatgggaaacaatgtatcacaacaggaaactcagtagagcgagctgtaaagggagcctggccctgcagaaaggggctgagacagataggcagaggaacgcagcctgcagggaagagcagtgcaaactctgaagctctgccacctggacggccttagttatctgtgtttgggggagaaaaattagagccctcaccagccccacacaataaataaataagctctgagtgtttctaagcctaagacatctttgtgagctctggaaacaagggcttctttaagaaggccccaaaagcccaaggaaaacattaagaaattcaactacattaaattttaaacttctttatattgaaattaaaagtgaaaacaaaatccacaaaaggataacgaacagagattaagtatcccagaataggtgcagaattagttgtcaacaagaaggtggcaaacaactcagaaaagagcaaaaaccatgaatggggtttcgcagaaatggaaaaataaatagaaatgctcatccttcttagtgatcagcaagtaaagccagagggacgtcctttcatgcccatcagaatgatgatgggtttgggggagagggtggagaccagtggtcttacccagtacccttcttgtgacctccttggtgacattcagtcgggttgggagcttcttgcatgttcagacaagaaaacgtgctcagatacctgaaatagcaaacaactggagacagcccacaggtgcatcattagaggaatggacaggtaagttgttctctatcataacatatactgaaaagcagtgagaatcaattattagaactacatggatcacctaggtggatctcacaaagataatccacaaagaaaattcaggaggaatgcgtacggtgcaatgacatacaacatgtttaagacatacaagacggttttgttttaagaatctgtaactattggccaggcgcagtggctcacacctgtaatcccagcactttgggaggctgaggagggcggatcacgaggtcaggagttcgagagcagcctgaccaacatagtgaaaccccatctctactagaaatacaaaaattagccggacatggtggtgcatgcctttaatcccaccactcaggaggctgaggcaggagaatcgcttgaaccttggaggtggaggttgcagtaagctgagattgtgccactgcactccagcctgggcgatagagtgagactctgtctcaaaaaaaaacaaaaaaaatctgtatacaaaatataaatgtgtgtggggatgacacatatgtactctagcaagtgaggaccccaactggggatgggataggagaccatctttctttccagagtggcaacacagtgcaggggggtccctgtcttagcagtgacttgctggtgtgcagaggggtcactctcttagcagtgacttgygggtgtgcagggggttcaccaccttaccagtgacttgcagggggtccctgtcttaacagtgacttgcgggtgtgcaggggggttygctgtcttagcagtgacttgcgggtgtgcgggggggttcactgtcttagcagtgacttgcgggtgtgcagggggtttcactgtcttagcagtgacttgcgggtgtgcgggggggttcactgtcttagcagtgacttggggggtccctgtcttagcagtgacttgcgggtgtgcgggggttcactgtcttagtgacttgcgggtgtgcggggggttcactgtcttagtgatttgcatgtgtggggggggttcactgtcttagtgacttgcgggtgtgcgggggttcactgtcttagtgacttgcgggtgtgcgggggttcactgtcttagcagtgacttgtgggtgtgcgggggttcactgtcttagtgacttggtgtgcgggggggttcactgtcttagtgacttgtgggtgtgcggggggttcactgtcttagtgacttgcgggtgtgcggggggttcactagtgacttgcgggtgtgcggggggttcactagtgacttgcgggtgtgcgggggggttcattgtcttagtgacttgcgggtgtgcggggggttcactgtcttagtgacttgcgggtgtgcggggggttcactgtcttagtgacttgcgggtgtgcgggggggttcacttagtgacttkcgggtgtgwgggggttcactgtcttagcagtgacttgcgggtgtgtgtgggaggttcactgtcttagcagtgacttgcgggggttccctgtcttagcagtgacttgcaggtttgcgggggttcactgtcttagtgacttgtgggtgtgcgggggttcactgtcttagtgacttgcgggtgtgcggggggtttcactgtcttagcagtgacttgcggttgtgtgtgggggggttcactgtcttagcagtgacttgcgggggggtccctgtcttagcagtgacttgcaggtatgcgggggttcactrtcttagtgacttgcaggtgtgcgggggttcactgtcttagtgacttccagttgtgcggggggttcacttagcagtgacttgcgggtgtgtggggggttcactgtcttagtgacttgcggggggtccctgtcttagcagtgacttgcaggtgtgcgggggttcactgtcttagtgacttgtgggtgtgcggggggttcacttagtgacttgcaggtgtgcagggggtttcactgtcttagcagtgacttgtggttgtgtgtgtgggggtcactgtcttagcagtgacttgcgggtatgcgggggttcattgtcttagtgacttgcgggtgtgcaggggttcactgtcttagtgacttccaagtgtgcggggggttcactgtcttagcagtgacttgcgggtgtgtgggggggtcactgtcttagtgacttgctggtgtgcgggggttcactgtcttagtgacttgcgagtgtgcggggggttcactgtcttagcagtgacttgcgggtacatggatagtcactgtattttttattcctcttgatatatttcaaatattgcaaaatacccttagattacatatccccaagaacatctaaaagcgttcccagtaacatttgcttagtccattcactctcamaaacacgcccgtcttcctacctggaaacttctgttgagggatgcgatgaaggggagtgaggcgtttcagtgctgcctcagcccratcctgattctccgtgtggcagcgccttcttgtgttctaggtcgccccacagaaccagttatgtgcttacgcctgtgtctctgtctgtgctgttcccttcctgggccagcaccaggctgctgggcagcgcccttgtttgcagtgtggaaacacccactctggggctggcactatctgtcgagaatttaaaagtgatcataaatctgtatgaaagctgatgtgcttttcgttattaccatgcaccagcaattccagtcagtgtcggccatacatcatctgtcgtctgtgttctgaataatggttactgttgagttttaataacataaatgtaagcttcagattcacacattcttattacttaccctttcgtaaacattgtgttttatgtggaaactaatttggggaacccccagtcaatggccctcacgtgccaacttggctgcatacccctgttccaagaccacgtgcacagcttggcattgctggagggcgctgggcacaccttgtgtctcccgcctctgtggcgctgtgggctcctggatggaagcaggagatgggaaataaacatggatcgctgaatgcagtttctcttctctgagttcgtctttttttttttttttcccctgctttgaagttttagacaaggtcagtcagacactaggtatttgccagcagccagggtcagtgctgggccatggaagggaagcggcccgcttctttctcatggcaccttgaagacgcgccagcgtgaaaggcctctcaccgcgcatgaccatgggggcaggacgtgagggcgcgggttagtgtcaaaataggaagaggaggcgagcttcaaggacggctggagaaaccagaagggcattgtttgaacacatctttcatcagaaactggactcatgaagccatgggtcaaatcatggcagcgtttgcatcattcagctatttttctgtcatttttgtagaaaatgtaagattgcagaggtttttaccagtattatgaagttatatcatgaggatgtgtgcggtagtagaatttttcgacagcagagacatttgaaagccattacagttgatcttgaagaaacaaaagcatggacggtattgtattgtctggaatgtgtgtgaaatgcagttgttctaaaattctgccacactttgcccagtggatttttactatttctatccgttgcctcatttgaaagaaactttttgaaattaatagaaaagcagtttaactccaaagaaacattgacagatatgactagtaactgttgaacatgataaggattatgttcaggtcattatggatcattgacaaattgcagaacataaggcttaaaaataaactgtgctgttattcatgagtgagataaataggtggggttgtttcaaaaaatacactaatgttaaaagtgtgactccattattttgtttctcctgtgacatggattcttactgacatgattatagataaagctcggtacacattttcactgcatttctcttctgcccattgtgattgatcattcctgatttctgaaagtaactgggttgtgggggagggtggcgtgcgctgtgcaccccaggggtggggtctgagtccttgctgccgctccccycactgaggagtgctgctgtctgctcttgttttgaacagcgccatcatgaccgggtcctataacaacttcttcaggatgtttgatagagacacgcggagggatgtgaccctggaggcctcgagagagagcagcaaaccgcgcgccagcctcaaaccccggaaggtgtgtacggggggtaagcggaggaaagacgagatcagtgtggacagtctggacttcaacaagaagatcctgcacacagcctggcaccccgtggacaatgtcattgccgtggctgccaccaataacttgtacatattccaggacaaaatcaactagagacgcgaacgtgasgaccaagtcttgtcttgcatagttaagccggacatttttctgtcagagaaaaggcatcattgtccgctccattaagaacagtgacgcacctgctacttcccttcacagacacaggagaaagccgcctccgctggaggcccggtgtggttccgcctcggcgaggcgcgagacaggcgctgctgctcacgtggagacgctctcgaagcagagttgacggacactgctcccaaaaggtcattactcagaataaatgtatttatttcagtccgagccttcctttccaatttatagaccaaaaaattaacatccaagagaaaagttattgtcagataccgctctttctccaactttccctctttctctgcsatcacacttgggccttcactgcagcgtggtgtggccaccgtccgtgtcctctcggccttcctccgagtccaggtggactctgtggatgtgtggatgtggcccgagcaggctcaggcggccccactcacccacagcatccgccgccaccccttcgggtgtgagcgctcaataaaaacaacacactataaagtgtttttaaatccaaacagaagtattgtctttttatttaattttattgcatagaatgaagttatgcagggttcttctttggaactaactgtttgagaaatgtgtgtccttctttggcagcgtgggggtatgtgtgcagcatttctgtccccaagctgctgcccgctgtgtttctgtagaagtagcccatcggatacaccaggtaaggtctgggaaaagccagaaccgaggccacctctgagaaagaaaattgcaaggaagaaccaaaattgctgccatccagtaagcctggtttaaagtagcttcaaattcactacagttgaagaaatacgtgcttgctttctaaggcttttgaaaaagcactttggggaaagtatactttttaaacattgctaaaattacatgcatgctaaatttcatcctgcatttcaagccagcaaaattaagcaattttaattacacgatgccaccagtacgttggtttattttcaaagtaggatctttgataccagaaatcaagattttccaagacaaataatacagagctgtaccaatgctgagtgaccagagcttgcttccgtgggatttaacacacgcccactacgtgtccccgaggggagtggggagtcgggctcccgtgcccctgtggagatggaggtgtgtgctgatcccccgtccgcctgtggagatgaaggtgtgtgttgattcctcctgctgctgtggagatggaggtgtgtgctgatcgcccgtcaccctgtctagatgaaggtatgtgctgattgcctgtgcccctgtggagaaggaggtgtgtgctgatcccctgtgccctgtggagatggaggtgtgtgctgctccctcgtgcccctgtggagatggaggtgtgtgctgatcccccatcccatccccctgtctagatgaaggtgtgtgctgattcctcatgcccctgtctggatgaaggtgtgtgctgatcccccgtccccnnnnnnnnnnnnnnnnnnnnnnnnnnnnnnnnnnnnnnnnnnnnnnnnnnnnnnnnnnnnnnnnnnnnnnnnnnnnnnnnnnnnnnnnnnnnnnnnnnnnnnnnnnnnnnnnnnnnnnnnnnnnnnnnnnnnnnnnnnnnnnnnnnnnnnnnnnnnnnnnnnnnnnnnnnnnnnnnnnnnnnnnnnnnnnnnnnnnnnnnnntgtgtgctgatcccccgtgcccctgtgtagatgaaggtgcgtgctgatcccccatctccctgtggagatgaaggtgtgtgctgatccccatccccctgtggagatgaagggatatgctgatcccctgtcccactgtggagatgaaggggtgtgctgatcccccgtccccctgtggagatgaaggtgtgtgctgatcccccatctccctgtggagatgaaggggtgtgccaatcccccgcgcccctgtggagatggaggcgtgtgctgatccccatccccctgtggagatgaaggtgtgtgctgatcccccatccccatgtggagatgaaggggtgtgttgatcccctgtccccctgtggagatggtgtgtgctgatccccrtccccctgtggagatgaaggtgtgtgctgatcccccatctccctgtgaagatgaaggggtgtgctgatcccccgtgcccctgtggacatggaggcgtgtgctgatcccccgtccccctgtggagatgaaggtgtgtgctgatcccccatccccatgtggagatgaaggggtgtgttgatcccccgtccccctgtggagatgaaggtgtgtgctgatccccgtccccctgtggagatgaaggggtgtgctgatcccccatgccctgtggagatggaggtgtgtgctgatccctcgtgcccctgtggagatagaggtgtgtactgatcccctgttcccctatctagatgaaggtgtgtactgctgatcccccgtccccctgtggagatgaaggtgtgtgctgatcccccatccccctgtggagatgaaggggtgtgctgatcccccgtcttcctgtggagatgaaggtgtgtgctgattcctcatgcccctgtggagatggaggtgtgtgctgatcccccatccccctgtggggatgaaggtgtgtgctgatcccccatccccctgtggagatgaaggggtatgctgatcccccgtccccctgtggagatgaaggtgtgtgctgatcccccatccccctgtggagatgaaggggtatgctgatcccctgtccccctgtggggatgaaggtgtgtgctgatctcttgtccccctgtggagatggaggtgtgtgctgatcccccatccccctgtggagatgaagatgtgtgctgatcccccgtcctcctgtggagatgaaggtgtgtgctgcttcctcgtgcccctgtggagatggaggtgtgtgctggtcccccgtccccctgtggagatggaggtgtgtgctgatcccccgtccccctgtggagatggaggtgtgtgctgatcccccatccccctgtggagatgaaggcgtgtgctgatccgccatcccactgtggagatgaaggcgtgtgctgatcccccatccccctgtggagataaaggtgtgtgctgatcccccatccccctgtggagatgaaggcgtgtgctgatccgccatcccactgtggagatgaaggcgtgtgctgatcccccatccccctgtggagatgaaggcgtgtgctgatcccccatccccctgtggagatgaaggtgtgtgctgatcccccatccccctgtggagatgaaggtgtgtgctgatcccccgtccccctgtggagatgaaggtgtgtgctgatcccccgtccccctgtggagatgaaggcgtgtgctgatccgccgtccccctgtggagatgaaggcgtgtgctgatccgccatccccctgtggagatgaaggcgtgtgctcatcccccatccccctgtggagatgaaggcgtgtgctgatccgccatcccactgtggagatgaaggtgtgtgctgatcccccatccccctgtggagatgaaggcgtgtgctgatccccggtccccctgtggagatgaaggtgtgtgctgatcccccatccccctgtggagatgaaggtgtgtgctgattactaatccacatgggcaagaacaggatgtccgtcattaccctgaatcaatgctaacacagtgccacttgagttcacattaagttagaaattgagaatctaaaggtacctttattttaactaaaaaataatttatatactgtatattgattgtgacacaatttacaaagtctgaggtgtggaacagttatttaagcattagtcaaccctggtccttaagacagttctagtaaaatgggattgtatatatttgttcaactattttgaccaaaaagttcaataaattttaaatgtttaactggattttcactgcgtatttggacacccttttccatcttcctctagaatgtatttcccactaaatagcccacctcctccacccccagggcagagcagaaggtgcagcccaggcgggtcccgtgtgtagaggttccacgtggcactgctgctcccgtggaactgccactgccttgaggtctgcggcgcacgttccctggaggtgtcgtcacctagctctggggcgcctgcgggggaagccacctggccagcagtcctgtccgtttctgtgggttctccccagtgcagtcttgatgttctgagaggcgctggcaattccacgcacctatgtccgcaaaaagcaggatccattcactttagagaagtgccctcaacaggcgcggaggaagacgtgccctcaacaggtgcggagaaaacttctctttcctgcttaaagtagaacagtgtcatcagcttctgaaggttaatgctgagcacagttttcattgatgaggattctgggcccgtggttcaggtggaggtttgctgctctctgggctgatgacccggattccatgaacacactttcttcgtaagtggatttaacgtgccttttttgaaagaaaaatggagctcctatgaaccagtttatgatgccctcgtggacagactcagtctgattttggaggccacacgactggcaggtgtggctggagactgcagcatgtgcgtgtctgtctgtcctgtgtggagccaaatcatcaccatcagtgccagaagcctcccaaagcccagtgccatgggattggtgtgtgtcctgctcccggccggaagaagctggccctggatccgcctggcccggctgctctgcatcacccctttgcttgcttgggaggaagagtgggtctggggctgcggaggctctccgggtggccttaagcttgctttctcctaaacctgtgctgtgcgtccttggccagcggctttggcatcagccagggagtgggggagtgaggtcagagccagcaggagtccgggctgtgctgggtagcagaggtcgcatcttcccagagctgcaggcaaagggacaggatgggcttgctgtatgagggcgtggctctgctcgtcctgggctgggccaggggtgctgagtggggctgtagccgcatcttctgtggcgagctgtcctgtcgttgctgtgctgggatcgccaagggagagggacggaagctgtccgtgagctggtgagacagcaagccaggaatccagccacaggtggggagacaatgcagctcaaactggtggagctgcaagggcccacagaccaccttcagacgctgcccgcggccgacgcttccccaacccctgggagaggcctgggcctgggggcctggcgggccccgcgctcttcccttgggtcccgtcctccgagggggctgcctgccaaagccaagttcagcagtccccgacagtgggcttctctgcacaggtggtgtgcaggggtgggtggagtgtagaccagatgtgagtaaaggcagcacccccagccccacagggctgtcacagctcaggccctgcagagctgtggggtttggctgctgtgggtggcaacccctcctaagtgcctgctgcaggtgggcgctgggccagggctttccctacagccaccctggccatgggtcacagacgcacacaccacagcacccggctgggcactggggtgatactgggcttggctttgagctccgtgcctctgtgccccatacgcccctcagatctctggtgacagtgcggggctgcctacaggacacccagggctccttgatcttttaggaactgcggcacccccgaagctgtgacaggtgcagaggcgctgccgtcctgagccgggcctcaccttccgccttgtgtgctctggcaccagcacccagtcccaagggcacagcggctgcgacttgcctctggccagggcaggtggtggtgtcatacccaggacgggaacccacacttgatgtcctccagggtttttttttttttacattatcttaaggactgacagtctcctaccccatctgctcccatctgtccctaatttcatgcgcctccgcctgagttcctgcacgcatttcctgaataaacacacccctgtgccagtcagaacccgcgggggttttggaagtgagagcccagcaaggcagctggccagggggcggcactgccctccggggagcaccggtgcccgggactctgcttctgaggctggcctgtacgatgattttgtataaatatctccaatcagaacctttttagtgtatttcttaatataacagaaactggtgtcttaaaatacaagactagctgcccggtgatgacaccaaatcgagcagcggggctcgcagtggccaggatccccgacagtggaatgctgaggttagaactgaaaccgcgtttcgtgaagtcatcatcacgcacgggaaacaggtttggggtgaggggcggtccagtcctaagaaagctctccagctccacgcggtcaccttcactcactcaccagatgcagattgcaaagaggcgaaacctgtgatttctttaataatcacagtctccatctggtgagtggttaaagtcacgttccgt

SEQ ID NO: 95158 - DNA, 267846 bp, Homo sapiens
  misc_feature (1)...(267846): n = A,T,C or G
tccgtaaggcccagcgagatattaacctgtgaagaaatggagtggggggcatctcagaaagaatgatacacaattatcattctatactgctttttagtgtagtgcctttttgaatgagaaaatattacacatgatctgaatgaaggattgaatatcatcacttagttctggggagcgttaataaacagctccctaagactgtactaaaatatcacttttctattgcttatttaagcatactcgatgtattttcagattaaatcactttatatccagttgttacctcactgaaatattgacaaatatgcagttattaacttgaaattaaagctattcagaggagtagacagtgataaaaactcaacttgtcaagtataagaaactcagaggtatcaattaacaaaacacgagtgcagtcccaatgacagttttatccatagcagtatctcaatctcaaagtgtcaagaaattgttccctcatccccctttaattcctatggaagtttccaaagatttcactactgccaactacttatgccacctgatctttttttccccttgggctaactgtgacatatgcagtttccaacttcttactgttttttcaacaattatctatactccttttcattttcaaggtttttcttgctttcttttcttaaaagcactagttactacagaagagacatgaataaaccttagggaagttataacagttcaataagggtgaattgtccagcactctctcttttctgagtcatttttgtatttttgagagtggttgggcttcctcactgctctacacaaattgcaaatatcctgatgactttgatggcatggagcaacaacacaaatgaactggggccatttacgcttcagagggatttaaatgtacaaatacatatgagacacaacgaagggaatataaaataaaaatggtccctgtattctctttggctacattctaattggcacggggacaggaggagtggagggatactaacacacacacacacagagctatgatttggttaagaccatgtggatttgtgtaatacagtataaagtatgatgatacaaggccaggggtggtggctcaagtctgtaatcccagcaccttgggaggctgaggcgggtggatcacagggtcaggagttcgagaccagcctggccaacatggtgaaaccccgtctccactaaagatacaaaaaattagctgggcgtgggggcgcgtgcctgtaatcatagctactcgggaggctgatgcaggagagtcgcttgaacccgagaggcggagattgcaccactgcacttcatcccgggtgacaatgcgagacttcgtctcaaaaaaaaagtatgatgatacaatatgcaagggagaaattacatctaactttgcaagtctggaagtggaatgtgagttaagctttgcattctattgaaacatcttagttcagggagaaagagataaagaaacaaaggccaagagtaaattaatttgccttagtcagttattagaagttaaaactaaaaaatacatttcgttaaagtagtgtacttcccactaaattatacgtcatgagtatgaattcaataggcagagtttgagagaaaaaggctgtgtatgatggctgtctttgggaatatttggtggaatggtgtggctgtggctgatcacccagtagttttatttgatggtaagttaggatgttccatcctgtgggggtcacattcacaaaaaaatgagtaagttgattcctgcctcaaaaggtttcagtctggctgggcgcggtggctcacgcctgtaatcccagcactttgggaggctgaggcaggcagatcatgaggtcaagagatcaagaccatcctggccaacatggtgaaaccccgtctctactaaaaatacaaaaattagctgtgcgtggtggcgtgcacctgtaatcccagctacttgggaggctgaggcaggagactggcttgatcccgggaggcagaggttgcagtgagccgagatgatgccaccgcactccagcctggcaacagagcaagactccatatcaaaaaaaaaaaaaaaaaaaggtttcagtctaacatgtacttaccagctagagttgcacagctaccacaaatttttgaatcatatctaaggcagagtccaagcacatgtattttttaatctctcctcctcccaacaattttcatctacacacctccagttgggatcactgataatagagctctatgaaggtaactgaagctgattttaatagtttccaaacagatttcatacttccaggttttcagacctttgcttgtggattctctaattcattcatcaaacatttcacttatacatcaagtatagtactactctgtatatgtgtcactagagataaaacagtcaacaggaaagacagggtacttccctttgggagtgggtaggagaatgccaaagaacaagaaattattaaagaaaactatggaacgtatctcagagaataaatattgatcaccactggagcacacagaaagactcttaatccaaacttgagggatagcgaagctttgttggaggaagtgatttctctactaagaacagaaagagagtaagtagaagacagccatttttgttgtagggtaggagaaagggaggaaaggatgagacgctgggaagcggcttstaggtaatgaaaacaccatgctcaaaggtctggtgagggagaatacagtatgtgaaataagctaaacaagtgatgccaattctccacttgtacctttctgctctcctaatagaagtaaatgttggggaataagcctggatagacaaacaagtgcctccttaaggaacattgaggaagacagacttcaccttaaaaaacaataagcagccactgaagagttttaatcatgacagatttaaattttaggcagatcacttgatgcactgtagagattggaaatgaaataatgagatgggagactagttaaggaagctgttgtaattctaggcaaagatagtagcctgaatataaatactaactgtggaaacaaaattattaagtggactggcttagagatttttaaggctttaacgactaattgaattcagacagtgaaaggaaagaggatttaaaatgactatttttttttttttttttgagacagagtcctgctctgttacccagactggagtgcaatggtgcaatctcggctcagtgcaacctccgcctcctgggttcaagtgattctcctgcctcagcctcccgagtaggcatgcgccaccacgcccagctaatttttatatttttactagagacggggtttcaccgtgttggccagactagtcttgaactcctgacctcaggtgatttgcccacctcagcctcccaaagtgcactggaatgagccaccacaactggccaaaaatgactaatttttggcttgggcaattgggaagctgacaaaggcaaagccaaccatttagattctgaatacagccagggataattcaaacggtgaaccaagacgctgttatttctgaggagagagatgtttatggcctgagtgattaacaataagtggatggatttgagatacttaggaattaaaatcagtaagtttcagtaattccctggatatgatatatgtaaggaaaggagtcaaacatgacatccaaatttctagtttggattctgtgcacagtcactgtggtacgctgtttaattaattcctatcattattacatatggaattagttaattccataaatacctcctatcctggtatgcacactttgcaaagtgactctgtcattcctcccatgtagagatgaaatctatttctccatccctgaatgtgaactagtcttgtgacttgctttgagaaatatgtgatggaagtaatatatgtgatttccaaggcaaggctttagaaggcattgtagcttttgctcttttggagtgctgccctgagagtgccatgaaaagaagttggtctagccgactggaggatgagaggtcacacggaacagaaccaagtcctcgagctgacagcaccaactataaacagtggtaatcctggaacctttcggtttagctgacctactaggtcaacaaaaagcataaatgaggccaggggaaaaccaacataggtggagtagttctactccactgacccagaattatgagaaatcattgctgttttaagctactaggttttagggcggttacacagctatagacaactgacagtcaaagacagagggagatcaaaaaaagacaacctgaaatgttatctcgaacgacctaaagatgtgcaaaaacccttaaacagtagaaagtttagggagaggtgatccagtaattcctagcaccaaatgcctgaataacaagataattggaatgttaattacagaagttaagaatctaccttttggttaaagtagccaaagcaaacagccaggatgctttcaagctctttgagaaaggtaagtacaggtgttcatagaggactccggtgtagtcccttaacaccctcaaccttggataagtaaattaaaccaggtctccttattagagactacccgaagaattaagctaggataaaaaaacgtaaaagctttcagcactgtgcctaaaattttactattcacacagcagaacatggatatgagaagaaataagttaaaagtacacttttcccattcaaaggtcacccatctattctgccaatagagaaaaatgaaataaaaaacgctgccttaaagaagacaacgaacatcatttaaaaaactaacttcaaaaatgaattatactttggtatagataactccttttactccaacaacattgtttaaaagcacaaatcgcactcaagcgcagccagccgtatatgaatagcagaggagaacggaagttaagagactaacagaagtagtgaaaatgagagagcacgcgcgcgagagaggtaaacacaaactgttcgcctggaccaacgacttgaagacttgcctctaagagttggaagtctcgtcatgagtctcttgcatttctgtccatttaaaaacaacctccacttcttgccaagctttattattcccccctcccacctggtgtggtttacagattgtttttagcaagagccgtataagagaagctacgtacccaagacaatctgaaatcaagagaaaactgctgctagaaacccaaggcggggaaggagaaggatcaaccgagaaattaagccacgttgcattctggccgcagcagtcattaaggaagcgcagtcctccccacccttttcaaccaggaccgaatgttgcgtctttctcagctgcaatcactcctactctccctgtggcagctgcgaaggtgatctacactcaccgcttgaagcacagtcgccaacaacaaccgtagcccaaacgccggcaccagacacccacycggcccagccgccatcgctaccattttccgcaggtttctggctgcctagaaggacccctaagctaggggcgtccactccagagcctgatccaaaacagaacgctaacggccgttgcccttacatctctcatttggaagtgacaggtattaaataacggcatatgaaagcttaaaagtcatcaaatacaatcactgggtgctttcgattacccaaatcaggcacttgcctaaactccccacttctttacttctgcggtctcctttcttttattcacgacacttcgtcaagcagccaagaagccacgccttcgccagttttagccccgccttcttctccaagtttacccaattgaatgtcgtcttgattgagctctgtggcagaggaaaccaaccgtaaaccgaaccaagagcgaagcgcaggggctcttccgtccaataagcggacccgaacggggggaggggcggggcttctggttgccgagcagcgtacgcggatgcgtgcgcgtggtggcggagggggatgggcgggggcggggatgagggcggcgcagccgcagcgccggtggaggggcgcgcggccgcgagcaaaggagggagggaaggaaggaagagagggaggcgggcaagcaggcgggcgcgggggtcggggactgaggcagtagagggaggcgagagcccggcagccgcttcgcgctgtttgctgcgcgggcttttggagggggcggccgtttagtcggctgaggagaagcggacaccagcggcgttggtgatagcgcctgggggagggggactggagaggcgagaaggggggtcgctgcggtggttctctcgctgtcgctctctctttgcctcgctcccggytcggcgggctcctcccggcgtctctctcgcctccggggycccgctccccgccccccgcggtatgtcttgatcccgagcagcgggtttcatggggctcctcaggattatgatgccgcccaagttgcagctgctggcggtggtggccttcgcggtggcgatgctcttcttggaaaaccagatccagaaactggaggagtcccgctcgaagctaggtgaggarctgaactgccccgggctgagtgctgtggaaggggccgaggaggcgctgccgccggagcaagtgggcgttcatctaacctggggtctggctcgggggctgaaagcggtttcaaagagaaccgggaacaaggggcagcgagagcacgagctccaagaatgggttgaattaagcttgagcggcgtgctgggctcgcgaggtcacggggcagaggttgcaaggttgggcttccctagccaaagggtagccccgaagtaggcattccgcggagagagagcgagagagaagaccgaactcagtggggagcgtgtgttgctggtctccggagacagaagcgcttagcatcgcgygttctcttggaagtcgtacaggaagccctggcaatgtcagatgaggggtattctaatttgagctatgggcatctggatacgaattcttttgggggctcatgaagggataggtgcgcagaaatgggaggagatgctgggatgacggagagcaacatgtgaacactgtagcgagttgcactcttgtgctccgggcagcaaaggaccttgtaattgccagctgagggaggctggccgggtagtgcgggaacgcgagtgmaaagcttcatcggagtacggaaatgagggtccggagatttaaattcttctttagtggcgctaaactgatgaattggggcttgagaatagggatgcctatgtatgttgcttcacggcagtgttgatgtgaatttcgaagaggagggaacgctgaaggggaattatgtagtgaagtttgtgtttgttaaaggaaaagtaggattatgcggaaagctaaccatatggttaaataccttaaagggttaacaggtgctttaatggatgagggggtctaaagtacaaaaagttggtgtgaagttgtgaaagacaggccagaaaaaagcacagataataggtactttcggattaatagggcactttggcatttggaagagctcagcatggagagcgagagttaaaagaatgacagtgataaattttgatttaaaaatgtacatggcacttaaaaatcagctcaagaggatgtaatttgaatatggaaaagtaatgtgaagtgttttttgcatactctcacctcaaaatcattttaaataccttttgagaagccagcaaaaacaaaaacaaaaaaccctcagcagtgtaatttagactaagaaatagatgttactgtgagtggatgattaatttttaggaaaaatgtaccagaaaataattgtaatattatgtatagtagctattttggtacaaggctttgcaaaagccttgacattttaaagagccttgaaagaaaaaccatcaagtaaatctgagtgaagtgcaactaaagttggaggaaaactagagttacttccagccctcaattctagagtaaaatttgaagagatactcagtttatttacgaattcctttattaatatgtatcttgtgtggtggaaaaaaatgtccactttaaatattgaaggttatccagtctggtttttcttttcttttggatccatttagcgacattcagggtcatattctggcgttattaatgatccagctctacagaaaaaaagactcctcttgaagtggaaagttatattaaaattaaaatttgtacttattttttgttttgttactatttggaattgtctggagttgatttcttagacacgttacagtgggttagaatgacttaaatttttgattttcctcctttcctaacatttctttccccatatacttgaaaattgcttccatagacacaatctgaatgatttttaaaagaaagttatctgaagatgtataatgccacagttaaaatataaagtgctttcttgtgatacaagaaagaaaatttcataaaaagtagtaaatatgcatcaaaatcctcctgggactacagatgggtatacctgggagtacaggtgggtgttaccatgcctagcagaggaaaccatattttgacaaccatattctgtactaggcacttttcatcgtagatactcgtgtttaaagtaagaacaccatttaaagccatttttgaccagacacggtggctcacgcctgtaatcccagcactttgggaggccgaggccggcggatcatttgaggtcaggagttcgagaccagcctcgccaacatggtgaaaccctatctctactaaaaatacaaaaattagtcgggcggggtggcgggcgcctgtaatcccacctactcaggaggctaaggcatgagaaccgcttgaacctgggaggcagagattgcagtaagccaagatcacaccactgcactccagcctgggcaatagagtgagactcagtctcaaaaaaaaaaaaaaccaaagaacaacagaaagccatttttgcagatgcaggaacaggcttagagaggttatataacttgcccaagaccacatcrcatttaagtggcagagccaggattgcaacccaggtatgtatgattccaaatcaagtgctcctttaattatgtccggctgcttaagactttatattgacattacgctgagatttaggtatttgaatagagttttaaaattgtaatatcagtgtttaattgcatttattgctaagaatgaatatcattcagagaaaattgaatttctgatacaaaggaattggtttaatgtaacgtctgccccttgtttagattcatgtaatgaacataattatgttacccaatgaaacaactgaattagatagcttatttttactataggaaagaaaaatctagctgttttccatacgtgcaaaatcacaatgttaaaaaagcatttttattttggcataaaaaacctattaaacattttgtccttaaaagtagttattatcattttcattgtagaagattccaaaggatagtattgtctgatagtggctttaatataccttgatttgagagtacagtattttgatggtgagacttctaatagagcaatagatgtattcaaaactgaggtgtactcattgactacttgggaaattcactaattaggaattcctaaaaaaaaaaattcagtaatacagctttttatttttattttttaaaaaacaaatatggcattgtagtccacatattacaatgcggcttgctttttttgccttgaatgttatacacatctttccaggtcagtacatatagatgtgacttactcattctattaataatagctgtataatattccaaagtatgcatgtatcataaattattaagccattattctagtaacggacattcagtttgtcccccatctgtcgtgtgtgtgcgtgtgtatatatacatatatatataatttttttgagtgtttcttttctttcttggtattataaacaattataggaaacatccttatgtgtccgtttaactcatgttgatgtcattttgtgctaggatgaattctgtatgtgagattgctgggacaaagaatatacatattttataatttaacagatttaaaaatctacttttcaacatttttttgtttttcaaaagatgtagtaatctacactgccagcacacattcattagcactagaagataatcagcttttaatttttgccagtgtgaagctgtgaaatgatatattcaattaatttaccttctaatttctaggtaggttgaacatctttacatgtttattgcccttttatttgttacttttttctatttttctattgggtggtttacttttttttttaaatattagaattagtaatcctttatctrtcctatgtcttttttaaattttttttatttttatttatttatttatttatttatttttttgagatgagccttgctgtcacccaggctggagtgcagtggcacgatttcggctcactcctgcctcagcctcccaagtagcggggattgcaggtacgtgccaccacgcccaggtaatttttgtatttttagtagagacagggtttcaccatgttggccaggctggtcttgaactcctgacctcaagtgatctgcccccctctgccttccaaaatgctgggattacaggcatgagccactgcacccggcctcttatttgtttttgtccaagtttgccatttgtttcttgactttatggtgtgttttgctcatatagaagttttaaaatacacacagttaaatctatcaatttagggaagtcgttttcatattttgcttaggaagacttacccagagccaggattgtgtacattttctgtattttattatagtattttatagtttattacatttggctctttaaaccatttgtatgtttacagagatttatcatgattttctcagtaaatcattttttccaactgtatgttaacattccttcttttaatcacatactaagttttcatatgttcttggatcaattttggatgctattttccattaatcagagattctttaaacctcggggacccataaataggcttcaaggtatcagtgaattccctgaaattatatacataactttcatcagatttgcaaaggagtatgtgattcctttaatggcaaggatcacagatttatagtagatgtttcatatttagtggacttttttttgtttttagtaacataacgtgcagattgtgagttaaatttaggagataagcttattacctgtgaaaaagagaagtttttcaacttcaaatgaagttaatacttcattgtattaaaatgtagacttaattttctagtgagaaatggaaaaggacagggaatccaaatgaaaactatttaactgtgactcgttactataaaatgtcagaatttgtggctggtaaaaagtagttcttcccgaatttcaagagcgcacttgttgctaatattgactggtcgaacagtgcagtgaaatattttctcacataagtgatagaactatgtgcttggtaactttattttctatagggttttagcattgtaaataatatttgttgactgtattcttacatctctatatggatttatgagcacattaggaataatcttttacatggggaaaataattgagaatggattatgtaatcatccattggtgagaattaatgttagtcattatgttcttaaaactctactagactaaacaactaattccagggccaaggttgagactgctttttggaatttggtagtttttacaagtaagttcctgaaaccatgcagcaatacctgtaagatgttccagagaatgctagatttcctcacttctgaaatcatttggaaaacctcatagtagctactgttttgaggactttgggttaataggaatacagttattctagaattggtaattggtgcctcacttagtcttgaataggatgtctagtgccatggagtagtcacctgaaatagttgatctcaattaagataattccaggatgtctgtccaccactctggtaggccttctaatagctttttggcacttagagaaattgaaataataatgaatgttcaaagattgctctccagaagaccatttttgaaggatgtacttatagatgaacttcataatcatggttcactatagcctagttatttttaagatctacccacctaccagtacctgtacttacgtattctgcctttctgcctgttaacaatagatggtaactgtcagtgctcctgttcggtcatttgtgcacctgattctgttgcctcacttacctaaagacatggttcccgaagctttccctcattctcctgtcacaatgtattcttgaaaattgctaagagagtggattttaagtgttttcaccataccaaaaaaaaaagtatgtgaggtaatgcatgttgtcttaattagcttgatttagccatccatgatatatacatgttttaaaacatgttgtacatgataaatatatacagttttgtcaattacaaataaaaaaaaactatcttggtaaatgttccaggtgaacgtgaaaaatatgtattctgttgttattggctgaagtatgctgtagatgtcggttggtagtattgttatggtgttttgtattcttgatttttttctgcctcttcatcagttatggagaggggttttgaaatctttgataattgtggatttgtctgtttttcttgtagttatgtcactttttgcttcatgtattttgaagtgctgtgattaagtatatgcacatttaggctgtcatgtcttcttgatggaccaacccttttttttatacaagataccatctttatccttggtaatattctttgctctgaaacctactgctgtggtgttaatgtctcccccaaaattcacatgttggaaacttaatctccgatgcaacagtattggggcgggaggtggagggtgtttaggtgatgagggctctcccctcataactgtattaatactgttataaaagagcttgtggcagtgtgttctcttttttctacgtaagaagacagcatttgtcccccttttgccatttctacccccaaccatgtgaggatgccacaagaagtccctcaacagatgctggtgtcttgattttggacttctcagtttccagaactgtgaagaaatacatttctgttttctataaattacccagtctcaggtattttgttatagtaccacacaatggactatgatacttactttgtctaatactaatacagacacttcagttttcttttgattagtgtcaggtggtatatcttttcccatcctgttaatattaacctacttgtgtatttatatttaaagtggatttttggtagacagcatctaatctttcatctaatttcacaatctcttttgttaatggaatgtttagaacacttaatgtgattattgatgtggttgggtttaaattcgtgagttgctatttgttttctgtttatcttaactgttctgtgattcctttttttctgttgtctttaggattaaaggggtatttttaaattccattttttaatttgatgacttactagcagtgctctttgttgttgttktttttttaagtggttgcttaagggyttatggtatacatgatagaatttcatgtgtagtataagaaccttaatatattaccacttttttctgggttcttgctatcgtcattatacattttacttctatacatgagtcctacaatacattattatttttgctttaacttatattttaaaaatatataaaatgtttaaaaattttttaaaaatttgctgacatatttaccattcccagtgttcttcattttgtgtgtgtgtgtgtgtgtgtgtgtgtatgcagattttcatgtggtaccatttttttcactctgaagaatttcttttaacattacttacacttaaaaatatactggtgatgaattcttttcattttgtgtgtctgaaaaagtctttatttgctatagtgtttgaaggatatttttgttgggtatagaattctaagctgacatttttgttgtttcagtactttaaagatattgcttcattgtcttctggcttgcattgtttctgatgagaaggttgccatcattctttgttcaactatatgtagcgtgtcttttatttttcctcttttgcctacttttaagagtttcactaggtttttaattatttaattattaaattatgtttcttgtgcccttgtattatgtttcttgtgcctggggtttgttgagcttcttggatctgtgagtttacagttttyattacatttaaacatttttggctattatttcttcacgttagtttttctatgctgcttctcctctcaggaactcaaaatacacttacattagaccacatgaaattgttctacagttcagtgatgttctattcatcattctcagtctttttgtgtgtgtgtgtgttgttttagatagtttttactgctaggtctttaattcaccaatccttctgcagtatgtaatccacttttaatattacccagtttattttttatctcaggcgttgcctcccactcctccccctgcccttctagaagtttaatataggtctttaaaaaattatgtatcatttctttccttaacatcctgtattagcccgttttgacgccctgagactgagtaacttacaaaagaaagaggcttaattggacttacagttcacatggctggggaagcctcacaactgtggcagaaggcaaggagaagcaagtcacatcttatggtggcaggcaaaaaatgagaaagcttatgcaggggaacgccttttttttttttttttgagacagagtcttactctgtcacccaggctggagtgcagtggcgcaatctcggctcactgcaagctccgcctcttgggttcacgccattctcctgcctcagcctcccgagtagctgggactacaggtgcctgccaccacgcctggccaatattttgtatttttagtagagatggggtttcactgtgttagccaggctggtcttgatctcctgacctcatgatccacccaccttggcctcccaaagtgctgggattacaggtgtgagccacttcgcctggcgggaatgcctctttttaaaaccatcagatattttgagacttattcactatcatgggaacagcatgggaaagacttgcccccatgattcagttacctcccaccaggtccctcccacaacacaggggaattcaagatgggatttgtgtggggacacagccaatccatatcattccacccctggcccctcccaaatctcatgtcctcacatttcaaaaccaatcatgccttcccacagtcccccaaagtcttaactcatttcaacattaactcaaaagtccacagtccaaagtctcatctgagacaaggcaagtcccttctgcctatgagcctgtaaaatcaaaagcaagttagttacttcctagatacattgggtaaatacagccattccaagtgggagaaattggccaaaacaaaggtgttacaggccccatgcaagtctgaaatccagcggggcagtgaaatcttaaaccttcaaaatgatatcctttgactccatgtctcacatccaggtcacactgatgcaagagttgggctcccatggccttgggcagctccacccctttggctttgcatgatatagcccccmactcctggctactttcacaggctggcattgagtgtctgtggcttttccaggtgcacggtgcaaactgtcagtggatctaccattctgaggtctagagaacagtggccctcttctcacagcgccactaggtggtgccccagtagggaatctgtgtgggggctgcaaccccacatttcccttccacactgccctagcagaggttctccatgagggccccgccccacagcaaacttctgcttgggtatccaggtgtttccatacatcttctgaaatctaggctgaggttctcaaacctcagttcttgacttctgtgcactcgcaggctcaacaccatgtggaagctgccaaggcttggggattgcaccctctgaaggcatggcccgagctctacgttggcccttttcagccatggcaggaggtctgggacaaagggtgccaagtccctaggttgcacatagcacggggaccctgggcctggcccacgaaaccattttttccttctaaacctctgggcctgtgatgggggggcactgacatggagacctctgacatgccttggagacattttccccattgtctaggggattaacattcagctccttgttacttatgcaatttcttcagtgggcttggatttctcctgagaaaatgaaattttcttttctattgcattgtcagtcttaaaattttcctaactttgatgctctgtttcccttttaaaattgaatgcctttaatggcacccaagtcatctcttgaatgctttgctgcttagaaatttctttcaccagaaaccctaaatcatctctctcaagttcaaagttccacagatctctagggcaggggcaaaatgctgccagtctcttttctaaaacataacaagagccacctttgctccagttcccaacaaattccttgtctccatctgagaccaccttagactggaccttattgttcatatcactatcagcaattcagcaagtctctaggaagttcccaaactttcccacattttcctgtcttgttctgagccctcaaaactgttctaacctctgcctattacccagtcccaaagtagcttccacatttttgggtatcttttcagcaatgccccactctatgataccagtttactgttttagtccgttttcatgctgctgataaagacatgcccaagacaacaattaactaaaagacgtttaatagttctacatggctggggaaacctcacaatcatggtggaaagcaaggaggggtaagtcacatcttatgtggatggtggcaggcaaaaaatgagaaagcttgttcaggggaacgcctctttttaaaaccatcagatctcatgagacttattcactatcatgagaacagaatgggaaagacttgcccccatgattcaattacctcctaccagttccctcctgcaacacatgtgaattcaacatgagatttgggtggggacacagccaaaccatatcacatgcttttcctaattttttttgaacaagtggaatattgttataataactctttctggtgctgttgtctactaattctatcatctgggtcatttcttggttgctttctattgatttgcttttctctacattatgggccatattttcttctttacgtgtctggtaatttttaactggatggcagacattattttaccttgctaggtcctggatatttccatattcctataaatactttcaaactttgttttgggacatacttaagttatccagagacagttttgtctttttgaggcttgcttttaagtttgtttgatggcaccacaaagcctttagcctaggactaattttgctccattactggcagtcccttgtagtgcccttcagagtattccacccagtgccctgtgtattacaaggttttgccactttggctgaagggaacactggttgagtgaattcccaaaattgttccacctgcccattttgaatggttcttttttggcctcagtttcttaacacatatacactgagaggtactctgctgaaaattctgtttttagctctgtcctcttcagtgcactgcccggcaaacttcagccgccttgtctttcctaaaaccttgattctcgctccttaattcaaggagaatgttggatccctgaattagactgagttctctctccctgtgctatagcctagaaactctctcaggcagtcataagactcacttcatttcctttttctcaggaatcctcatactatgctgatttcctgtttaatgtccaaagtctgaaaattgctgttctctattttatcattttgttttgttgtttcaggtaagagggtaaattcagtctcttttacttcatcttggctaggggtagaaactgggtgaatctttgattgtgtgtccccaagttgactgaggggaaagtagtgaagttggatcatttgaattatacttagtaattaaaactaatattgtaaattcagggaaagaatcatggttttattatgtctcttgatttcttcataatctctagcatggtattgagcacaggccttagcaagttgttaactgaaagttaggcgagacttatccatgatagtcccaccttcctccttccttatagaagtttcaagcgtatgttagttaattctttgaagtgttatcaattttattctgattttaagaaaccaggccttttgtatccctttagatacagctgagtctaagaggaagactctttcagactggctgatgaaccatctggctccagaagaggtttttgcttttcctgttagtatggttcttgagctaactggtcacattcttgctgggtgtggctggataaatagttctgttcagaggcttctttcctgtattccttccagaatacctttataccaagctaagtaatggggaagagaatcagagggatggtagtgctaatagtagttatattcaatatgttgcatgtatagaaaatgcatatagtttgccctatggtgaatattatcattatagtcctcagatcttcaacgtggcatggcacaattcttgctaaaggtagttaggttgtgctgaacctgtgagtactctaaagtgtcaaggagaagtcttttaaattgtaactcttggcttctcctgtgggaaggtagtgatttgaaaatggtgaattgatttgctgcttatatagcaacttaaaactggatttagagggaaagtaatgtccactttcctaaattccagcacaagttaggaataatccattagtatcaccttatgtttttccattatttatttttaaattcgtgacatagctagaaataagtgatttgtacaggtaagcactcagaaatgactataaagagtgatcagatgatgtcagttgggaaaggagagttgtgttgaaaacccttcgatttttgcttggtatggttaaggatttgaggttaagtggctatgcaagtgcagactaactcttggcatatttatttctaattacaaactacttttgagttgggcttaatgaatgtaatttagagatgttattggttcattgataagcttctgctatgtagtccctgtatgctgtgaagcaaaacactataggaaatgggctaatcaaactagttttatttttttctgctgcttaagttggtagtctgagtctccatagcttgtcttcagacaatgaattgtacatcaaatactctgttactatcatgctttcaaaataatgctttattacagtatgtctttgttaatagtaacttaaaaattgaaatctttagaagaaactaactgcgcagcataaacattcaaactaaaatcttgctgcaaacctgaatttttatagtgtattcagtagagttgtaaattctgccctatttttgttctaagactttgatgattagggctatctgcgtctttcagtttctaaggtgtgatgtaaaaggacattatcktaagttttcagtgataaaaaatatactattttaaatataggcaggaatattagagctttgagtgaaattgaattactggattaaaatcaataaaatccttcttcaaccttgcatttgattaacttgttcaaattttgtccatgacaaactgaaactggctcaggagtgaggtttgacactaagattcttgaactatatttagatttgatctgtatttaagattcttgatttatattctgtatttgggtgttaagaaagtgcctccaattgccagtatttttatttcaacacagtcttattgcttttcaacacacccacctcttattaactgttggatgttcccagaatgttatacacctctggcagaaaaactcagttgtttcctctatagaaaggctgattagaaagactggcttaacatgattttaatgtattttaatagatagtttctgcatttttaaaaataaaatagaagaaaacattcatcattgtcttctaggacataaatttcttattttccttcctactttgaaggttaaaacaaaaaagcaaacaaagttgtgtgatgatattttagtgtcttgaaatggatttctcagccattaaaataagggatatgtatgacttttgcacctcacctgggatttgtcagtgatactctctgacttgatatgtaccttttcaggtttgtcttatagataagatgccatcgtgtgccctttttcttttaccctaggttggaactttgtgtttaattagtaagccatcatgacctctgaaccttcatttagacaataactaacagttatggagtacttactgtgtgtttataagtgttttatgtgtatagtttcatttaatgtaaatgatacttgtttttgctttcttcagagaattgctgtgaagttaaatgatgttcaaatgagataatgaatgtttgtacaaacactgtagttataaattgttattaataatgacaataatatctaactactttctctttgccattgttgtctttaaggtttaatatagtctacagcctacattttttggtgctgtagtttttcccagtgcctcatctcataggatgacacttgtctgataagtcctcagataaatcacatgatgttacatgagttatagatttgacattcagattagctttttattctttccttccctaggaagaagtaataatcactggcaattcatattgttatttgcctccttaaagtagaaatctatttgttttcatataaattctagaaaagctatggctttttgatgttactggactctcttcactctttcctattaatacctgtgaaattgacaatttaaagatagatttataaaatgcaaattaaatttaaattgtgatggagtttttgcatgtgtatatgtatgtgtttatgtgcgtatacatatataaaataactctttggcctctaaatttttaaaggattaatgatagtcaaattaatgaaagaagaaagaacctaagcctatttctccattttagaaaaagttttgtgtgatagttgctttattatattgtcagttttcccatggtgattcattgtcatatctcaaatagaggaatatgttctgtatcctttatttaaattaggaaagttcagtttttcttacctttttcactcaaatacagaacagtataggctgtacattaatatttattgccaagattttgaggatgactttagaaaagacaaaattcttgaatcttacacagcttcaaacactattaactcaggtaaatagttacttgccattctacaatcagaaattttggtagactgaaatggtggactatgagaggtaaactgtgttgtgatcacctcttttatcatatatattgctgctactttttttcaggaattatagcattattcttaagtacaggtcagccttactgttgaatttaacatgtagctgttgtgtacaatttgaagagtagagcagtgatttcatttgcgtattataatgttttatgtttatggatatctttaaaatttttcctaattagcagtgaaaacattttgaaagaaatgctggatttgttggaagctcagcttgcattttagctatacctttaaaactttaaaaaattcatttcttaatgactttaccaatctagaattgagaaagacagaatggagaaacaacatgaaccttttacatttcacctaaccttcctctatccccacatgaagcgtaataccccataggtggaaactgtcttaaattttattttgtttccaaaaacttaagcatacgttagtctgggcttttgggagttatcttgtagaataagattattaaaggaccttaccattttctaagtagattttatcctaaatttataattgcattggaaaagtgggctttttaaaaaaatttaaccaatgtcatatgacaccatcctcccctattcctcccaccctgagttaccagtttaatttgaaaactttgaatttcccacatatccaagtatgcaagattttgcattgtcctcacataaatgaacaaatcttcaaagcacgaaaagttgagtatttgttttatgtgctcttcatctaggtgcttgtagtaatgttggcacttacaggagaaattaagagatgaggcagagaggtgaagaaaggagtctttaaaataagtgattaaattttgggcatttatagtatgttgtgtgagtactttttgaaaatgactagttagtgggggaaagtaacatttctacctttaaaaagaatgttctttgaaatgagaagtagttttaaaagttacttaaataagaatggtaggttattttagttacaatctcacaaaaatgatgttgtagtatgtgacgtgaaatatagtaggttttgagagttttgactatgtacatgacgttgaatgtagtcaaaagttggcaatgtaatttttaaattgaattgtattatacattatttcacatttattattcagtttaattctaccttgtcctgaaaaagagttgaagagatacacagatgtgtttgtgtaatgcggaatgggtaaaaaggcaaatgaggtaggaaaataagtcaaagtaaagtatttgtatggatattaaataacttattttaattttgtagcccattttttttgttttgtttttgtgggtagtgaggtattaaagtaccaaaaagatctctatatgtaacccttacttcagattctgaggtaatttggagtgatagcatttttgcagccttttatttaaggagccaggaaagcagatttcatacttgcattttggtcacagaataaaagtgaaagttttattaaataataacaaggatagtttgggaagatgaggcatctagtgataagaattgagttaggattttgtgccgtacatgatttatgataaagcttttcttactatgatactaaaggctttgattgtaagttcaagtagttttcaatgcagaatccatcagtgtggaaccttatataatgattgttgagcacattttgacataatttaacatcatgttattgcttatttagaaaaaaatgcttaataccagtaatctttttatttcttctatcaagtatattttgtttctgagaggattaaaaataacacggtgcattgaagtgatatttcttggtggtttttaatttaagaaaatctgataaagtagtttataacttttctttcttctttttgtagagacaaggtcttgctttcttgcctaagctggtcttgaactcctgccctttaatgatcctcccatcttagcctcccaaagtgttgggattacaagcatgagccactgtgcacagctagatagctaagagaaatatggattaagttgagtattataagttatggttttcaaatatgatttaaaataaatattgttagactaacattaagggctaaagtgaaattaccaaagcacgtattaaagacaaatttggggcgatatcacatgttctcacatatgtgagagctaaaaaaatttgatcacatgagagtagagagtaaaaagataagagactgggaaaggtgagtgttggggagaatgaagagaagtgggttaaagggtacaaacatgcagacagacggaataaatttaatgttataattctcctggttgttcatgatataccatgtaccatttcatataattcatgtaatataccctcttattttataggcaaagcaacagcagcctaagtcttgctgggggataaaaatatttctgaataaataaagtgatacataaatcatataactttgattttaggctagggtcatgatcaaatacattgatttgttatttgtaaaattaaaattactgatttaataaatagtggtacctgtctttttctctgtctgtattagaacagcattagtaataggaagcaagcaggatagtcactaaaagcacatgcagtgtcagaaataagaagtgggatctcttttcaaggggaggagacagaagaaggcaggagaagtacagcaatccaggttaggttattgtggtaaacctgtctttctcagaagcttctgagcacaattctgaagaaggtaacataattataatgtgctcgtaaaataatggggcaaaaaaatattcttcaaagtagttaccttgaggaagttatacattagaaaatataattgctaaaatattttgaaattctttatgaaattggtttcagaaccttttaaaactgcaagatcatttttgtagccatagattaaaattataattaaaatttttaaattgtaaaagtaattatagaatatttagagaacatgaaaagtaacgcttttttcacatactaataaaaccattgttctttgcaaagttttttcatatggattctttagataaaacttattttaatctactcaggtgtagattttttggtgtttatccctcttgagttctttgagcttcatggatctgtagtttggtgtctgtcagttttggagaattaaccaccattattcacatatttcttctgtttcttttctcctgatattctcattatccatagttacaccttttgtaattgtccaacagttcttaaatattctgttactttttaaaaaaattctttttgcctttcagtttgggaagtttctatcaacgtatcttcaagttcactgattgttttctctgctgtgtctagtctgctgttgaatccgtcaaagcattcttcatttctgttactgatttttgttatttccatttcagtttgtcttagagtttccatgtctctgcctacagtgggcatcagtttttgaatgtcgtgtagttttttccattaaagcccttagcacattaattatagttactaaattctcacagtgatgattccaaaatctctgccatatatgagtctggttttgatgcccgcgttgtcttttcagactctgttttttgcctttagcatgccttgtaattttttttttttttttgataagctggatgtgacataaggggtaaaaagaactgagataaacaggcctttagtgtggcctagaggcctatctggctaggagttaggctgtgtttactgtttgatgtagctttggtgtcagagattaaaatttcctctcgtgtaactgcttttgtctcctttgttgtctttgggtttccctaataactccttcataagtaggttccgaggcttgtagttatttaagctgtaagtccctgttattacacaggagccctattgatgtggtgtgtgtgtgtgtaaaagtgttctataatcttatgattagctcttagtgagcctgtgtctttggactgtgaccttcatgagtgctttttagctcctgcaacctttacctcccaatacttaagtgagaaagtaggaaggctgggaggcggctggagttttgtatttctcttcccacaagttggttagttggtggataacaaactggaatgtgaaacctcggatgaggggaggctactgtagtttcttttgaggacaggtctttgttattgagaacagagatcgctgggcaatttcagaatggttattttttctctcctattggaagctagagggaatttttctttgatcttcacttgtgaatctctgatggggcacctggaggtaaaactcaggaaagtttcctctgtctctcccccagccagactgcccatcccctgagcttttaattctcaagctagtccacgttgaacctccagcaatttacattacagtgttcctatggatactggctccagctgtttgtttctcttgctggggtttgtgatacccgtagctgtggttttctgtagtcacatctctctccagttttgggagcagcagtttgccctgaacctcaattctctattgggtctaagaagagttaactgattttcggccgggcacggtggctcacgccagtaatcccagcactttgggaggccgaggtgggcggatcaccaggtcaggagatccagaatatcctggctaacatggtgaaacactgtctctactaaaaatacaaaaaaattagctgggcgtggtggcgggcacctgtattcccagctacttgggagacagagccaggagaatggcgtgaacctgggaggcggagcttgcagtgagccgagatcctgccactgcattcctgcctgggcgacaaagccagactccatcccaaaaaaaaaaaaaaaaaaaaaaaaagagttactgattttcagtttgttcggctttctggttgtgaggatgggagtgatgacttccaagctctgtccacatcagaccagaaatccttaatgatatttccttttctgtacctttttgactgtttcgttctttagtctatctggaatttagctgtgtagggatgcagggaataggatatgtgtctagaccttctgattatgctactttgtctaatagttcttgtgttaggattatactattttaaatttttatagcattaaattctttagtatctggtagggctaatcttgctttactttcctatttattgttgcatatgaacctcagaattgttaagtcattaaaaaaaagaagtagaattataaatagaactgcttaaaattagtaatataattagaatgatagtgttatgatgtttggacttctctggaaatttatttctctttgttgactcagatcttcttttatgttttggaggttttgtaattttctttttctcctttttttttttttttttttttttttgagatagaggcttgctctgttgcccaggctagtgtgcagtggcacaatctcggctcactgcaaccactgtctccagggtgtaagtgattctcgtgtctcagcctcttgagtagctgagattccaggcgtgcaccaccactcccagcttattttttatatgtttagtagagatggggttttgccgtgttgaccaggctagtctcaaactcctggcctcaagtgatctgcgcacctcggcctcctaaagtgctggaattacaggcgtgagccaccacacatggcctcataattttctttgtctcatttacagaagtttcttgtgaggtgtattttctgcatttttaaagcctttttattttgaaataatctttaattcacatgaaagttgcgcagatagtacagaattcatgtgtatccttcacccagttttccccatcatgacagcttatgaaaccgtaatacaattatcaaacacaggaaatcgatggtggtatgatactattaattaaactatagaccttatttagattttaccagtttttacctgtactttttttgtcatatgtatagttttgctattattattgcaatggctttctactacatttctctctgtctctttgcctccttccctgccttctgaagagtaaaaatggtgttaattttcaraagctgctttgctaatagattttaaattctgagtttttrgttgctttcattgaatgttttttaaatttttaaattatttttaaattttttctcttcttttcaaaggtactgatcattgaatttttagggatgtaattttctcatttgctaaaaatgttatttttgtttctataacatgtcattgcattggctaggctagatttccaaattatactttttgtgcctaatttttgtataatagtcctcgagtttccctttaagagaaaaattagctactgtgtacattattagttgatttctctaatatctgacattaaaattaatcattgatatgcaatgaatgctttaccaagtttcaggagttataatcatttcaaataaatcatgtaatttaacccttacaacctcctaagataggtgtcaatattattcctgtttacaggtgagtaaattcagttgggttaaatgatttatttgttcaaggtcacatagtttaggtaagaagctcaaacctgagttttaggtttcttactcattttgcatttaaccgttcttttatattctcttctattgcaatagaaaagatcaattgtaaactattcagatgaatttcattctacagcatacgtttattccatggaactggcattccagaatggagtgaattagggcatggtggctcaggcctgtaatcccagcactttgggaggctgaggtgggcggatcacgtgaggtcaggagcttgagaccagcctggccaacatggtgaaaccccgtctctactaaaaaaaaaaaaaaaaaaaaaattagccgggcatggtgttgcatgcctgtagtcccagctacttggtaggctgaggcaggacaatcgcttgaacccgggaggtggaggttgcagtaagctgagatcacgctactgcactccagcctgggcaacagagcaagactctgtctccaaaaaaaaacaaaaagaatggagtgaattaatttcataaagaaaattcaggttaaacactatttgcaaactgatattcccgaatttaaatagacttatcaaaattgtatgtttatattttaaaggatcaaaatactgagcctgcaccttcctccctccttccttccagaggtattaattaagtatagcccctattgagaacctaaatatgtcaaaatttacctaggtggatatggaattaagtgtgggaatacaaggaaattaatattttatatttaaatatgaaggacaatgtatagttagctttttgaagaacatcaaatattaacttttctatcatgcaagttgtatgcattctttcttatttgtgataactttaagatgatgtcaaagtttcactgtgacttaagagtgagtaaattataaaacagtagaatcatttatttgaaagaggccttggttttactcagcttccttcccattgtgggaatgccttcctctcctacattttttcagcatcttatttgggagaaaaggtttaattttttattcctagctgcagtctttaacagttttcttaaaatatttattcttttcagattgcctttccttctaccttatatatatataaaatccctttctaatctgagctaatcagtctttttttttcttttttttctggtagctatattgatttctttaggtacctttatcttctgcattggcattcgttggtaccttctcttccacctgtcctactcttatttcagtaatttagatgaggtaaaatttgtaaaaatcacacttgcgcttacagatcttaactatataataaaactttaaaaatgcattatatttttgtcattgccctttattacatgtgtactcagacaataatcattgtctgatatttaactagagcatgtgtttagcatgaatacctagcactgttctattactgtaacattcatattctgaaatcctctggaaggaaacagtaagattatatgttgatttcttcttatttaaggaaagattcattggttgaacatggttttatgttttgtgtttggagatggactgtatttagagacatctctttttcccccagaagttctgttttaaattaatgagaaattgggtgaacttattttcttgctgaggtacacagcttgaagttttggaagtaaagtatacatagtcttttctatatgggaatggtggaattttctagacttgattaaagtactgttgtttaattttttaatgagaaccttctttcccaatacttacaatgtcagtactttcaattaagttgctgtgaataattcctcctgcccattttttcttcagctttttaatttttccaagttgagttttgaatttttgatctcttttgacagcctttttttctttttggctaggactctctacataacttttktgatagttatggaaaacagtgggatagatgttcagatgttataacttctcttttttggctgggatggggtggatgagtaaaaagaaaaaatcaataagtcagtgaatgttggcaggtgttcagagattttttctgtgtgtcattcaccgtggcacagttaagtaactgcttatgattaagtttttcacagtctcagaaaataaggagtttcaaataataatgtgggtaactgattagtatccaactagtagtggtgttggatggattaattgattcttagagagtctaggaaatgtcagaacagtatacattcaaactgctattacgacaaagtaaaagttaccttgaaaaataagtaattcaactggtagaagaaactttaagggacagactagatttggttttctatatggtctttcattctgaatactaattagtacttgaacatatataaagctcaagtgttgttttttttagaaatacagttgtgaagtggttatgcarataaattcaatttaaatttcttgtcatgtaaaatgtgtagaaggacttactgaggttactttcagtcttgtttttttctcagatagcgatgaaccattttcatcattattgtttggacttttattatatttaaggacaggagttaaatataagtcctgaagaaaaacaaatgtttcatatcacacttactttagagtaaagcttagttgtagctgtgtacaataatcagttgtaaaaaggtgtttccattcttccattgtccttttggcttatttctcttgtcttattcaatttgctgtggatttgtttttgtagtgggaaaattaatttgagctgaagtgtgtcaggattacttagcaaaaaattactgtttgttgtcccacaaaaaaagtagatactacttaaccttttttactccatgtcatggatgtacttatgttttcaccttgtggaatactgaatcaagtttacactcttaggatcttagaatagtggttttcgctcttggctacatgtaggaatcatgttggaagatttaaaaaatgctggtgcatgtgtcccacccttggaagattgattgattgccttagggtgtggcctgcgcctcagttcctatgtgcactaaggttaagagcctctagagactcatgcacaataacacgtgttaaaattggctcctaaaaattgtcatatagtcataagattaatatatcatgaatgtgtaaaatgatattcttgagtttgccatggtcttctaaaatgagcagtgttaataatactacacatattttgagaggagtttaccacatttggccaaaagaccaaaaagctcagcaattaactgcctaaagtaacaaagcaggtagagaaataatgttttcttagttagcctaataatgtatctttcaaggggatggataagattccagttaaactatttactgttagcaatatttttttgtaagctatttttgtaaatccacagtgtgccttctaggttttttttctcttactctcaaaactgaaataggcttggtacagtggctcatgcctataatgccagcattttgggaggccaaggtgggaggactgtgtgaggtcaggagttcaaaagttcaagaccagcctggacaacaaagtgagattccccgtctctacaaaaaattaaaaaattagccaggcatggtggtgtgtgcctatagacccagttactcaggagactgaggtgagaagataatttgagtccaggaggtaaagtctgcagtgagctatggtctcgccactgcattccagcctgggcaacagagcaagtccctattaaaaaagaaaaacagaaacctgaaacagatgatcaaagttgcatgtataaacgttattaaaaaagattcatcatttgaatatttagttactatttactaaagctgcatgtttaagagtttctttaggtgacttcacatatattattgtcatattcattaggctatggtaggaagtccagttagatttaaactgatacttgttctactcagaataatttatgtcacctgaagagargctgatggctatattcttatttcagcatatttggatatgggaaaattaattaaactaaaattctcatatgactttggaaatgactattgaaaacacactggcgactgggcacagtggcttacacctgtaatcctagctagccctttgggaggctggggcagtaggattgcttaggcaaggagttcaagaccagcctgggcaacatagcaagaccccatctctacaaaatatacaaaaatttaccatgtgtggtggcatgtgcttgtggtcccagctacttgaggggctgaggtgtcaggatcacttgagcctgggaggtgcagtcgggtgagatggtgccactgcactccagcatgggtgacagaacaagaccctgtctcaaaaaaagaaaaaacacattgggaagtagaaaagctactcatgagccatctaagtgacatgtagtccaaacatctgtaatatgctgtagaactggaacaaaatgatattaaggataattttagaagcatcttcgtgaatagttactgatgtaggccagttcttggcaaaattatgtcattggtttgtatttggtccttgcctgttttctggagaccctcctactctgtccctagtgctgtgacactttccctttcattcttctctgaagtatctggatttgtcttcctataaattatataatattcctcattttttctcctcctttgaccaaaatcttttcttagccatggagtttttattcttggggaggggctgccaggttgagagacaaagcaattataccattttctccccaattatttacttaaccataaatctgtgtacctactacttggctttattaaatattaatgtacatctacatttataaaaaaaaaattacagccgggcaccgtggctcacacctgtaatcccagcactttgggaggctgaggcgggtggatcagttgaggtcaggagttgaagaccagcctggccaacatggtgaaaccctgtctctactgaaaatacaaaaaaattagccgggcattgtggcgggtgtctgtaatcccagctactcaggaggctaaggcaggagagtgggcttgaacccgggagacggaggttgcagtgagccgagattgcaccactgcactccagcctgggcaacagagcaagaatccatctcaaaaaaacaaaacaaaaaaactacagctatatcaaagcccctggtacctgctactgaacctgttttcctctgttctgctcacaggtaactgccaagtagagtttatctttttcagaaacattttcagaaaccaagtcaatcttttaagtaataaatcaaaatgagtgaaatttaggagggaaatgtttatgagcagaagcttaatactgtacttagaggttataaatagttgataaaaccagttctgcatctggattgttttcatccttctgtgtttgactattcagagctaattgtttaaagactttcctaataaaaatttgaaaatgcttgcaaacctaggctataaggagacacaaaggattaattctactttgttaaaatctactaatgtgtgttgaaatgtgattatggcttgtcgacaaggaaccattggatgaacagaattcagtgtttatagaactagattgttggcaggcacacttaactactgccagcatcactcaaaccagccaactctttcatctttagtaaatactttgtcaaataagttatcagtctctttaaaatttagataatgaatagaattcatttagatgttagttaacagtgcagttaaaataggctatcttagattatctttgttcttctgttctatttggtttagattaaaagtgctaaaggaatgctgaagagggtggaacaacagcataaacatttttgagagggtggaatagagaacataaacatttttggagttctaaatctaaataaaattatttcagaaataatgaaaatattttgtattatttctgaggaaaatcagctttttggggggtactttttctgcagcactgtttagctatttttggcaaatgaaaaaggtattggggtagagacagagatttcctatttgaagttgaggcaatgaataactcctttcccctactccaatctccttaagaagaaataagcttttcttcattgataaggtaaagttagttttatactgtttatttaaaacaccaccaccaccagcatctcaactcttcccccaaattagctttgtgtctgaactctactttagtcaatgattcctttatatttttatatctcttaggcttgaaaactaggagtcatccttgattttttttccccccttatctacaatcatcagactttctggctctgtctccttggggcttgctttaagctttacccttcataacaaacatgatatgttagtagtttctttcagctttaaaatattatgacctttaagatctaaaattaaatgttgaaatgtaaaatttaaaggcttattgaaagaatgttaataacttttwaaaaaagtattggtttaagattagattctcctaactaaaaggatcctaaaaattaagagtaagatatttagaactttgtactaagtgtaaagtcttagtattacaaataaatcattgggtatttattattatttaaatgtctgatactgagctttgcatcttattatggagaaaaactttggattccaattgaaacgagaagaaattattgttatatcttaaccagcgtctaggcaacttggacccttcagatactgacactgagagaacttaatcccaaaataaataaaaattttgaattaacattctttttagtccgggtgcagtgccccacgcctttaatcccagcactttggaggctgaggttgaggctggtggatcacttgagcctagaagtttgagaccagcctgggcaacatggcaaaacgktgtctctacaaaaagtacaaaaattagccaggtatggtggcaggcacctgtggttccagctatttgtgaagctgaagtgggaggatctgagccctgggagattgagartacagtgagcactgattacaccactgcactccagcctaggcagaactagaccctatctcagaaaaaaaaagaaaaaaaaaaattctggccaggcagggtagctcacacctgtaatcccagcactttgggtggctgaggcaggtggattacctgagatcaggagtttgagaccagcctggccaacatggtgaaaccccatctctactaaaaatgcaaaaattagctgggcrtggtggcgggtgcctgtaatctcagctacttgggaggctgaggcaggagaatcgcttgaacccaggaggtggaggtttgcagtgagccaagactgcgccattgcactctccctgggtaacgagtgaaactctgtctcaaaaaaaaaaaaattcttttagaagtcaccttgaaacatttaatgttgtttatttccttcatggtgggtagggggtgataaattgcaaaaagagataatgtataggttggtcttatgcaaataccctaaaattaagaaaaaaattattcgatagtggaagttgtccaggagaattaataggaagcataaacagttttgaagacagggaacttctgagggtataacttttgaggtagagtgggtgataaatttgagtagataacttagaaaatgttaaatgccagaatgacataaacgttttttggcctagtgatttttaaaaattgacatgtttttcttttttatttttttgagacagtctcatactgttgcccaggctggagtgcagtggcgtgatcttgacttactgcaacctcccccttctgggttctaggagttctcatacctcagcctcccgagtagctggaattataggtgtgcaccaccatgcccggctcatttttgtatttttagtagagatggggtttcaccatgttgaccaggctggtctcgaactcctgacctcaagtgatccaccaccttggtctcccatagtgctgggattacaggcgtgagccactgtgccctgccaaaattgacatgcttttctgaatggtgtcttgctatttaggaaattttatttttaatggtaaaagcatatttgcttgaagaaaatgctgtggtgtgcctttttctctactaaactatccccgttcctaaatctgcatagaaccatgaaaaatattatttttaacttcctaggcctttttgcttatgttcattaagtcaactcaaattgtcatgaagcaactcctgggtatactagatactccgctgtttttaccccacttccattgtacgtttagcttcaaacataagattcattcctttggcctatttctaatttgcaacctgctgtattctactttctatgaaactagtgtgtattatctcttatatccctctaaattttcttgayggttaatagtatgtttccctttgrtcaccaccagcaagcttcgggggtcagactgactctgaaagtagcagatatttgaagttctcttgaaggaacatgggattttattaaggattttaagaatggataggaatttgatgaggaaaattcatgcagagaggatggcatgatctaaggtgtgaaaatggagtgctcaacataagagatgtgatatggtagaaatatagaatattattgggatatagtaggggatatcattgggaagatggagaaaagatcatcgaaatgagtttctggtcgtttagtaatgtctgtcatttattgaatgcttactgcatatccaactgtgttaggctctttatgaaaaatctaatttaattatgacaacagttttgtgtggcagatattattctctgaagaaattgggatttagacagactaaataggttataagactcatggagctaataaattagatttgattccgcatctcttttaaaatatgctgccatcataagcctctttaattaattgctttgcagtgatctctagattctattcaagaagaaatttgcgacaatcttgaacttgtacttatagactaggtgattactttaacagggaagaaccatgattatgaatatgccaggcatcggaagaacttcaaatataaatctactacaggaatatgaactgatggcctgaaaaagactgcatttattttggataacaaaataatttcttsgccaggtgcagtggctcatgcctgtaatctcagcactttggaagggcgaggcaggtggatggattgagcccaggagtttgagaccaccctgggcagcatggcaaaacctggtctctataaaaataaaaataaaataacctttatccgaggctctttaaaacaaaattcaagtctccaaaacaaatactgaaagctgtatgttcaaagaggttttcatcgctctttctaagtcttaagtatttgacagtttaggtctgggcgaaataaacattgggttttactaataatatggttgcctattttggcaccttaaatttagaagttgatttttatgtgttaaaattttttttaatccaaacgtagcattgtttataccttaaaagaatgccagactgacgtatttttgttattattgtttagtttggtaggacaataatgttttccattgaactgcaacatttactgcaactggtagcatgtaaattaaagaattttagagttgaaaggatcttagtgattgtccagtgaagtcttcttgctgtacagataaggcaaatgaagcacttttgaattagatgaatgtggctccagttactcaattaatgctattctaggattagaactctttttaccaaactacactacttccagtgtttataagagggtatatgtagatcaccaccataacagtacatgattatgttactggttatgaggctggcttgcctgaagtaatggtcttagctgggtaagatatagatggtcgcataacagaatctcttaggattctttttacaaaatacatataccaacccctctttgaaatcygcttggctgaagagactgtcagtttaagagcatctttaatcagtaagcataggcccccctggcaacaaaaataggcaaaatattcttgtgctttggaaataggtgtctagaaaatatgtagcttagtaacctaattaatgcacatagcattgcagatgtgtaccataaagctatcctttccactgttcactaacaaaagacatttgactcagttaccatatatgttctgaaaaactattagtaaaaaacttagacttgtgagacctcttattttttcatattattatttttatggatgtacaaattctccttgtcaagaattgtgaagggtctgagattttattgcaggctaataaattagcctactacaggatagtaattatggataactgaaggtaaaaagacatgagtatcagcatgttttgcaccagtttcctgagctctagctaccatagaatgacatgaagtgggctggatgatatctgcacatgcatgggatgcagacaggaaccttaagttgagggagcccacatttttgctccagagggagacatactttctttatcttccaaggtttttgctaagtgaccacccttgaaaagatagtctgaagcaaagagcatgtttgcagcttgcaggacaggcagaaatgtgagagascaatggagaattgtctcctaataggcattatattatattagaccaatgagaccattatttattctcaatgtaaatgaaatatgttcagaaattcttagtgtgttaggaatgtgacctctgtgcactttgtttttaattccagaaaaatatctgttgtttgcgtattacttgcccttgtttagtatagtaacatgaaagttaacttgctttagttttgatgaagggtgttctggttaattggattttatttttaaatatttaaattcctttatgccaaatggacataccctgttcctttgtcccttctcctttttttttttttttaaagtgaaaacatttatcctccatgttttaayttcagcaaatacttaacagtgtgcctatcataggccaaattctgaatgctagccaggtgtatagataagaaagattgtgcattcatttattcagagttattatatgctgggtgtgtttatatttatttaatcctctcaccaaatgtgtgccgtttgagggaaggagacacaaggtaggctaaatattagaatgatgttcctgggagagcaaatagtatgtgcaaagggtttggagaagatggkataggcagaaaagcacatcccaagaagaagagcaatatatatggaacattcagaagagagaaacaatgtaggttgtgagtacttcatgatactgatattaacctatttttaaaactgaacttccaaatttaaactgttggggttcttgcaaagtatactgtatcagggagtgaagtttggatttcatggatctctggttgtgcttaccatatatgaagctttccatgaagacttctcaaagctccagaaacaaaaaaaaaacaaaaaagacttctcaactcttctttgggagtgcagggggagaaacatctcactatatatcttttaggtttagaatgctacagtataagaagtatattttttgaggagactgcatatgagtttgctggggcttttttcattagttacgtttatttgtatagagactaggtcttgctatgttgctgaagcaggactgcagtggctgttcatgggcataatcatagtgtacagcaggctggaatttctgggctctagtaaacctcccacttcggcctgagtctagctgggcctacacgcctgtaccactgcgcctgccaagtttgctgtttaaagcatagcgttcattcatgtgtagttgttagtaatgaaattttcaaagtagatttatttaaccaggcctcttttacttaatgaccagaattgtggtttgtttttcacctgaaaaattgatcacttcttccagtcacaatatggtctatattcttaagctgtccagtgacattagaaattaatgtgccatttatttttaattagaatagtaaaggtgttgctacattcaaaaaatagtctaacaattagaagtttccattaactattggttccctctaacttaacggttttaggatctgttattaaaatttttagcacataaaaatgtagattacattaacattttaagtggcccttgtttttctaaatgtactttgttcaagagagctctgctataattaattacaagggtgatttcattatgaaaaatttcttaaaaaggtttgtttagagtcatagcaaggcttaaatgagagtctgtgtaaggtacctgttataaaatttggcctacagaaagttctcaaagtaatagttactacttcttttaccgtattattattttaaaaagctgattaagtttctgttacatgtatttgcatttaggtaggaaactttccttaaaaaatgataaaaaatttattttattttgtttatttattttaagatggagtcttgctctttcgctcaggccggagtgcaatgctgtgatctcagctcactacaacctctgcctcctgggttcaagtgattctctcacctcagcctcccgaatagatgggattacaggcacataccaccatgtccgtctaatttttgtatttttagtagaggcagggtttcgccatgttggccaggctggtctcaaactcctgacctcaagtgatctgccggccttggcgtcccaaagtgctgagattacaggtgtgagccaccatgctcacccaagaatcttcactttaaattttttatattttttggccatacatctctacagaaatagaggcttaagcaggagaatcacttgagcccaaaaggcagaggttgcagtgagctgagatagagccactgcactccaccctgggtgacagagcgagactgcatctcagaaaagagaaaaaaagattctctaagcttaccctgtccgatacagtagctactagctgtatgtggttgtttaaagtaaattaaaaattctgctctttggttctaytaaccacgtttcaagtgctcaaatagccatgtgtggctagtggttcctgtcgatggtgcagaacattttcatctttccagaaacttacattggacactgttgttctaagctatgttttcagttttacccccaataattagactcctattatcataacattttaaatagaataccatataaaaaggtagtgagatgcagttgtgcttttcaggagatgcaaaatctacttcatttaacctccccatggccttcagaacacagggcttttaggaccctagttggccatttgttctttgttttaaacaactaataaatgtagaaggaattatagaaaatccataaatagaaaaagcactatagaaacatttgattaagataagatgctgaaaccatttggtgaaagattgttgggattggattcggagaaatctgaccagtttaacttaatgmtcwaacttaacatcaacattatgggacaaactgacgttacgtattccttgatatggtgcgctgagaagagtacaacttcacctgtttggtacttaatgccatttttttctttttgccagaacttgttgaagaaataataaggcagttctaaataggaaatcttcatgtcttggacccttcaaaaatgctagtagttggtatcatgaaagactagatagatacatgggtagatagataggtaggtaggtaggtaggtagatagacagacagacagacagaaagttaaaggcgagacatggaaattaactgtgttgtgcagtggatcctgcattgggtcttggactggaggacaaaacagatctaaaggacattattagggtgactggagaaattgtagaatggatttgaatggtgtaatatgawtattaaattttctgagtgataatttattctgattacataggaaaatactcttcttcttaatggggtacatgttgacatatttaggagtgaaatgtcatgatgctgcaagtaacattcaaattgttaaccaaagaaaaattgtgtctgtgcaagtatgtgtaaagagagaaaggaaatgtggcaaaatgttaacaattggtcagagactgaataatttagatgaagaaggaagaatgtacttcattgtatttttttacggccttttagtaggtttgaagttttcagcataaaaagtgggtaaaagaaatgacctctttatgctgtctgcttagcagacagttccaggaaaagcccctccctctttccggctacatgattgcaatagaatggatctgtcaagtttctacagtcctttccagagaaattgatgtggagctgaacctctgatagagtgttcagttggattagtaggaaagcaggcatttaaggcaaggaaacacataagtaatacatcttagtagtttgtaagtttcaatatttgtttcagccagaatttattagcagtacatgcttcagatttattctttccttttaatggcaaattgggaatgcatatgaaaaacatttacatatcagttctctaggagcactctccctcatcccccaccatgcatagtctcaatgtcttaaagctaggcaactgtaggtagactcaattggagactgcctgtttctgccttcttaacattctggtgaccacctggattcagatatttgttataaaaacaggcgtatctcagaaatattatgggttcaattccagagcaccgaaataaggcaaatagtgcaataaagcaagtgacacgaatattttgacttctcagtgcatgtaaaagttatgtttacactatgctgtagtctattaagtgtgcagtagcattatgtctaaagaaacaatgcacatatctaaattaaaatgtactttattgctaaaaaaaatgctaacaatcatctgagtctttagtgagttataaattttttgctgataggaggaccttgtgttgatttaaatgactgctgactaatcagagtggtggctggaggtgggggtgactgtggcaatttcttcaaataagacaacartgaggtttagatttctctgtagcacggagtgctgtttgatagcattttacccacagtagaaattccttcaaaattggagtcaatctcaaaccctgatgctgctttatcaactatgtttatgggatattctatgtcctttgttgtcatttcagcatgttcacagcatcttcaccaggcatagatttcatctcaaaccattttctttgctcgtccctaagaagcaactcctcatttgttcaagttttgtcatgaaattgcaggaattcagtcacattttcagtccccgcttctaactctagttctgttgctaatcccagcacgtgtagtgacttcctccattggagtcttgaaccccacaaagtcattcatgagagttagaattcttccaaacttaatattgatattttgaaatccttccatgaatcatgaatgttctgaatggcatctagaatgatgaatcctttctagaacgttttcagtttactttgcccagatagaggaatcactgtccgtggcagctatagccttacaaaatgtttttcttaaataataaatactttttttgagatagaatctcgctgtgttgcccaggctggagtcctgtggtgtgatctcggctcactgcagcctttgcctcctgggctcaagtgattctcctgcctcagtctcctgagtagctgggattacaggcacgtaccaccacgcccggcaaatttttatgtttttagtagagatggggtttcaccatgttggccaggctggtcttgaactcctggtctcaagtgatctgcctgccctggtctcccaaactgctgggataacaggcatgagccagcatgcccagccaaataataaaacttgaaagtcaaaattactctctgatgcatgggttgcagaataaatgttgtgttagcagttatgaaaacaactttaatctcattgtattctccatcagagttattgggtaactaggtgtgttgtcaatgagcagtaacattttgagaggaatcttttttcctgagcaataggtctcaacagtgggcttaaaatattcagtaaaccgggtggtaaactgaggtgctatcagctagctagtctttgttgtcccatttatagatcacaggcagagtcgatttagcataattcttaaagrccctaggaattttcatatggtaaatgagcattggcttcaacttaaagtcactagctttctttagttcctggtagagtcagcttgttcttcgaaggcaggcattgacttctctatagctatgaaagtcctagatgccatcttcttccagtacaatgctgtttcatctacatggaaaatctatagtttattgtagccaccttcatcaggtatcctagctagacggggataacttcctacagcttctgcatctgcacttgttgctttaccttgcacttttatattatgaagatggcatgattctttaaacctgtactagcttcatactttacttctgcagcttcctcacttctctcagccttcttggaattgaagagagttaagcatttgctctggggtaggctttgacttaagggaatgttgtggccagtttgatctatcaaggtcacttaaactttctccatttcagcgataaggcagtttcgttttcttatcatggtgtgttcactggagtggcacttttaatttccttcaagaactcttcctttgcattctcaacttgactctttggcacaagagtcctagctttcagcctgtcttggctttcagcatgcctttgatttaaagtgagtgatgagggagtaatggctcatgcctgtaatcccagcactttgggaagccaaggcaggcagcggatcacttgaggtcaggagtttgtgaccagcctggccaacatggtgaaaccctgtctctactaaaaatacaaaaattagctgggcatggtggtgggtgcctgtaatccagctactcaggtggctgaggcaggagaatcgcttgaacctgggagatggaggttgcagtgagctgagattgcaccactgcactccatcctgggtgacagagtgagactcccgtctcaaaaaataaaaaaatttaaaaataaagtgaatgacatgggactcttcctttcacttgagcacttagaggccattataagggttattattaggcctaatttcaatattgttgtatacccaggaatagggaagcctgagcagaggggggaaaatggggaatggctggtctgcggaacagtcagaaaacacacaacttgtattaagttcactgttttatgtgggcatggtttgtgacgccccaaaacaattgcaatagtaataacaaacatcactgttttttttttaaaaaaaaaaaaaaaaaaggccgggcttggtggctcacgcctctaatcccagcactttgggaggtcgaggcgggcaggtcacgaggtcaggagtttgagaccagcctggccaacatggtaaaacccagtctctctaaaaatacaaaaatcagcctggcgtggtggcacacacctgtagtcctagctacttgggaggctgaggcaggagaatcacttgaacccgggaggcagaggttgcagtgagccaagatcgtgccattgcactccagcctgggtgacagagcaagactctgtctccaaaaaaaaaggcagtatctgtgaagtgcattgacgtgaagtgcaataaaatctgtctgtaatatttggtttaggttcttgaattaagatttatgataaaaaaagacgttgatttgagaataacttatccatgctcaatatgaacacattgtaataggcttaccaaattgtttaattatacattgttcaactaattataaatatcctgtataggatcagtaaccagtgtgaattttatttgaaccattaatgcctttcctctgggaaattgttgataatgattcattggttagaattggctaagtcaaagcaccagtctgttttgttccactttcttctcatgtatgttacagggcattttcaggtttcttctgaatctcagtggggaaaaataggatcagtataaaatatatattcaatgagaaaagagtcaagttttttagcatcaggacaaaatatatatcagaatagaaagkccagatgataggaacattagagtacatatgctatctcaagagtctgaaatccacttgagcccaggagtttgagaccagcctatgcaacatagtgagacatcatctctacaaaaaatagaaaaaattagccaggtgtggtggctcatccctgtagtcccagctactcaggaggctgaggtgggcgaatcacttgaactggggagatcgaggctgcagtgagccgtgatcgtgaggtgaaattttttatttatctagagtgaaatgtacaaatcttaagtgtacagcttgataaatttgagctatgaatttggttctgcatttctgtgtctaaagacaaaaataatttcttagaggagattaaacttttcttagtgcttatttctgaaataaaatttttgaatgagacctcaatatagggaatattgagtcatgtagtgtaggagtccccaaccctggggccactgactgggccgcacgtgaggtgcaggccagcattagcacctggcagtggcattagattctcatgggaacgtgaactctattgtgaattgcgcttgcgaggagggatctaggtggtgctccttaagaaaatctaatcccaggtggaacagtttttatccygaaaccattcccgcccaccccctgtggaaaaattgtcttccacaaaacccgtccctcttgccaaaaaggtttttacagtataccaagtgaaatctcaggtcatgaagctgaggtgcaatttttaatgggagtgaagggtggggagctaaataaataatcttcatccaaaaataaaacctagagtatataaagaaattggacactttttggcttcttttggttttcttgtaatygaaataaaaacaaaaacaaaaaaatggccagtgcagtggcttacacctgtagtcccagcactttgggaggccaaggtgggcggattgcctgagtccaggagtttgggaccagcctaggcaacatagcaaaaccccctctctaccaaaaatacaataaattatacgtgcatgggtggtgcacgcctgtggccccagcaactcaggaagctgaggtgggaggatcactggagtcctggaggggtggaggttgaactgagctgtgatcctgccactgtactccagcctgggttgcagagtgagacctgtttcaaaaaagataaaataaaaaaaggagaaatagttgatctgcatattctgtaaataaaatagctaaatagctgtctcttcatacatatatgtgtgtatatatacataagtgaatatatgcacacatgtgtaatttctttgaacatatttgttaagaattaggcatggaaaggacttcagcaacaattttttggggttatttactaggggtggatctgctgctttaaggaataagtaagcaagtgataatattgactccttttctgaaaattccagattaaaaaaagatttccttttgattccaagattgtcccacattcagaggaaagagtaatagagaacctgcaggcaaagccaggatttttctgaaggaacaattctgtgtttgattcartgcctgaaaaggaatcagttaagtcctcaaagttctttaaaacagagcatggcctagatccttttagctggaaagatagcttaaaacaaatgtttccacttggtcactatggctgtagaaaaataacagtactgctcccatgaaaatctgattttcagcagtgtgaacctgcccagaaggaactgatggtgagaggtactttttttcttctataaattctttgtgatgcctaccctaaatcactttctgtgatctgacttttttggctctcctaccttgattttatgttattagaaaacctgtagcttagttaggggaggattgacttctttataggttgccaccaagaatacttttcaccagaaaaaatatattaccctatggtgctcgatgcatctctgttgtaacttaccctgcatttagagaggtttatacttctacatggttttctctttacactttgagtaacatgttcttgctagttgaatttaaggagttagtagcatatattcagtaattgcaaaacagaccttctttcctcacccctgaatctttggacagtaaaaatacattatataacattgaaatcattcacaatttagtggtttgaaattccagatggtaatgccatgaaaagacctgtcatattttgtaccttatattatgaagagggttatattaatcacaattagcaagtgagttgtgggcttcaagttgtcaagtgaatttttaggtaatgaacaagtttctagacatttatagtctaagtttcaggacatttatagtctaagtttcttgaataaattttgtcattttaaagagcaaggataaatgattgaaaaagaatttctgaatttaaatttttacatgaattatttaatttgacaatttaattcttacatgggtaagtaatgttaatcatcccattttacagaggaagaaacatgactctcataggacaaatggcccatcacatgtttagcaagtgatggaaaccagatttaaactccagcagtcttatgcttaaccactttgctgtgattctcaaaatgtgtagaataaacacaattgcaacatgtgatgtctcagctctctcctaagactgaattgctaaggtctctgctcttttattttacttctctttttacttcctaatccccagtttttgcttgttttaataataaaatctagaggaaatagaactgctacagttaaatatacttggattgaaagaccagatcttttatttattcatagctacatgacaagttacttcatttgagctcacttaaaaaaaaatgtaataatgtactaataagggagttaaaaacataatgttttgttgtgaatagtacacaggtataatttttaaagtattgaaatcattacctggaagatattagaggtttttttagattttttttttttttttttgagatggagtttcattctagtcatccaggctggagtgcaatggtgtgctctcagctcactgcaaactctgcctcccgggttcaacgtttctcctgcctagcctcctgagtagctgggattacaggcatgcatcaccacatccagctgatttttgtatttttagtaaagayggggtttcaccatgttggccaggctgttctcgaactcctgaccacggtgatccacccgcctcggcctcccaaagtgctgggattacaggcatgagccatcacacccagctaaggggtttatatataggtagctacagttgacccttcaacaatgagaggatcaggggcatcagcgcctctgctgcacagtgggaaatccacatgtaacttttgactttctaaaaaacttaactactgatagcctactgttgactggaagactcaccgataacattaacagccacttaacacawattttgtgtgtatgttatgtgtattctgtactgtattgttacaataaagtagctagagaaaaggttattaagaaaatcacaaggaatagaaaatgtattcctgtttattaaatgggagtgaatcatcataaaggtcttcatccttgctgtgttcacattgaataggttgaggaggaagaggaggagttggtcttgctgtctcaggagtggcaaaggtggaagaaaattcttgtgtaagtggacctgtgcagttcaaacccatgttgttcaagggtcaactacagtgttattttgtaattaacattatgcatattattacctacatttctactttaaaagctaaatgttttattttaaaaaatctccctgattctactatgcatttaaggaagaaattataccagttctctacagtctcttccagaaaatagaaacagggggaatacttcttaactcagcattactcttaataccaaagagtacctaataccgaagaccatacaagaaaggaaaactaaactacagaccaaaatcttttgtgaatataaatgtaaaaatcctcaaccgaatattagcaaatcaaatccaaaaatgtataaaaagaattacatactatagctaagtgggatttattccaggtatgcaaggctggttcaacatgtggaaatcaattcatgtaatcgatcacatccacagtctaaataagaaaaatcatatggtcatatcagtagatgcagaaaaagcatttgataaaatccaacatccattcttgattaaaatctctcaggaaactaggaatgggggaaaattcctcaacttgataaagaaaatctacaaaaaacttacagctaacatcatatttactaatgagaacatagatccttttctattatgattagggaaaaggcaaatatgtcccctctcactactcttcagcatcatcctggaagtcctggttaatgcaataagacaggaaaagaaaataaaaggtataccgattgagaaggaagaaataaaacttaattcacaaatgacatgttggtatatgtagaaagtcccaacaaatcacaagtgctctggaactaataagtgattatagcaggttgggtgcagtggctcacgcctgtaatcccagcactttgggaggcagaggtgggcggattgcctgaggtcaggagtttragaccagcctggctaacatggtgaaaccccgtctctactaaaaatacaaaaatcagctgggcgtggtggygcacgtctgtagtcccagctactcgggaggctgaggcaggagaatcgcttgaacctgggaggtggatgttgcagagagctgagatcacgccactgctctccagcctgggtgacagagcaagactttgtctccaaaaaaaataaaagactatagcagtgttgcaataccatttatattagcacaaaaaaattaaagtccttagatataaatcttgcaacataagtacaagatctatatgaggaaaatgacaaaaataaaaaatcgaagatctaaataaacagatattccatgttcatgcttaggcagactcaatattgttaagatgtcaagttcttcccaacgtgatctatagattcagtgtaatttaattcagaatcgcagcaggttattttgtggctatcagcaaagttattctaaagtttatattggtcagagacctagactaggcaacacaatattrtaggagaacaaagtcagactgacactattgtacttaaagacttatgaagccacagtaatcaagacattgtggtattgttgaaagaataaatagatcattgaagcaaaatagcgcataggtagaccacgaatatagtaaattgatccttgacaaaggagcagagacaaggaaaaacggtaattttttccacaagtggcactggaataacaggatatctcattcccctccacgccaccaaaaaaaaaaaaaaaaaagaatcttgacacagactttatacttttcacaaaaactacctcagagtgaattgtagcctttaatgttaagcacaaaaatgtaaaactcctagaagataataaaggagaaaatctggtgaccttaggtttggtgataactttttagacaaaacaccaaaagcatactccatgaaagaaagacgttgttaagttggacttcgttaaaataaaatatgtacgttttgtgaaagttactgtttagggactaaagagataagtcacagactgggagaaaatctttggaaaatacatacctgaaaaagaactggcatccaaaaatattcagagaacccttataactcaataataaatgaacaacacaattaaatggacaaaaaaatctgaacctccttggagaagatatacagatggcaagcaagcatttcaaaagatgtttccacatatcattagagaacatgcaaatttaaaccacagtgagatactatacacctattagagtgatgaaaattccagacactgacaataccacatgctggtaagtatgtggagtaatgggaattctcattcattgctggtgggaatgcaaaataaccttcaaaagacacttgggcagtttctttaaaagctaaacatattcttaccatatgatccagcagtcatgttccttggtgtttatccaaatgaactgaaaactttaagtccacataaaaatctgccgatacatgtttgtagcaactttatttgtaattgcccaaacttggaagcaaccaagatgtccttcagtaggttaatggataaacaaactgtggtacatccagacgatgcaatattatctagccataaaaagaaatgagttatcaggccatgaaaagacatgcacagagtctatttaataaaaaaaaaaaaatctacttggagattgaggttacagtgagctatgaccacaccactgtaccccagcctgggtgaacagagtgagactctgtccattaaaaaaaaaaattccttgaactatacaagcaataaaatgaactacagatgtgatgaatattacaaatacagtggtgagtacaagaaatcaagggaaaacatatactatgatgaaattttactatattgtttaatattgtttgaataagaatatattgttgataaaacaagaaaagctaagaaatgattaccggaaggatagtttttatctctgtggaagggagaatcaagaaggaacacttgagagatttctgagggtggtggaagagttttatttcccatcatcatggtggtgtgttatttaagtactcattttctaagtctttaaattgtacatatttttcttcaaatacattcttttaattgaggtgaaaatcacttcacagtcaaataatcattgtcaaatgtacttttctgtgttatttagtgtattcataatgtgcaaccaaaactaacagctctttytagtttcaaaattttttcatcacactccagaaacaccctatactccattaggtaatcattccctaacctccccctaagcaggtcccctcataacttttaatctgctttttctctatatggatgtgcctgtcctgaatgtatcataaaaaggaatcatacaatttgtgaccttttttgtgtggcttctttcgtttaacataatggtctcaagattcatccaagttatagtatatatatttgagttttttttatgactaatatttcattatatgtatgtaactgttcacccacttatcactgatggacatctggtttattttcatatttcgagtattgtaagtaatgctgccataaatgttctatacatctagtttaatgtattgcaatatatgtaagatacatattgtgaaaaaaataagaaggaaaaacatcttgttgggaccgtgtgcattaccaatagtggcatgttgctaaatattgacagacacaaagataaattaaccatgatccttaccctcaagggtatgtacggaattttgttgtggaattacaaaaacagtaatctaacattgcatattttagagcatcattgtagaattgaggctcccccttgaagtagttttaaggtaatacaaattgagataacacagataattataaaatatgaagtttgtacacggatgattaagatacttggatccttaagcatgatcatgattaagcataatccttaccctcaagggtatatatggaattttactgtggaattacaaaaacagtaacctaacattgcacattttagagcttcattgtagaatcgagcctccccttgaagtagttttaaggtaatacaaattgagataatgcagataattataaaatatgaagtttggacacatgattgggtaagatacgtkgcttgcctggatgctgtgttcagctagacagctgtgatttacaggtgaattacaaaaaccaacaacaacaacaaaacaaaactacagctctgagattcctaatgatcattgaaaagagaggctagtctgtacaataagatttttttttcaaagtaaatataggttataggtagttgtaggtaagtttttggattggaacatacagttttatttttttcccaagcattctctaaaagatatgaagtcatatatccattgcctaaagtcagtaagttccataagtgaaaataattgatttcttcaattgataattgatttcttctcttccaaggtagtgattctcctctagtcttcaacccctagaaaaaggtggtagtatagaaagaggtggtattgctgtatttatttttggataagctaaaagcagggggctaattctctattagtagctaaaaacaaaaagtcctgagaaagttcgaattttttttcatatttttctgtcagaaggtacagaaaaattgtgtttattaaatctttttttttgtattttttttttttaattgatcattcttgggtgtttctcgcatagggggatttggcagggtcataggacaatagtggagggaaggtcagcagataaacaagtgaacaaaggtctctggttttcctaggcagaggatcctgcggcctaccgcagtgtttgtgtccgtgggtacttgagattagggagtggtgatgactcctaaggagcatgccgccttcaagcatctgtttaacaaagcacatcttgcactgcccttaatccatttaaccctgagtggacacagcacatgtttcagagagcaccgggttgtgggtaaggtcatagatcaacagcatcccaaggcagaatttttcttagtacagaacaaaatggagtctcctatgtctacttctttctacacagacacagcaataatctgatttctctatcttttccccacgtttcccccttttctattcaacaaaaccgccatcgtcatcatggcccgttctcagtgagctgttgggacacctcccagacgggggtgacagccgggcagaggggcttctcacttcccagnnnnnnnnnnnnnnnnnnnnnnnnnnnnnnnnnnnnnnnnnnnnnnnnnnnnnnnnnnnnnnnnnnnnnnnnnnnnnnnnnnnnnnnnnnnnnnnnnnnnnnnnnnnngcctggcgggggctgccccccacctcccggacggggcggctgctgggcggagacgctcctcacttcccaaatgggtcggctgccgggcggaggggctcctcacttctcagacagggcggccgggcagagacgctcctcacctcccagacggggtcgcggccgggcagaggcgctcctcacatcccacacagggtggcggggcagaggcattccccacatctcagacgatgggcagccgggcagagacgctcctcacttcctagacgggatggcggccgggaagaggcgctcctcacttcccagacgatgggcggccaggcaaagacactcctcacttcccagacggggtggcggccaggcagaggctgcaatctcggcactttgggaggccaaggcaggcggctgggaggtggaggttgtagctagccgagatcacgccaccgcactccagcctgggcaacattgagcactgaatgaacgagactctgtctgcaatcccggcacctcgggaggccgaggctggcagatcactcacggttaggagctggagaccagcccggccaacacagcgaaaccccgtctccaccaaaaaaatacgaaaaccagtcaggcgtggcggcacgcgcctgcaatcgcaggcactgggcaggctgaggcaggagaatcaggcagggaggttgcagtgagccgagatggcagcagtacagtccagcttcggctcggcatcagagggagaccttggaaagagagggagaccgtggggagagggagagggagagctgtgtttattaaatcttaaagctaaatatctttaagaatattctttagtaattgcttcctttctacacacagacacacatgtatatttatttatcatgagtaagtgacaggtgattcagtgccaatctgagttcctaaaggttacacagttcaatttatttgtttttattgttttgtgattagcagcaataatgttagtaatagtagatacactctcttcatatgtgaagactgatgatgtcccgtgtgcttagagctatttttctagtagtcatggtagatttgcactagtttactcattctagatctcctttaaacattatacatttgtagtattactgataatgtgtgtaaatgactgatctgctagccaagattaggtgtgtctgggtcatattttaagtgatccccttaatttcagacttgtttcaaaaaggattctatgcatctttcagtaatagagtaagacaaagtaattagctaaggaaatcaggatgactggaaaatgagcacaattgagtggcattttgtgcctggtacttttctgaccatctactggctctctcttgttccttcaccttaccctgcttgggggcttatctctgcttggttccttaccattcattcattagttcccacttgaggcatggcatttatcccaaaattcttgaacctcggtgggcttttcccccctctgcacagctcctaagggactaaggtactagggcatcttattttttcttttgtggccttccagaatagttccttgctgccctcttctggctgagaccttagggtgttgttgagcaaattttggtttttaatcctttaaattccagcaatattttggataaaccagtggttctcaagcctggctgcgtattagaatcactctggggagttttaagaaaactaccactgtgtgggccccacttttggaggttctgatttaattggtcttggggtggaggtgggaggctggtttttttttaggggattaaaatctctagccagtgattaagatctaaccactaggataaatgacccttggaatcctgaagggcttgtgctacttagatatagtcctcacatttttagatatcataatggatttttaaaaaatagcattaaagttagaaatacaggagtatttctaccctctcaggaaaagaatagtttatacaaggaatgatatgaataagcaataggatctaaggtctttgtagtgtctactaayaccagaagagattttgggaagatactttgtgttatcatttgcctgtttggttttctgtttctcaattttcatttcctctgtttctgttttaagggccaagccacaggcttctgcatgagtttggccattgacagatactagcggaagattggaggacaggtagaagggagaagccagggtattttttggttgtcatgtctggtaaaggctatttctctggtaggggcttcttgtcctttgtgactttagctcttatcagagagctcctccttccatggtccaaatgtgtgctggaaaatttcctgtattagtagctatgtcttctattaaatatatggagaggtttctgtttttttgattggactcctatttgatgtaccctgtaaatactacaatatgcttctctttcctctcttctgtgtttctacctttcctcctatctgttctttggtacttttcctactccggtgatagccacctgaattctgaacaatatttataacagttagggttagggggcattgctcttaaattggagtctctaattttatggaatgttctttctaagttttacttttttactttctgaaacttgtaaagcattcatacgatattatttcttagttggattagaaacgtgatgggaaataaaactttaatatgaacttgttgaatacagtttgttagtagatacaatttgtaatcatcctgttttgtttgtttgtttgaggtagaggtcttacagcccaggctgatcttgaactcttgggctcaaatgatcctaaccattgaaacctcttgagtagctggtagattaccagcacatgctaccatgcccaatttatcatctttttaataatgctttttgtttgttaattattttgttaagaatactgttgcagctactttgtttttaacattttgacccatgatacaaatctctcttactaaactttagtttgggtcatttaaaaaaataatagagtgcattcctttttttttttttgaggcggaatttcgctcttgttgcccaggctggagtgcaatggtgcgatctcagctcactgcaacctctgcctcccaggtttaagcgattctcctgcatcagcctcctgagtagctgggattacaggcatatgccaccatgcccagccggttttgcatttttagtagagatggggtttctccatgttggtcaggctggtctcgaactcctgacctcaggtgatctgcccaccttggcctcccaaagtgctgggattacaggtgggattacagccaccatgcccggcttatttagtctttgaaggagtattaggatctttagtttctaaaagtggcgtattaactagctctttattatgtaaccatttgtactatatttcttattttttaatttttaaaaatttcaagagcttttggggtacaggtggtttttggttacatgggtggattatatcgtggtgaattctgagattttagtttgcctctcaccaaagtagtgtacattgtacccaatatgtagtcttttattccacattcccctccccttctccccctactgagtctccaaagtccattacatcaccctgattggttttgcatactcataatgtagctcctacttataagtgagaacatagggtatttggttgtccattcctgagttacttcacttagaataatggcttccagttccatccaagttgctgcagaagacattattctgttccattttatgtctgagtagcattccatggtgtatatataccacattttgtttatccactcattggtcattgggcacttaggttggttccatacctttgcagttgtgaattgtgctgcaacaaacatttatgtgcctgcgtctttttcatataatgacttcttttcctttaggtagatatccagtagtgggattgctggattgaatggtagacctacttttagttctttaaggaatctcygtactgttttccatagaggctgcactaattaacatctgcaccagcagggtgtaagtttctgttttcaccacatccatgccaacatgtattgttttatgactttttaatggccattccttcaggaataaggtgatatctcattgcggtgttaatttgcatttccctgatgattagtgatgttgagcagcgtttcatatgttttttggccatttgtatatcttcttttcaaaaatgtcgtttgcccacttattgatgggattatttgttttcttcttactgatttctttgagttccttggagattgtggatactagtactttgtcagatgcatagttggcaattattttctcccattctgtgggttgtctgtacattctgatgattatttgttttgctgatttgcactatatttcctttgatgtgggatttatttatttagatgtaggctttgcatgatatccaaagcatatatatgtatttggtaacacagtttttgaagtcttgagttttgtgtggttttggcttaggtaatctttggattacttatttctccaatcctttttttttttgagcgaggtctcactctgttacccaggctagagtgcagtggcacagttgaaccctccaggctcaagtgattctcccacctcagcctcccgagtagctgggactacaggtgtatgccaccaggcccagctgtttttttgactttttgtagaaatgaggtctcactatattgcccaggctggtctcgggactcctggcctcaagcattcctcctacctccgccttcctaagtggtggattacaggcatgagccagcacacccagcctccagtcctcataagtggttcttctaactttctctattattgtagacggtttaaacgtctttactttaatcatttgtttaaaaaaaaaagcttcatgctgctagatttaagatgccaagaaatcatatttttgggaatttaactctgttaaaaatgaatgttgtaaactaattttattctctcatatttgtgtggagacataagatgaatcattagtaccattcagctgagtagtgtagaaaacggaattgtttttctttgctgaaagaattgaataaaaatattttcatgaagttattctttgtaccaattccatgtaagtaaggttgctacaaatatatgatttcttgacatatatgcatgtcaaagtatgtactaaatataaagtgttacttttcatacttaatactttatcttaatactttacctacagaggttttcatttaaaagcctgttcttaaaattacattaatctttcaggcttaaaattgcctttcaggtttaaaattttacttcttagttctaamctcagttataagtccctggttagggttcttctgaaacctcaatttggatttaaggatacattttctttctatgcccttttctttctgaagcacacatttttaacttgtttattgagcctttttctctacttgtgacttatggaagtagctttataaacgtgtgtgtgtgtgtgcgcacgtgcctgtgtggaattgcagcagaagtcattccttctcagctaatttcatgtaattcatttcagcgtgaaggttggaatgatctaatggttttctaagagctagactttcataataatgttacacattaaaacacataaacacagttgtatagatgttactgaaacttagaattatgatcatatgaagtagaagagttaattttacaaatttataaaaacaatttggagttggctttttacttctagctgtaacttgtttactgacaagactgagttatataaaatattttaattaagtataaaataatttaaatattttaattaagttatataaaatatcttaattaatagttggctttttacttttagcagtaacttgtttactgacaagactgagttatataaaatattttaattaagagtatttagttggggccgggtgcggtggctcacgcctgtaatcccagcactttgggaggccgaggcaggtggttcacctgaagttaggagttcgagaccagcctgaccaacgtggagaaacctcgtctctactaaatatacaaaattagccaggcgtggtggcacatgcctgtaatcccagctactcggggggctgaggcaggagaatcacttgaacctgggaggcagagatcgcggtgagtcaagatcgcgccattgcactccagcctgggcaacaagagtgaaactccatctcaaaaaaaaaaaaaaaatgagtatttagttaaagagacaactttaacattttataacagaatgattttattttgttttggttattcatcctaacaatgcacattttacaagtaataatgtattaatgcaaataaacatgattaaaatagtttcctctgtaagccataacagtgctgggaagaatccacaagaagtataggtcagttgtgaataaaaaaactgaatgaaaaatctgcttaatgaaatataaattaaaagattttaagcataattttaatttataattttttttttgagacagagtcttgctcagttgcccaggctggagtgcagtggcatgatctcagatcactgcagcctccacctcccgggttcaagtgattgttgtgcctcagcctcccaagttgctgggactacaggcgtgcaccaccatgcttggcaaatttttgttttgaaatggggtttcaccatgttggccaggctggtctcgaacacctgacctcaagtgatccaccctccttggcctcccaaagtgctgggattacaggcatgagccactgtgccctgcctgtaatttttatttaatttttccggtgatggcatgagtgaatgtccacatttaaagttattttggttcacacatggcctttgtttattatttatgagaaaaaattatagaaataatttaagggtggtacagaaatgcaaatctagaggacttaaaatgtacatgaaaactccatttgatatgacaaataatttacaggtcaaatattttaatatttatatatataatagatgccagttagcacaattgacaagttctcttttacagaaaaggccccaaaatgtcttctactgatgccagatcagttgattatctagggatagatatctgaaataagctaggccaatttgattttctcactcaggaattattttattgactaattttattagttcattcagtcagcaagtatttattgaaggcctgttacatgtttggttgctagagatacaatgatggaaaattcagataaagtttctgctcaaacaaagaaattaaattggctagacatggaaatagtggcatccaagagggaaggtctatacattagtgctgttaaggcctatagaactcctctgattcctgtcattatttaaaaaacaaaacaaaacaaaacaaaacaaaaaaaaaccttggcggtttagttatttcttcagttctgtgagctacccaagcatccttccagtctttccaataaaacggaccacctccttcttactcttatttttaatttcttaaatttgttttaagccaaaaaaccctaaccaatatataaattggacctagggtggggttttattatgtactcagcttaggtcagatggttagatgtctagtcttatatctaacagattggctatgaagatgtggaatttgaataaaagtgatagcttctttacacgtccaatcttagagtagggaaatgagcatttcacagcagaaagttttgttctgaacaaaacagagtccmttgtagtgtatatctatcatatatactgcattatgtttggttaggacttgaaaattttatttcattgcatcatgtttttgatcaagaatttgtaggaattttgtgcaacaagaggttataatgttaatacgtattaatattctgaccgaggttgaagtcttcattcttgaaagaaaaaaaaaatgcaaaagtattctgatctcagaagatatgaaaactatcactcttcagaattactggctttgtgttttgaactagctctttcaatagtttaaccttcaactttttatacttgtcataacttgtttattaaatgaatcactatgtcaccacattctatactgatttacatagagaagatgttcagtaaaagttggcatgatttaaattttacaacaattaaccatagagtttcatcataagattggtttaagtgcattcattattgcagttgcaaggttatgagttgttaatgtttcagaaaaatttttaaggaccccttttaaaaaacgttttgtgtttacatatatacatacctccttcatcctaggtttcactttctctagtttcagttagccaaggtcaaccttggtctgaaaattgatgagtacagtataataaaatattttgagagggagagagagaacattcacatggcttgtattacaatgttattataatctatttaataattatttttttttaagagatggaggtctcattctatcgcccaggctggagtgcagtggtgtaatcatagctcactgtagccttgaactctagggctcaagccatcctcctggctcagccccaagtagctgggattacagccaagaaccaccacacctggctattttattattgttgctgttaatctcttattgtgcctaatttgtaaattaaacttaatcataggtatgtataggataaaacttagtacatatgtagtgttcaatattgtttgcagtttcaagcatccactgggggtcttggggcgcatcccctggggatagggtgctgggactactgtgttccttacacagtttcatctaatgttaacattttgcataaccatgggacagttattcaaactaggaggttgacatatatgttattaactgcaggccttatttgaattccacgtgtttttcttctaatgcctttcttctgatcaggatataatccaggattgcacattagatttagttgtctttattctgcagtctataatagttctgcagactttttgtcttctatggctacactttgagtttgtacaatgtgctctcatgattgggccagagttatgcatatttgacaacaatatcacagaaacaatatgtcttttgtcatggcgttcacgatgtatgtcttctttactggtgatagcaaccttgatcacttgttaaggtggtttctgctgggtttctccactgtaaagctatctttccatttgcagttaataaatttcttgggagacactttgagactatgcagataaaatctaaggatctttctttgttcttaaaatttttttttaatttgtgtaaatttatggtcttttttttttttaaatctaactaattaccaagatctatggatttatcattcaaaatcaatctttccttttttttggatcaagtttagatcagtttccttaaattcattttatcattcaatgatcaagtatgctaaaatgaaaaacgctagggatgcgaaaatgaacaagatgtaaatcttgtagtatcacctaatagtaggccttggcattagacagatctgatttcaaaccctaaattctaatcttggagtcctgtgaagttgtgcaagttgcttacctttgttgggcctcaaattacctcacagaattattagtaagggataaatatgaaattctagaaaggcaaaactagtctacaatgccagtacattgttgattgccttgggctaagagtgggaagttgacccaaagggagctgaggaaccttttgggatgaaggaaatatcttctatcttaatttttttcccaaaaccttatagtgtacatttgaagtgagtatattttattgtaggcaaattatattttaatgaaattgatttgaaaaccaaggtggttctccttgaacccagttttccatttaatgggataaaatatgatatgtagaattcataagtcttaaggttttagaaatcagtcgtctagctctcccttatccagaggagtcttgtgacaatttagcatttgcagagcaatttaagagtttaagtctatagttgtgacagagtaagaaatatatttttggtcctacccccagttcctgacacagagaacatgaaagcccttataatttcctgagttgtaggagtactgtcctatattctgttttaatatttggtcattgaccctggttcctgtctcagaactcctaaatccctttaaatttttggggtgatagtagagtcttttgttctaatggggtgacacttgggctcctgcatagcttcagaatgggggctggtcaccagaaagtccacaccataattagaaccttggaaatttcagccccactcccatcttctggaaaggggagagggactggagattgaattaataatcgattatacctacatgatgaatgctaaaaattattaaactgtgggatttggagagcttctaggttgcattgaaatgagtccagagaggccatgggagttctgtgcacctcctctaccttgccttacacatctcttccatttggctgtttctgagttgcattcattataataaactggtaaatgtaactaaagtgctttcctgagttttgtgaattgtcatagtaaattatcaaaccaaatggaggatgtcatggaaacctctgatttataaccaatccaaacagaagtttgtgaataacctgaggacccctacttggaactggcatctgaagtgggaacagtcttgtgggactgaacctttaagctgtgggttctgcactaactctgagcagaattgggttaaattgtaggacagtcagttggtgactgcagagaattggagcattgcttggtatggaaaacccacacattaagacccactggtgtttctgtgtgagtataggagaaaaacaatgttttcatttagtagtcatcgcattttggcatgtctttaggtctgagactctcaagttattctttttcttaagtagattccaaactcaggatctttctgatctcttttggtctctttagaatattttaaattgattatctatggagtttgattacctagaggttcaaattgactgaagtcaacttcttgggactcctttgagtacagaattttattcttccctttgcaaccacagaactggctggattctggtgagctcctgaaagttattatttggtaatctgtagtttttaagatttgttcggttggcatacccttatgtatctacatgaaccttaaatttaatttattctcttccaaagtactcaaagactttggtagagaaaaaagttttatacgcatattttaaaatcatgttactttccatgtgatctaaaagtcattttctgtggaaaagagatcagtgttttaaaattatagctttttctttttttttttttaagcttttcctattttggtggtaggcaaaggaagaagtactgttgtaatttatagtgctcaaaatgctaattggctgcataaaaaaaggcaccttaatttttcttttctctgattgagataaaattatttggtagctcttagaaagaccaaaggctgaggggaggaagctgaaatgatgacatatagctatgtagctactaatatatgtaaatagaaattctgaatctgtagataatctaaatgagactgcttaaagggaatggcagagcttttgactcacatgtagttagtgtagttaataaaattttgttgatatcaagatggcattaaactgttggataaattctaaatatgtgttcaatttaaatctgaggtaatttttacagtttaaggcattgtttattttataccttttaccaaatgctatgatatgcttttaaatgtaactgatggcatttagtaaatctttatatgtatttaaaagcattatcaatggaaaagtttataaattttgttctctggttatacaactgtgagagcctattttaagggtgaagtacaggggctagtaactaaaaatcacgacctttctactggctatttctacaggctgtaaattttggccaaatactttggaggatttaaatagttctcatgagattcagctttacaaatccaaatttaaagtgccatggcaaatgtatctttggtattttttgtcctaattatctagcataaaaccaaagtgtacatttattaaatgcattatgattattagactgaattgctgcaatttacgtatctatagcagaaacatagtttggaataatagatttaaagtttctgtttctattcagtggcagatgttaacacattctaagttggaaaccctcatggtaatagattttgattgagaacttgtcagtcattgtagcagctgctttagaccacatttatatttaaataggagaaagtgatctgtttagaatttttaaagttgttgccatggcaaagtaacttgctatttcatctttttatctgccatcgaagtgatctgtctggctgcttattcccaggagtaggggggatgaactgttctgttggaaagcttatattaggacaatgctgaatgcttcctaatgggatataagttagaaagactaaagctttcagaaaccatggctttggttaggtataattagaattgatttttttctcaattaaaaacaggcaagataaagctaaaacattttttaagaagaaaaatatgagcttaatttaacaccacttttgacaaattcaatgaataacatattcaaattaaatgctatgaaaaagaatttctttgaatgagtctattatttctgtagcatgaaacactttgtaaatccatcttttctttataaaattgtatawatatatatatatatatatatatatatatatatatatatattttaaatgcccagtgtctcctgctgcccattttttttttacttgttctcttgaaaaccatggcagtgggctgggtgtgatggctcatacttgtaataccagcactatgggaggccaaggccagaggaccccttgaggccagaagttccagtccagcctgggcagcatagtgagactctgtctctaccagaaataaaaaatgtgccttgtagtcctagctacttgagaggctgaggtgggaggatctttgagcctggtttttcaaggatacatgagctatgttcacaccactgtgttccagcctgggcaacagagagaaaccttgtctcaaaaaacaaaacaacaacaacaacaaaaaccatggcatcataatctgatttggtataaatgattttgtgtttcatatttactttgattacattaaatttcttaaaaggaagaatattagtgcagttcttttcaggctaataattacctacatgatggatattaactccatactaaagcttaatttttttatttgtttatgtcatcagacaatgtatacactagtagtcaaagccacacaaattgagggtgattggcaagtggcaaattgtcatttgccaacaaagtcctcccgaataaaagaatttgactttcagaggcacgcacaagggagtgagaagatttgcaccagtagttgtatattgtaaggctgacatgtctttgattaacttgagatattttgtattatattggcttggcagctttaaggcatactgcatatttgtaatgtcatatgctaaaataatgtgactattgtgacatttactgagacaaaattatgatttcttggtcatctgagcatatggaagaccatctaataaaatatcaagtcttgtacttaaaaggaagatactcacttaatacctaagcagcttttcaaataggaaaggacttttaacctcaagcccaagagaaagcaaggcagtgtcaaatttatcaggtcttctttctattctactggctatttggtaatgcttttatggctaactacttgagagaaatgagtacattagctgaaggtaacacttattttgtttttcagagatgcagaaatataaagatacggagaacatgagaagttaaaaagcaactaaaggaaagtttgggtcattgattttgtggtttcagtacagtcatgtaccacataaggatgttttaatcaacaaacaactgcatatacaatggtggtcccataaaattatagtaaagctgaaaaattcctatctcctaatgacattatacctgtcataacttgtattgcaacacatgatcttttctatgcctagatacacaagtaccattgtgttacaattgcctaaatttagtacagtaacatgctgtataggtttgtagcctataagcaataggctatagcatctattaacaggtttgtgtaaatgcactctgatgttcgcacaatgatgaaatcactgaataaaggcggttttcagaacatctatctgtcattaggagatgcataactgtacacatataaaagctaataaaaatcttacagaaccctaaatatttgtaagttttaagtgaattttaagaatttatcatgtattatgcatgttttaatcacttaaatattgggcagtgtctcagagacaaattcagatatatctctgctaggtaagttttactcaaaaagggaatactcatgagaaatttttaaagaggcagttttctatttagtaagtctggaataccagttttgaaatccttaataaatgtcctttttcttgaatcctcatatccatatatggccacaaattagactctctgtatttgaatagactagcatctaaattatcagatgatactgtggttaaacatttagtaagtttgtggttgtataatttggcatgttgcagaagatctgaacattgagaatatatagttcataattacattccaactgaataattacatataataatagaaatggaattttaaaaattaagaatataatatattgatagtggtaaaatagatgcaggactgtatctcagtcccttttgtctaaaaggagaaatattttatttgaaaaatactgattcctgattcctaagggtttttacttgtgaatcttttttttttttttttttttttttgagacaggccctcactttgtcacccaggctggagtgcagtggcatgatcttggctcactgcagcctctacctggactcaagcgatcctcccacctcagcaccccaagtagctgggattacaggcacgcgccaccacacctggttaatcttttttgtagagatggggttttgccatgttgcccaggctagtcttgaactcctgagcttaagcaatccgcctgcctcagccccctaaaatgctaggattataggcgtgagccactgccgctggctgtgaatctttattcttatttgcttttcaattatttttcattgtaataaaatatacgtaaaacttgtcatttaaaacaatttttaagcgtatatagttcattaacattacgttcatagagttgtgcaaccattatcactatctatttacagaactttatcatcatgtcaaactcaaactctgtacccattaaacaataactttccattttctccttcccccagcccctgggtaaccactgttctatctctgtatgtgaatttgactattccagatatctcatgtaaatagtcatatagcactggattttgtgttcgtattgttgtgtcttttttcactcaacataatgtcttcaatgtttattcatgttatatagcatgtgtggaatttcatttttaaggctgagtactattacattgaatgtatacacattttgttaatccattcatctattcacggayacttggattgcttctaccttttggctttttgtgactagtgctgccatgaacctgggtgtacaaatatctgtttgagtgcctgcctttacttcttttgactgtagacccagaagtggaattgctcagtcatacggtaattctatctttcactttttgaggaatcatcataccattttccatggcagctgcatagttttacatttccaccagtaatgcacaaggattccagttaattcacatccttgctaacacttgttattttctttctttttttagtagccatcctaaaggtcatgaagtatattcttatttgtttttacttctgcataagattaccctgtcttcactggatatgctatttcttctttggaaaatcttgctcaatataaaagacaaattacttagataaggtatggcgagaaaaagctcaatgtatttgttacattaaggaggaattatctctaaaaagagaattgctaaataagttcattcattcattcaaaaatgtgtattgaatgcctgctcactctatgttgggcaatgtgctaagcattgagtatacagtgataaatgagaaaatcatggcccctgctttgagggaacttgcattgtagtgggagagacatatgacaaattaatgaatacaaaattaaaatataactgtcatgaaatttatatgacattgtgccttcaaagacaatgtatacaatattcagtgaaaatagtaatattaaataaagaatatatattgcaagattgtatttataccaactataacctcatttttaaaaatgcttgtgaaagaaaacaatgtcaacaaaatgctaacartggttctaggatgatccaattcattgattttttttttcttaactaaaatttcttcagtgtgcatatattgttaatttagaaattgcaaataattacataaacaataaattaataatttagggatgatgtttaatttgactttcctgttgycagtggtgaccaaaaagtgctaagtattattgaacattttatctaccttaattatgccaagtaaatccagggcttattgtgatttataccaagtaaatccaaggttttttatgattgaatgttaattttagctctaggaaggtagttcttatttttggtcagtttgcaatactattaggatatcggggacaaaatggaaagtatgattttaaaaactgctcagtatttattaayggaaaattgtcatttttataagaaagaaatagtggaaaattcactatagttctttctggctaaaaagtgtgtaatatatgagtatataaaatatgaattagtctgttttcacactgctataaaaaacacctgagactggataatttataaaagaaagaggtttaattgacatacagttccacatggctagggaggcctcaggaaacttacaatcatggtggaaggcaaaggggaggaaagcaaggtatggtcttacaaggcagcaggagaggggtggggaactaccactttttaaccatcagatcatgtgagaactcactatcacgagaacagcatgggggaacctgcctccatgattcaatcacctcccttgctccctcaacatgtggggattacaggtccctccctcaatacatgggaattacaatttgagatgagatttgggttgggatgcaaagccaaaccatattccaccccagacccctcccaaatctcatgtccttctcacatttcaaaacacaatcataccttcccaacagtaccccaaagtcttaactcattctaacattaacccaaaagtccaagtccaaagtctcatctgacacaagacaagtcccttctacctgtgagcctgtaaaatgacaaacaagttagttatttccaagatacagtgggggtacaggcattgggtaaatgttcccattgcaacttggagaaattggccaaaacaaaggggccataggctccatgcaagtcagaaacccggccaggcagtcattaaatcttaaagctccaaaatctcatttgattccatgtctcacatccaggacacactgatgcaagggataggctcccacggccttgggcactctgcccttgtggctctgcagggtatagcccttgtggctgctttcctgggctggcattgagtgcctgcagcgtttccaggtacccagtgcaagctattggtggacctacctttctggggtctggaggacggtggcccttttctcacagctcaactaggcagtgccccagtggggactctctgttggggctccaaccccacatttcctttccacaccgtcctagcagaggttctccatgagagctctgcccctgcagcacacttctgcctggccatccaagtgtttccatacatgctgtgaaatctaggcagaggttcccaaacatcagttcttgtcttctgtgcacccacaggcccaacaccacatggaagctgccagtgcttgggggcgtgcaccctctgaagcaacggcctaagctgtaccttggccccttttagccacagctggagctggagcagctggaatgcagggtgctctcctggggctgcacagagcagcagaggcccagctgatgataccattgttccttcttaggcctctgggcctatgatgggaggggctgccatgaagttctctgacatgctctagagacattttctccattgtcttggccattaaatttggctccttattacttacacacgtttctgcagctggcttgaattcctccccagaaaatgactttttcttttctaccacaagtcaggctgcagattttccaaacctttagactctgcttcccttttaaacaaaagttgcaatttcaatttctttgtgaacaatatgactgaacgctttcagaaaaagccatgtcaccccatttttgttttttttgagatggagtcttgctgtgtcgcccaggctggagtgcagtggcgccatctcagctcactgcaagctctgcctcccaggttcacgccattctcctgcctcagcctcccgagtagctgggactacaagcgcccaccaccacgcccggctaattttttgtatttttgttagagatgggatttcaccgtgttagccaggatggtctcaatctcctgacctcgtgatcctcccacctcggcctcccaaagtgctgggattacaggcttgagccactgcgcctggccgccatgtcacctcttgaatgctttgctgcttagaaatttattctgtcagataacctaaatcgtctctctcaagttcaaagttctgcagatctctagggcagaggaaaatgccaccagtctctttgctaaagcatagcaagagggacctttgcttcaatatccaataaattactcgtctgcatctgagaccacctcagcctggaccccattgtccatatcacwatcagccttttggtcacagccattcaacaagtctctaggaggttccaaactttccctctttctgtcttttcctgagccctccaaactgtcccggcctctgtctgttacccagttccaacatcacttccacattttcaggaagcaaaaatgatttcactttcayatgatctctatagcagtgccctactcctggtaacaattttctgtatcagtctgtttttacactgctgtaaagaatacctgagactgggtaatttataaaagaaagagggttaattgtctctcagttccacatggcgggggagatctcaggaaaattaaaatcatggcagaaggtgaaggggaaacaaggcatgtcttacatggtggtaggagagagagtgcaggggaaactgccactttttaactatcagatcttgcgagaactcactcactatcacgagaacagcatggggtaaaccacccttatgatccaatcacctccctccctcgacacatgggattacaatttgagatgagatttgggtggggacacaaagccaaaccatattaaaatagtactgaattttgaataactgtaattgtgaattgatgttaaaatctgattgaaagagtacatcttagcacaacaatacggtatattgcctagtaatagaataatgcttcaagaaggagctctggagaggggacggggtgcttatttaaaaaaaaaaaaaatttggcaaggcaaggcacggtggctcacgcctgtaatcccagccctttgggaggccgaggcgggtggatcacaaggtcaggagttcaagaccagctggccaaggtggtgaaactccgactctactaaaaatacaaaaattagctgggcgcggtggcgggcgcctctaatcccagctacttgggatgctgaggcaggagaattgcttgaacccaggaggcaaaggttgtggtgagctgagatcgcgccattgaactctagcctgggtgacagagcaaggctccatctcaaaaaaaaaaaaaatttcaacttagtaataaccatttattagatgcctgatatttatcatacattgcatgaggcattagcatgcagtatttctaaccttgtaaaagtaggtagtatagatgagaaaattgaagcccaggagagtcagttaatttttccaaagtcacaaattaatatgtatatttggagtgaaaaacagttattaagagagaagctgaaggtgatttccaataagccctagaaatggatgtttccrtaggattctgatgtctgattcagaattactagctacatagtaatctgacctgcccagtttacaagataactagcttggaattcatttggtttcctcgacgctttctagcaggaagcttttctcaagaagcaatccctgcattgaagtgagagaaaatggaggtcaggtgactaattagagtttggatgtataagaattcaataaaaggaaggaaaagtagatattatttaagatatgctgagcttaatcgtgttttcttatgggatttaagtagcttcttgtgatttaaatgtttaaaagaaatgtaaggctggatgcagtggttcgcgcctgtaatcccagcactttgggaggccagaggtgggcagatcacctgaggtcaggagttggagaccagcttggccaacacagtgaaaccccatctctactaataaaatactaaataaaaaactaaaatactaaaataaaaaattagctgggtgtggtggcatgcacctgtaatcccaggtactagggaggctgaggcgggagaacctgggaggcagaggttgcagtgagttcagatcacgccactgcactccagcctgggtgacaagaagaaatctccgtctcaaaaaaaaaaaaaaaagttatgccgtttcttacagataggagttgagtctaattgaatagaagaattattcattaaaaagtatcctgttagcatttataggaaattaaaaagatatatcagactcccatagtaccctaaacgtttatatccatttattctgttttggccaggcgcggtggctcatgcctgtaatcccaacactttgggaggctgaggtgggcggatcacgaggtcaggagatcgacaccatcctggctaacacggtgaaaccccgtctctactaaaaatacaaaaaattagctgggcgtggtggcaggcgcctgtagtcccagctactcgggaggctgaggcaggagaatggcgtgaacccaggaggtggagcttgcagtgagccgagatcgtgccactgcactccagcctgggagacagcgagacttgtatcaaaaaaaaaaaaaaaagtatatatatatatatacacacacacacacacatatatatacacatatatatacacatatatacacacatatatacacatatatacacacatatatacacatatatacacatatatacacatatatatacacatatatacacatatatatacacatatatatacatatatatacacacatatatatacacacacacacacatttctaacagaatcccaatttcaatcttggtatacatttaaaatagatttttggaatacatttgaggttaaatttccttaaaaaataacaacaacctatgttgtttgcttgaaaaatacctggcaggagcataaatggcaatcttactctccttagtttagagagatttcatctgtaagaaaaaattttcaaaggccaaaacttctaaaccttttatgatatttttactacatgcttgttcccccttactgtaccttaattcatggtacttaaaattttaatctacagcaaccagccaaagaaaccaacaatttctgttcaactagaaggtaggaattgacacctgtgtttttgttttttgaaaaaacacaaattattcttcttttataaaatcacctaaattgtgtgagctttgcttgacatgttaatgtgatcattacctgttagtaatacactaatgagcttggcctcttttttttttttttttttaatctcccacattttccagaacagccccaatttgttacaatcaggattattttatctgctgtatttgctaagtattattttactctccttcttaatttattttattaaaagtgattttcttaagtatgtgatttaaggtttatcagtgggttttattttcaagtaacttcttatataaatatttatctatgtaaatttataacagaaaaggccttttctggactgtgttttgttacagttttcttagttatactttgtcagcttcagggctgcattaagttccactaggttggtatcttattgcttgaaaattgttctatcgaaacgtgctattaaccagccagtcttccgattctctcacttgtagtaggcagaataatccgcctccctgcaagatgtctgtgtcctaatacctggaatttgtggatatattaatttacgtgccaaaggagaattaaaataacaaatgacattaaggttgttaattaggtatctttaaaataagattattttggattatctacattgcccagtggtaatcactagcatccttaaattgtggaagagggacccaaaagtgctatttgagaaagactttattagccattgctggtgttgaggatggaggagtgggaagcatgaacaaaggaattagggcaacatttaaaagctggttaaggcaagaaaatggattctccctctagagattccagaatgaaacagccctgctgacatcttgatttttgcctagtgggactcgttttagttttctcatccccagaacagtaacataataaatttgttttcctttaagccaccaaattatggtaatttgttatgacagtcatagaaaaataataacaccacctaactgtcatgacctttgcattttgtcactcaccataggcctgggtagatactccctgttctgcctgggactgcttttttccctccctgatttcagagctactgttacacgctttccaccactattaaggttgtgatagccaggttttttttttttttttttttgagatagagtctcactctattgcccaggctggagtgcagtggcatgatcttgactcactgcaacctccacctcccaggttaaagtgattctcctgcctcagccctccaagtagctggaattacaggtgcccactgcctgccgccacgccgggctaatttttgtattttagtagagacagggttttaccatgtcatccaggctggtctcgaactcccgacttcgtgatccgtatgcctcggccccccaaagtgctgggattacaggtgtgagccaccatgcctggcccaactagggttcttatttgcaggcaaaagaatttactgtagctagtttcagcaagattttaaagcatagagaattgttaggagggctaaaggagcaggttgagcttccaggaaaggttctcaaaaccatactgcagaatcagcctaaggaggtgataataatgctttgttctgaaagccacagagtcaggtagctcctaccccaggttccagatcattttggagatctggctgcagattatcttgcctcttccttgacctaaatcttcagtggtccacactgcaatagactgtctgactctgccattacctttctgatcttatctcctgttagtctgtctctattcactttgttctaggaacatcattgtcttgctgtttacaagtcaaatggccctgtagcaggaacatgcctgtaattcatgacacttaaaattttaatctacagcaaccattcaaagaaaccaaccatttctattcaactagaaggtaagaactgacaccagatattgtaagaaattggggctgttttggaaaatcttccctttttaccttttttgtctgtggccactgaatcaccattcattttttcaattacaattcatatgtccaggatgagagagactcctcgtccatgctgatccaaataaaggttgctrgtctctctcacctcagctccatttgcagtggggatgaagatctgtgggaaaatgaaagggttttctttttcagttacatcaagaagatggaaagtaagtttttttaaaaatagccttttctaaactttctgatgactgatggagccatcatttgctcaaacaaggaaagatgtagcaaagggaagacttgttatgtaaatttaagccaccactgagcccagaacacccagaactttggaaattggctattgccatgtctggactgcgagtatgggaaggggacactgttctgtctgttgtccccgctaccgtccctctctctcagtatcaacgtagatccagacattctgctttgcttacctccaacctgactgttcccatacagagttgtgttaagcctccttacatgctgttagtgggaaataccaaaattttgacaaactgtccagtgcattaattgtcatttatacacttgtattaactctcattttgactccacaaaaagtgtaatgttggttcgagctcgagaaggaatctggattctggtagctttgcccagaccttgggaatcctcctcctcaatacatttaattaatgaaatgttacagcgaattctaaaaagagctaagagatttgttttcactttaatcgctgtgatcattggcctaattacagtcactgcactggccactactgccggaatggcrttacatcaatctattcaaacgggtcattttgttaatgattggcaagccaattccacccaaatgtggaattctcaacaaggcattgatcaaaaattggctaatcaaattaatgatttaagacagtctgttatttggcttggagattgggtagtgagtctcgaacattacatgcaaatgcagtgcgattggaatacttcggatttctgtatcaccccgtattcctataacgagactgatcattcatgggaaacggtcaaagacaccttctgggcatgtgatcttaatggtaagagtttcactactcagtcctccctttctttctggtgcggaggcagacacccttaaaaatggagatttcctttatagatgtagatttcttttataaacatgtttcaaaatagccagctaaaagacagaaaggtgtattttagagaccaatttagttcagtagacagtctttataacttagctatggttttttaactaaaatgactgakcttagggctaagcccattaactaatagggcaaagaaagtattctctctacctggactccacaaggatagctcttataaagaagcaagcctattttacctgagggcttaccttctattagcaaacactttatccacctttattttcacattcaggacagtatagtaatttagccaaaagatttgcagattcaatttttttaaatcaactagttccttaagctttttatttgctttttataaagaggctttcaaaagaagcaataaaaatattgcaacatttttagaagcttctgcacatcaataggcatccttgggtcagccaaattcaggagaacttatttatttattattatactttaagttctgggatacatgtgcagaacatacaggttcgttacataggtatacacgtgccatggtggtttgcagcacccatcaacctgtcatctacattaggtatttctcctaatgctatcccttgcctagccccctagcccccagcaggccccagtgtgtgatattcccctccctgtgtccatgtgttctcattgttcagcttccacctatgagtgagaacatgtgatgtttggttttctgtttttgtgttagtttgctgagaatgatggtttccagcttcatccatgtccctgcaaaggacgtgaactcatcctttttatggctgcataatattccatggtgtatgtgccacattttctttatctagtctgtcgttgatgggcatttgggtgggttccaagtctttgctattgtgaacagtgccacagtaaacatatgtgtgcatgtgtctttatagtagaatgaattataatcctttgagtatatacccagtaatgggattgctgggtcaaatgatatttctggttctagatccttcaggaattgccacactgtcttccacaatggttgaactaatttacactcccataaacagtgtaaaagcattcggagaacttatttttaaatgcagttcttaaaatgcaatgttgtttatttggaacattccacagtaatttaagattgttgtttgtatgactttgccattttttgtgaacatttgctgcttctggggcctaaacrttctatgtgtaaatgtagatgtagctagaaggtagagtactcagttcttcagaaattaagcatcacatttttacgttgaatcttggttttgcctctcagatttctttgatcagcttagccagtgatttttcctacctaagcatgcaagwaaaaggatcaaaggggatagaataaataaatccctgtgaattttcaaaagctagagtttgtaccccctgtagtattgccatttatcgccagtttttgtttgacccagtcagatatttaaggcctctagccagattcaatccagataattattggatcctgtccagtttctttttttttgaaacggagttttgctcttgttgccaaggctagagtgcaatggcgtgatcttggttcatcgcaacctccacctcccaggttcaagcgattctcctgcctcacctcccgagtaactgggattacaggcatatgccaccatgcctggcwaattatatatatatatatatatatatatatatatatatatatatatatatatattttttttttttttagtagagatggggtttctccatgttggtcaggctgatctcaaactcctgacctcaggggatccgcctgcctgggcctcccaaagtgctgggattataggcctgagtgcccagctggaccctgtccagtttctgttgtgacttctgaaccaagttcagataaaaaatttactcaaacctgtatagctcaaaaccgcaaaatcttggattctgaagctccactgagagaacttacccacagtctctggttgttgtgagagaggaatggacagaatgggcccagtgggtatttttcttggtcactggctgctcttggggcttgctagatgctccacttcatgtctcactctgatgccatctgttacaaaaaaagactttagacgaatttaacagagtttaattgagcaaggaatgatttgcaaatctggtagcccccctgaacatgaaacatgataggttcagggtgactctagggttcccacatggtcagataatatttaaggacagaaaaaggaaaatgcgtacagaaaacagaagtgaggtacagaaagtgctgtattggttacaggttggtgtttgccttatgtgaacagggattgaataggtagcctcctgtgattggccaagccttgtaattggtacaatagtaggttataatgtatttacacatctacttaggttatagttcactatatccagaaacctttaggctgaacctaaaataggtgaggaggcagcttcaggctatgcttaatttaacaacataaagagcttatatttgagttaaacatactaagcttatatctcaagtatgccacttcctttggtaagaagcttaaactttccaaggctctgttttctcatctgcaaaatggagataagacttgtacctcacagagttgctgtgtggattaagtgagaaaatgtatgcttagtgtagtttggctctttactactcacattaacatattaatagaagaggataaagtatgtacaaaatgctctttctaagaaagaagacacattttagtaatcagaatggcttaaatatactttaagccaagggtccccaaccccagcgccacggactggtactggtttgtggtctgttaggaaccgggctgcacagcaggaggtgagtggcattatcgcctgagctctgcctcccgtcagatcagtggcagcactagattctcacaggagctgttaaccctattgtgaactgcgcatctaagggatctaggttccactctttaagaaaatctaatctgaggtagaacagtttcatcccaaaaccactcctcccactccccattccaccactacccccacccccaaattcccccactcctccacccctgttctgtgaaaaaattgtcttcctcaaaactggtcctgctgatttaagccttaaaaagagtaggttttaacattctcatcttgaataactcatgcgctgaaaatttgggttacttggagtttgtaacactttaattttctctttcttttttttttttgtgtgtgtgagatggagtttcgctcttgctgcccaggcctggagtgcaatggcatgatctcggctcaccgcagcctccacctcccgggtccaagagattctcctgcctcagcctcccgagtagctgggattacaggcatgcgccaccacgcctggctaattttgtattttagagacggggtttctccatgttgatcaggctggtctctaactcctgacctctggtgatctgcacgcctcggcctcccaaattgctgggattacaggcatgagccaccgcacctggcaaattttttgtttcttttatgcaccgtataggggaagaaaaatatctttttcttttaccagtcttggattcattggctggggccctttacaagacagatgcacaagacaaaaccgtacaaatttagttaacgtaagttttatttgacacaggagccttcataaggaaatgaagacctgaagtagctgaacctgagtgtttttattctagttttgatgaaggggaagattgtagaagaatttaataagataaaaagtatgagctaactgtaataaactgggggaaacttagcaaggcctgtttgttcacattcttcttggcgtctgtgtctatgttcctttcctcccagtgtggggagggtacctctcacagaagagtcttatgactggcatcaggggaaggtcaccaagtctttcctgtacatgctgtttatcaaattcattcatctcgaagtattcagtatgccaggtactgtattttggggtagcatgtcctaaaccctcatcaactgactttcatttcaaaagcttttaaatcccctgtgataaaaggtacagtttgtaatgtatgcaaccatacttagaaatctaaaaactgataataggatttggcaggggggtaccccatattgattacatatgtttatctagtgctttgatcaaaattgtttccctttgaaaaatacagcagtgttgactttggtggggcggtgggcggggggttgttcctgcttacatgtctgctgaagcatagtattttaaggttttgttttctttatttatagataatttaaaagctgactagttaccctctccttagaggctttgtaagtgcattcttatcagtaagatacatgtttactatatgactcagctagattctatatagatagtgtccttgtatcattaccagtaccatataaaaatactatatggatatataggggtgaaaacataatttattttctttccatttttagatttttagttgagacattctcttgaaaacaaaagtcagattaacaaaagaaaaagaagtttattaaagtgtgctgtacctatcacttgggagaggcctcagttcaaaagtgtatctctttcaaggcagtggcatgggggacttgcttaaatagtatcttaacaaaaagccagaaattctatatagtgacaagacaaaaaagatttatcttcaggcttccaaaaggtggggtaatatgggaacacatatttactactgctgtctctgagctgataagcagtgttgcaaaaggggcctagctttaggtgagaaaggcagcgagaaggggtgggcaaagtgtgcccgttttgttaagcttttaacttaaactaaaatccccagtattttagagaggaaaattttgttttcctccagatacttaacagtttataaatctagtgttctaagaagtatgttaaaaaaaacaccttattcctgcttccatgtgaattatattacctatgaagcatcattgtacatttatgtaaattcacatttgctaaatcacactgagggaaagcttaatataatcatttcatcattatataatccattcagtatgattgcatttcctcctgatgcaatttgataaacttgtgtttgtatagctgcaagataatgttccacagataatgcagttttatacattttattttcaatgctctttagtgggtgtatgtgtatgctatgtagagaaattagatgaagtttctcttaacttcattatgggcaacaaaattccttggctttgttacagtttactaggccccatagtgaaaacacctctgagtgtaggccaattctagaatacaaaattacttgtgatcagagctgtaatatgagattgaaatttgttacacaaagaggttactatcctttttttgaggataattaaacaatttgtttctttaaaacaaattaatagtgattgtttcaggatagtataaagtacaatttaatctttaacagtgagagaggctttgtagtggggtctcagtggttaagtccaattctgggacaagtaaaaatgttttagggtcttattacagaatgaaaactatattgtttcttaaggaatttaatgaactaaaaaacatttttgcttaacactcttgatttgtagtacatcgaccaagtatcttcatttaacagaaagtacatacttttgttaaataatgaagttttctggaaatctgttaactaagggtacttagagtaggaatgtgaatatttcaaatttcaaatcatccttttcttatgacaaaactctttttgtagcattacactgctttagaataaagttcattaatgcttgcttaaaaaaacataaggggtactgtatgtgtcaaaaataaaaagttggaacttcataaaattataggatttttttcttcctttcccacctctactgttttgtcattgctctttgagatgaaagagtctaaacctgtatgtttatttaactgttggatttcttgtttctcaattaggaaatgaaagcaaaaatctacacttgattttataattgacctatttgttttcaaaagtatgcacataaatgtcaaaatttaagtctaatgtaagctatttaccctaagcattaacatatctgtgtaaaaatggttacccatattgcatgtttaattaccttggtgtttaagagctctgatgaatattaataatttaccaggatttgatctggaattattttcactctgtgatattagaaaactcttaaaaacaccaacattatgttttatttctgtcactacatagcaattcctgggcaacatagaggtgacatgaagagtaagagagaaaggggattagatgtcgacacttgggattgagctgttagaaatagtatgtttgtctaaagagaggaaatgaaattttttttcttttttctatgcataagaaatgaaattttgtggggtaggtgaggagatctctggtttgtgatcttctttattgacttaatgcattctttcaatatctataggaagttatgtcagtaactggtagataaattctggcattacataccaaacaggagagacaagcttctgccttcattggagcttatattctctttagggatagcaaaaaaaaataagtaaataagacaatttcattgactagtaagtgctatgccagaaataacagagggtagagtgataaagaatgattggtggagtgattttagattcagtgctctggtaaggtctctgaaaaggtgataattaagatgatgagaaagcaccaagtggtggctggtttcttaaaatgaggtattaaattacctagatcaacatattggataaaatatataatatttaaatgctttaaactcttaagctctaaaaagatagccatttttttaatgatagcctgtaactaggtagggacagtagataaggatggtttaatgctgtgcagaaaaggaaaacgaaatggaaagagatttttaaaagaagtaccaaaggccaggtacagtggctcatgcctgtaatcccagcactttgggaggccgaggcgggcggatcacttgagattgggagttcgagaccagcctgatcaacatggaaaaaccccgtctctactaaaaatacaaaattagctggtcatggtggcacatcccggtaatcccagctactcgggaggctgaggcaggagaatcgcttgaacccgggaggcagaggttgtggtgaattgagatcgtgccattgcactccagcctgggcaacaagagtgaaactctgtctcaaaaaaaaaaaaaaaaaaaaagtaacagaagtatggccatagactgcctttcataagtatttgtgttgcaggtacatgtagcccatcttggctggagatggtccagtctcatactgtcccccaaagcaaatgtaagcctctacagatgagacatattatcctagacctcagtgaacccctacaattacattttccagcaagtagtcaaagataacaaagcatatggagaaacagacaactgaaggagaaccagcaaaaagagacagcagaattggaattccatagacttgggatattaaaaatattagacacatatttaaaataactatgcttatgaattataatacatatgaagatatctccaaggaaatcacaaaaagcagcatagcagatttgaaaaggaaccagacaaaacttttggaaatgaaaatcccagtaactgaaatttaataagcctggttttgtgttgagtactttgtatcaaatgaattctcctactgaaaccttataaacgttaggccatatatatatatacaacagctatttgaaagccttggagagcagccggtgtaggttcgacttgagggtctgtgattcttgagaaaagagaagctcatgaagtgatctccatatttattctggtcttttccttgagggaattttctaattctcagtgccagatggagatcaagcaaaaagaaggagttttacatggctaaggagcccagagaggctggtaacggaggcctaatcgtgggggttgggggtgagaggagaactgcagagaactgaatattctgcacataatatctgcatataagttctccttcaagtatggtagtttaatcactacccaggcccagggcaggatttctggaaacccatctgataacagtgactttgaggcttaagagctgagcagaaatttcagcaactttgaaatacagattgagttcgaatgcataagataactagtaattggtacactgaagccattatctaaaaagtatatcctttatgatatattcacctgtgtaaattgtgttcttaaaagctaaagatgaaagagaatttgtttaaagaaatacagtaataggctaagttctgtgatctttatcttatatggaggagtaaggctgtgtcccaaatgcaaatacagcttcaggtatttgagattaaattaagaaaatacagtagtcccctccttatccatggggaatatgttctaagaccccccagtagatgcctgaaaccacagstagtactgaactctatgtgcagtgtcagttaatctgataaaagtgactgtgtgggtggggagggaagggtagcacatacagcatgaatgcactggcaaaggaacaataatgtcctgagtgggacagkgtggtgtacgatttcatcacactactcaaaatagtgtgcaatttaaaacttttgaattctttatttctggaatttttcacttaatattttcagactgtggttgactgtgaataattaaaaccatgggtcgtgaaactgcagatgaaggaggcctactgtattacacctttgatcataattgtccactatctgaatgaagcaatatatgattcttactaacttttcacttgctgtaccagattgctacagaaggtragacctacttagaggtcaaggatatccttgtgttggtccatacataattctttaagtcatctttgtttttatcttgctaagggtttccaatatatctttgttcttatatataaacagcttttaaatgcttaggaaaatttgatgtaagtactaaaatgtcctcaggattgaccagtacatttaatgcatgaccaaatacattcaacatccacaggaacatacagcattcaggagcttgttttttataggtcattgaattttctacagagctactgctgagaattattttttaaagtaatatgcttgtctcaaatatgcttgtctaagtcaataagtccatttcactagaaagtttccaggcagtaaataaagcaatacactgagcgaatttttattgtctcgagtgacataatgtctctagttttcttacagttcacagtggttttactacagaagcacaacagtcattcctgttctcttagtggaattattcatggcttttaataaggtagattttattatgtttcaagatcttgaatttttttaggcttctgtttccatacacacacgtacacatttaatatggctttctgaagtacctttaaatcagaatttatcttacttttgctgtgtttaaagcattttctattgaacttttcaatgaaattcaataaatgtaatatttttcaactttcccaaaaatttaatattaaggctgatttatagaaattcatctaaaactttgctactcaaactgtggttcatggactagcactctttggccatcacatgggagcttattagaaatgcagaatcctcctcctcccccatgctgtcacttactgactcataatctgcattttaataagctcaggtgattcatatacacatttaagtttgagaagtgtagatctacagatctaaaagcttatttactagtgcttatacttcatctagttaaccctcaaagggaaagagccctgtgttttagaaaatgtataccacagcatgaaagatcaaggtattttaaaaggtttctaggaatatcttagaggctgatataatctgttctttttggaaacaataatttttattttctttttcttttttttttgagatggagtttcactgttgttgcccaggccagagtgcaatggtgcgatctcggctcaccgcggtctctgccttctgggttcaagcgattctcctgcctcagcctcccaagtagctgggattacaggcatgcaccgccatgcccagctaattttgtattttcagtagaggcagggtttctccatgttggtcaggctggtctcgaactcccgacttcagatgatccacccacctcagcctcccaaagtgctgggattacaggcgtgagccaccacacctggccttttattttcttcttagtggttttaccatgtcatttgttatatccctttctttttgtttatctattaataatctaggtacacatcttcagtttcagctcttttctgtagacttttaaaaccaatgtctgttctctctcccatttgactcaatttatatttctgacattttccatatccaaaaagaatatatcgtcattcttttcaaattatgctttcccccccaacttacttttgttaatcatacatctgttttaggcctagtaaagtcaaatattctgcaagagtcttttcacagcttttctaatacacagtgatttttcctttctttgttcctgtaaccctagagtaggtatggaattcacgtcattaacccaactttctatttccacgttatttgtacttctgataataaagtttctgacaataaaatatgttcttggaatgcctctttgtaaatggcagtaatattccaaatgattagttatgccaaaaaaagggagaaaatagttatgccagcaagtacaccttgcctgttggttgaatgtaaacattaatttttttgtttctgtgttttcagttaacagggttggttatgtagtaaccaactcctagcaaatcttgactcattaaaaaaaaaaaaactaaatgaaaatcccaaaagtagtacagttcttataaagcaaataatgagtagtcttacctttaagtacataagaagtggacttaaaattgatgcttgagaccttatcaaatgtacaggtaatcatttcttaaagctgtattggattatacaaatgtaaactaatggaatactaacttaaaaaacacaattttaagactaaggaacattgaagattatcatccccttattttaatgtaatggaaactgacacagcaattaaatgcctgtttctagtatttcttaccaaaaagtatgtagaacatatctctcagcttttgagttttagtctaaagtccagaagctccaagatgataaatttccaaattatgcccacttcaaatagggaataaaacttggactaagtggcgtctggcatcagactgcatgtgaatagttttaacgcaaaagacttcctgttccaaaaaaatgatccaaagagtagaatgtagttggtagtttgccctaatcaattgttggggacatctagagttgtgcatttgaaagcttgtaagactttgcccagtttcactctatgcatgttttctactattgttttctttatagggcatgacagtcatttaccttttatagcttttgtatgcttcagctatgtagcacagtgggaacatacacaattttgcacttgggaaagtactaccctgttttctgggttataactactgaaacaattttaccagttctaccctcagtttctgttgaggagtagccaaacatgcctactgttctagagatatttaagataccagtccctcagaatcaaaattaatgcctgcagtatattggtttccagggtttgttgctttgtagtggtcaggtatccagaagcttcatcttaagtataatggaagaaagcttttgtttttatacaagtggatataaccctgataatgttgtatatcactttgagaaataggaaaaatagctgaaaaatgagagcaaaaatattttaaaatctttatttttccaaaatgccaaaatgttgtgtggagataatcaggagaagagaggtgctgtatgtgaatacctttggatttactgtacacaggctactcctcataatccattgcttatctttttgaaccaagttcctatctccccaaaataccatgtaatcttcgggttaaattttgttaatattataagtttcaaatctttatttacttttgggggataaaaaagtctgttgtagtggttgttttccaaattttccttgccctgtcattttttatgtgggctatctgcgaaggagaaaatttgtaatctaaatttaataaaacttcaaatatttaaatggtttctaaaagtccaagacagttttcctctgaaaattaaaagagccttctagaactttagagctcagaattaaagaactttaaaaataaagtattacttttaaaaagactgtttatgaaaagttgttattgtggtattactattgtagttttttttgagacgaagtttcactctttttgccgagtcgggagtgcaatggcacgatcttggctcaccacaatctccgcctctcgggttcaagtgattctcctccctcagcctcccgagtagctgggattacaggcatgtgccaccacacctggctaattttgtatatttagtagagaccaggtttctccatgttgatcaggctggtctcaaactcctgaactcatgtgatccgtccacatcggcctcccaaagtgctgggattacaggtgtgagccacccccatgccaggagtatttttttttttttgagatggaatcttgctgtgttgcccaggctgtagtgcagtggcgcgatctcggctcactgcaagatccgcctccagggttcacgccattctcctacctcagccacccgagtagctgggactgcaggtgcccgccaccaagcctggctaatgttttgtatgtttagtagagatggggtttcaccgtgttagccaggatggtctcaatctcctgacctcgtgatccacccgcttcagcctcccaaagtgctgggattacaggcgtgagccaccgtgccccgccggactattgtatttttaaaataacaactgcctctaaattttttggtaggtgagataactttgtatgtagctactatttagactgttaaatgttaaacctagccaggcgccatggctcacgcttgtagtcccatcactttgggaggccaaggcttgcagattgcttgagtccaggagttccagaccagcctgggcaatatggtgacaccctgtctttacaaaaattacaaaaaaattagcagggcatggtggtgtatgcctgtagtccctgttacttgggaggctgaggtgggaggatcacccaagcctgggaggttgaggctgcagtgagctgtgctgtgattgcaccactgtactcaagcctaggtgacaagagtgagaccctggagactttgtctcaaaaaaaaaaaaaagaaaaagaaaaaaaagagttaaacctctgtgtctcattcactatgtagtttgttttttttacacaaaagtctatttttttcattgcccttttgaccaaaaagttaaaaattttcccccccgctgactaccttgtataggtcccctttttggtcacctacaaccctgaaaatccttgactcctgatcggacgttttgggagtcatctaaagccatttgggaatcattgattagtctagaatgtagatatggaacaatggctcttgcaactttttagcagtggaactatttaattaaaatctgtcatagaaacttaggatgtataaatgtacaacacataagtgaactactcttctctcgaagcaataggtgcagaggttggatttgggccctatctacttgtataagcaaggggtgcgtgtggcccacgccctgatggctccacagatcccagtccagactagaagatggcgtctgtaataagtgatgaatcaggtgaagaaggatctttgaacagggaaagcaaagtattggtgcctcataagttttgaagaaacccttgactggctgtgattaaagtagaacataagattaagtcaaaagctctttaagatgcattttatctgttttgtgttaggtatgaaattagtttaggctaagattcaggagaaaaaaatagaataatgtttacacattgttaaacattagtattcatactaaatgggattttatgtgcagttaactaaagctaaaaaataatttttgaatgtatacagtattcatgaacaaaaaccagttagtttttgtttttatgaatagcattgtaaagttcagtgcttacgttaccattaacctatttaatcagatgcacttagagttgcatattctgggtttgtgttagaacaaaaagcgtcaatttttgtaatttcttttatgcttctctcttgaattttgtttgatgctctttatagaccctgtcaaatacagtcagctccctgtacccattggttccgtacctggattcaactaatcacaataaaaaatattcagagaaaggatggttgcttctgtactgaagatgtacagactttttttttcttgtcattattccctgaacaatacagtataacaaccatttacataaaattttcattgtattaggtgtaataagcaacctagagatgatataagtatacaggaggatgtgtgtaggttatatgcagatattatacaatttaatataagggacttgagcatctcctctgaagtttggtatttgccagagttcctaaaaccaatcttctgtggatactgagggacagacaactctatgtaattgtttgttttttagtcctcagctaacttgttacattttttaacaataggattctcaatatgtggctaaggaaaatgtttatgccaccaaacatagcttctgaatcttttttgttgttcatttattgattcaaaaaatatttactgaatactggccgggcgtggtggctgacacctgtaatcccaccactttgggaggctgagatgggcggatcacctgaggtcagaagttcgagaccagcctggccaacgtggtgaaaccccatctctactacaagtagaaaaattaggtgggcatggtggcaggcacctgtaatcccagctacttgggaggctgaggcagtagaagtgtttgaacctgggaggtggaggttgcagcgagccgagatcacgccactgtgctccagcctgggcgatggagggagactctgtctcaaaacaaatgaacaaatatatatataagcctgcgtatctcaatcactatgtagtttggtttttttacacaaaagtctatttttttccttacccttttgacatatatatttatatataacattgttaaggggctgttagaggaatgcatcatacagcaagtactgtttataagcagagaaatatttactctgtattagagtcactgtcatctgaagaatgacaaagtaaaattttttgtgccagtttgagtgtattccctgaactaattccatccatagtttgatacgagaatataaaagacaaaatatcctttctagaaatattcacagtgcactcatggtgaacactaacactaaaggtgctatagagcttcaagttttttgaagaatattaagagtgacaaggaggcttaggagtcatatagtgcatattctcaaccaatatagaaatccaggccatatcgtttttgatatcagtcccctgcttaaaatttctacaaatggtaacattagtaaaggacaatctatttcatttttaattaggtcatccttggaagtaatagtttgaataattaattgaacaaaaagtgcctgttattttccattccatggtcccagttttgacctctgcagttaaaagtttaagcctaatcagctttccacaggatggcagttgcatgtttaaagatagttatcatgtccctctggtaagatttttttttctttgtatcaatatcttttaaagttgatatcttttgctatgaatctcaaattgagaagggttgcttatcatagtgtgaatacccttttgcccacgcagaggcagaatcctcttctgtacatgttggttttgttatttttcttgagctttcaatattttgtcttgttagctcaaggttggtgtaccttatcctccaattttcctaaattttcaaataaatcaatcctggtacctttttaagcaaataaaatatttaatctatttttgttattttaactaattgactcttaaatcattatattaaattataaagtaaataaaggtatagccagtgaaaaaattaactacaataaaagacaaaattgagtgacattaaacatttagtgtataaataaacatcagtgatttacattgttggcaaaataataacactgtaaacatctctgtagcaattgtggattcaataattaatgattaaatgaatgtatacattttgaatgctcttcctttatatatcatcacttgttggatacctaagtattcagttggccttcgtggcatgtttaagagattctcttttactaggtgaactgagatgctcctaaattataattacatagtgaaagacctcacatgccaatccttgttctcctcagtcatattaccaaaatttggtgtactttgaaggattcgcctatgataaaataactttttagaatttttttaagaatcagtgtgatggaagaaaacagtggatttctgttagtattttgtgagaaatggaagattacgttactgttgtctctacttcttccatgtaaagaaaatatcctcattacatttttgagtgaaaagaaagatttatttctagagccatatttttgtataaaattagggttttcataactttctaaatattaggtagaataagagaaattcttgtctaatctgttatgaaaacaaaactttaattaaaaaatttttgtgaaaatcttgaaatacactggtaagttttgtataggctgtttagcattccagtgcaatttggggaaatgcttactgttttccttgtaatgttttccattaccttaaaatgcagtagtattgcccaaggatagtagtgaattaatgaaacaatttagcattgacatgacccactcagcttattttttgttgccaaaaggttcaaaagaagacatttagtaatgctgtgagccatgggagttgctgtgctagtttattattacagcacaacccagacatgcaagatatccttaaataaagggcattgaggtagataatgcacacagagcacttactagtcaacaggacttggtttgcatatataggcaatgcctgtctactgattgatgaagcctattatcatgagattgtatttttattaaaggcaacacttagtaattctgtgcacagatgattaatagccaaatggttatagattttagttaattagaatggttaagatgaaaattctgaatgaaataaattgaatcatttctttatattgatccattatacatgaaattattaaagcttaagattgccatgtaaaggtaaatcatgctatgagtattctaactaaagtttgaatcattttagtcatttcttctcataatataaacatgctatgattaatctaaaatttatttctaaatatttgctaacataagataatagcttaatccctttattagcaataatttttgttcactagcagctgctgagttagagcgataaggacaagtcactgttaactttctgttgtagaattcttctagtcctttcattatacggctgctagtactttttttctctacagaatggagtgagtgaaatagcagtcttataaaagagaagatattttagactaagtgagtaatgctgtccattgcagtaggaagaagggtcaattttttttcttacaatagcataaagattttttggtcaacaagttctgtatagattatacctaaataacctcttaatttcttttcttaagccctgcagtcataccagaagcaaatgaaaatcatttagaaactcagatttatcagtttatgatactacttgttctagttttttttaaaaagtttatattcaagaatatagttcatacacgtactttcacacacacatattcatataacatcctaagagatccatgtatatgtgtacatgcattttctatttatctttatattttgtgatgcttggcttcctaacatatgattaaaaatatctaccaaatatttaatttgtagctcctgccaccatttctacaatggtgggaatacctagaggcatggcccctaagttattatagaggatgcatagaaggacatacactcaagcactgtgagagcattatattggtaattatacactcccagcatagcaaggctggttaaaatgtgataggagaaaccacctcctgtttcacttcatacctgttactttctactcattttttttcctctcaaaatactttgcactcctctgacatttctccagtaattcacatctttacggtatttttttcattctaaggctacttcatgacacttgactttacagtatttgcagtgtgacatagtttatcatttatgcacaatgctaatgcagaataccatttcaatgcttgtgtccttgtctgtctttcattaaaaataatagcatcaaattctccttgaagtgctgtgtttattattttctgtatattcctgtgcatctatttttaaatctgtcaacagtctcaactgtgtaatcttagttttcagtaaaataaaatggtaaaaatctatcttcttatttgcaaattaaagtaaaarttatttttttaaaaaattttatttgtaatttttgtgggtatatagtgggtataaaataattttaaattgtagcatataactaagaaaggtactcagatttcggaattgtgaggaaagaaataatattttaatagaaaattacttacattgggcatcttggacactgcttttggtctagtcttcctgacaaataatttaagtagaatgtttcctgtattaaatctcaagagaagcaaagtcaatttacctgaaattatattgagatataatcaatatgtagagtgacttaaaaataagaaaagtccagtaggttatacagaaattagtctcattacttttcacaactcgttcttagggcaaaataatgtataacatataccatcagttaatgactcatatttagagtttgataattaaattatatctaacactgaagcagaaatgaagactgattgcttgtgtcatgtattgacaaaacatttatacactgtaatattttgaaacataattactgagcaacaatgacatgaatgttttacttaattgcatttgcttcagtatcagttatccagaaactccaaggcagttcttaagcgaactttctaaattcagtagcaagtaaccttttagtccagctcataaattaatgttttgacagccatttaaaatggcaagtaggtaaatttattaggaaacaatgcaggataaaattgaaaagacttggagtgggtacaactgtttgtgtttgactggctcaagaaggtttcacaagccccattacagtaaaaattcctcataagcagtattttaaaatattaaaatctacttgctaattctctagctaccaagctacgaaattcagaaggagttgtgttgtgttgttttgttttatttatttattcgagacagggtctcagtctgtcacccaggctagagtgcagtggtgcaatcatggctcactgcagcctcgacctcctggactcaagtgatccgcctgcctcagcctcccaagtagctgggaccacaggtgcatgccaccacaccctgctgatttttgtagtttctctagagatgagattttaccatgttgtccaagctggtctcaaactcctgagctcaagcgatcgcccacctcggcctcccagattgtaggcatgagccaccccatactggcccagaaggagtttgaaattagaaaattactgtggacaatattgcgaattcctagcttgtcactattacctctgttatgtacaatgtgtattatgtgtttacctttctccatccctttaaactgtgtataaaacagtaagtgtgataattaaccttctttccagtaatctttggaaagaagtaggaaaggtgaacaggctcaaattaaatgcaatctcagacattgaagagatttccaagaaaatgggagcaactggtcttgttatttatggtagttccctgacatacaactagccagttagccagtactaacaaacacagaaatggacttcatgttgagtagttgccataggtatataccatttgactgtttttaacatctgtattgcttacgatattggacatctctctcactccccacatatcatggtttattagtcagcttttggtaaaccgtgatagcaaacaactccaaaattttagtggcttatttgttctcgtttactgtgtgaatctgctgtgttctgctctgtaccygcttattctgataacctaggctaaaggagagaggaaggtgtgatagcaggacctgtgtcatggctcttaaaacttctgcttgaggccaggtgcggtggcttatgcctgtaatctcagcactttgggaggccgaggcgggtggatcacgaggtcaggagatcgagaccatcctggctaacacggtgaaaccccgtctctactaaaaatacaaaaaaattagctgggcctggtggcgggcacctgtagtcccagctactcgggaggctgaggcaggagaatggcgtgaaccagggaggcagagcttgcagtgagccaagatcacgccactgcactccagcctgggcgacaaagggagactctgtctcaaaaacaaaacaaaacaaaacaaaaaaaaaacaaaaacaaacttctgctagaaactggcacatagcactttcacatttcattagtaaagcaggtcaaatgaaagcaagaaatgtaagccttctataggaacaggctcagtaagggaaaggcagctcatattaggactgtaatactgtttgtcacataggagttaatatttatatctcccaactgcaccaaccactgctccatccctactgtttatggcagagaagcacaatttttttttttttagcttttacatgattcttgattttcttcttaattactatttacatattatagaatgtaattaggaaataacagtaaaatcagtgacactggtgaatgtagagagattagtttacaaaacgtattatgtcatttatatccatactggtaacttcttactgcaaaaataaattggcaataatgtaggaaaaaaatattattccctccttgttttttttgtatagagtaccattctggtaaaggagccagtagagaaatttggagtaacaaattaaacatttttatttttcatgttagatattttcatatgtagactaatactagatgttctgctcttatattcatttggctataaatttgaaatattttgaagtaccaaaggttttaaagtaatatttcttatttatttaaaacacaataaaagcatataaagacacaaatagattttactgttttgttttgttttgttttgttttgttttgttttgagacagagtctctgttgttcaggctggagtgcagtggcatgatctcggctcactgcagcttccacttcccgggttcaagcgattctcctgcctcagcctcctgagtagctgggactacaggtgtgtgctgccatgcccagctaacttttgtatttttagtagagatggggtttcaccatgttggccaggctggtcttgaactactggcctcaggtgatcggcctacctcagcctcccaaagtgctgggattataggcatgagccactgtgcctggcctcttcacatttcttatagaaaaatattcctatgaatgagtagcaaataattctgaacataaaaattgagattctgaatttccttcctgtcaaatcaaaaagccgtcagttccattatgtttttgttcagttataattccttttactttttaccaaaattttttcctctggcattctttttattattattttttaaattttgcccagggtggagtgcagtggcatgatcatagctcactgcagccttgaactcttgggctcaagcaattctgcctctgcctcccaacagctgggaccacaggtgcacaccaccacacccagctaattttttaatttttttgtagtgacagggtctcactatgttttccaaggtggtctggaactcctgggctcaagtgatcttgagcctcagcctcccaaagtgctgagattacaggcatgagccactgtgcccagctgttccccagtattcttaatgccacttgaatgattgattttataaatgggttcacttttcttttcattctttaattaactcatcaataatagaattagggcattgtatattgttattttataggacagccatctgtcttacctaacaaaatcagcataatttaaatcttaatttcatattgagcacctctattagggtaggcaagaatttttcttatttggtagcactacagtccaaagccaaaagtactttgtcaaagtgacagatttaggtctaagatatgtaccttgaggaattgatattgtaactttcttctttatgcatgattttggagatggaagtagcatagctaggacatacggttttatttatattgtttagtggctaaggaaggttaacatgaaatcttgttcaatttattttttgtatttgcatagtaacgtaattatcarttctccttcagtatgcatgcaatgcattgattcataattaattgattcccctttccacaatatcatcttccagtgctttcagaggatagaaatgtccactaatgcttaaagtgttctacttttttttccttcattttacggttacttccccatcagcatttcacctttttctagcacttttatccaaatcatagattttctatcactgtcaatatttgtattagtctgttctcacactgctaataaagacatacccgagactggtaatttataaaggaaagaggtttaatgaacccacagttacacgtagctggggaggcctgacaattatgggggaaggtgaaggggaagcaagacacgtcttacatggtagcaagcaagagagcttgtgcaggggacaagctctcatgagacttattcactatcatgaataaaacaatcagatctcgtgagacttatacactatcatgagaacagcagaggaaagatccacccccatgattcagttgcctcccactgtgtccctttcacaacacatgggaattatgggagctacaattcaagatgagatttgggtgaggacacagccaaaccatatcattctgcccctggcccctcccaaatctcatgtcctcacattccaaaatgaatcatgccttcccaaagtcttaactcattcagcattaactcagaagtctacagttcaatgtctcatctgggacaaggcaagtcccctctgcctatgagcctgaaaaatcaaaagcaagttagttacttcctagatacagtggcagtataggcattgggcaaatacagccattccaaatgggagaaataggccaaaacaaaggggctacaggccccatgcaagtccgaaatccagtggggcagtcaaatcttaaagctccaaaatgatcttttttgactccctatcttacatccaggtcacgctgatgcaggaggtgggcttccccatggtcttggacagctctgcctctgtggcttcgcagggtacagcctcccttgtgactgtgttcatgggctagctttgagcatctgcagcttttccaggtgcacaatgcaagctgtctaccattctagggtctggagtacagtgcccctcttctcacagctccagtaggtagttccccagtggggactctgtataggggctcccacagagcatttcccttccacagtgccctagcagaggttctctatgagggccccacgactgtagcacacctctgcctggagatatccaggcatttccatacaacctctgaaatctaggtggaggttcccaaacctcagtttctgacttctgtgcacccacaggcccaacatcacttgtaagccaccaaggcttggtgcttgcaccctttgaagccactgcatgagctgtaccttggccccttttagccatggctaggaagcagggcaccaagtcctgagactacataaaacagcaaggctctgggcctggcccaggaaaccattttttcctcctaggcctctgggcctgtgatgggaggggctgccatgaagacatgtcatgccctggagacattttcctcattgtcttggtgattaacatttggctccttgttacttatgcaaatttctacagctggcttgaatttctcctcaggaaatgggtttttcttttctgttgcattgtcaggctgctgattttctgaacttttatgctctgctgcttttttaaacttaagttctgattccaaaccatatctttgtaagtacataaagctgaatgcatttaacagcacccaagtcacctcttgaacactttgctgcttagaaatttcttccaccagataccctaagttatttctctcaagttcaaagttccacaggtctccagggcaggggcacaatgccaccagtttctttgctaaaacatagtaagagtcacctttattttagttcccagaagtttctcatctctatctgagatgagcagcatttgaacaaagccattcaacaagtctccaggaagttccaaactttcccacatctttctgtcttctgagccctccaaactgttccaacctctgcctattacccactttcaaagtagcttccacatttgtgggtatctttacaacagcaccccactacctcagtaacaatttactgtattagtctgttctcatgctgctaataaagacatacccgagactggtcatttataaaggaaagaggtttaatggacccacagttccacatggctggggaggcctcacaatcatggtggaaggtgaaggtgaagcaagacatgtattacttggcggcaaacaagacagctagtgcaggggaactcccctttataaaaccattagatcttgtgggacttatttaatagtacaagaacagcatgggaaagacctgcccccatgattcagttacctcccactggttccctcccatgacacatgggaattatgggagctgcaatttgagatgtgattggcacacagccaaaccatatcagtattcattttgcaaaatgaaattttagaacagctatatagtgtaaaagttgtcaaagtcaaaatggaatcactaatgttaaacaaacaaacaaaaaaccctgacaaatagagctggaggaggctgtgaagagagggttctcatgcttgcacgcttgataaaaactatcataaaagactccacaaaaaccacaaccatgtacaaaggccatcacaactttactcaataaatacttctacccaacacatctgcccagcaactggctgtccaacctttgactcgtgtcactcttgttattgatctttatagccaaggataatcattttaaaacatttatcttatcctcctcacttttcctttaaaaactattgtcttcctaacttctataaatacacacattgtttactatgacacaggtattctcatgaaaatgctctttccaaataaatatctttcttttagagaacctttctcagtttgttattaaggttgacagtaacatgcctttacttagcagtaactttgtggggttttttagttttttgtttgtttgtttgtttgagacagagtgtcgctctgtcaccaagctggagtgcagtggcgtgatctcagctcactgcaacctccgacttctgagttcaagtgattctcctgcttcagcctcccgagtagctgggactacagacacgccccactaagctcagctattgtttatatttttaatagagatgggtttcaccatgtcagccaggatggtctcgatctcttgacctcatgatctgctcgccttggcctcccaaagtgctgggattacaggcgtgaaccaacgtgcctggccctgttttttttttttttttttgagacagagtctcgttccgtggcccaggctggaatgcggtggcgcaatctcggctcactgcaagctctgcttcccaggttcacaccattatcctgcctcagcctcctagtagctgggactacaggtgccccaccacgcccagctaatttttcgtatttttagtrgagacagggtttcaccgtgttagccaagatcgtcttgatttcctgacctcgtgatctgcccgcctcagcctcccaaagtgctgggattacaggcatgagccactgtgcccggcaagccctgttattttttatgttgagtgtttccttgaagggcatgtggaagaaaatgccataaggtggcccatcttactttacatttctggtttagagtgatattattttgaatttctaccatagaattgaaaattatagccaatgaaaagcaatgtagctctttttctttctttttttttatttttattttttgagatggagtctatctctgtcaccaggctagagtacagtggtgccatctaggctcactgcaacctccaactcctgggtttaatcgattctcctgcctcagcctcctgggtagctgggattacaggcatgcaccaccacgccctgataatttttatatttttagtagagacggggtttcaccatgttggccaggatgatcccgatctcctgacctcatgatccgccaacctcggcctcccaaagtgctgggattacaggtgtgagccgctgtgcccggccttagctctttttcttaatgagaatgaaggggttttcgtgttgttgtgtgtttgcttgtttggttttggttattatatctttatttaactcagaatttaaagtcaaaggtgctaatccaccctggatagacccagttaaaagcagagtgacttatcttccatgaatcttggtttatcatcaggatatttaaccttgagctcattacctcttcacctcccattagaaacctggatgggagacatcagttttggagaagatagtctaatgcagtttttttccaggttaatcaatcagtcagtgaattaattaattctttaccctttcttgctttctttcttttctctcttcctccattcctttctstctctctcctggcttccctcctttcagtagaattctttctctaataaaattacacagaaataacacaatctattttattacattgtttatttcagaaaataatttgggttatatgtaactggtaaataagggaatagcatcaatataatatagaagtgaagttggtttataataataattcccaggacttccaagttgcagcagctatacataaaacacactaaattgaatgtagcaaccaagtgcctgtgtcccattcacccgtgcccccattctaccttttggctctgttcagccgtatcctctggacctgatacctgttggaacagagagttgctataggatggtggagatttttgaccgtcagtttctttaatggttattgggttttttttttcaggttttcactttctttttggggtcaatttttatgacattttaaaaggaacttggttgttacatatgatatgttatctttagggtgccttaggcaccttaaagcttgaaaattccaagctaatttccaagattagcttggaaatgaagatttaggtgttaacatgggactgaatgaggtttctaggctgaggctgtaaaattaagagtgcagggaatgaagaacaaaatttgtgtctagtgtagcagcctttctctctctctctctcctttcttttttgcgacggaatctcactctgtcacccaggctgtagtgcagtggtgccatctcggctcactgcaacctccgcctcccaggttcaagcgattctcctgtctcaacctcccgagtagctgggactacagggattcaccaccatgtccagctaatttttgtatttttagtagagagggggtttcaccgtgttgaccaggctggtcttgaactcctgacctcaggtgatctgcctgcctcggcctcccaaagtgctgggattacaggcataagccaccacacccggcctctctctttttaaaattaccattttcttcatatttatcatatgccgtagtctagccattataaccatatgttatatatacatagcaaggagaaatgttctaagtattagctaatcatgcttgataggcatagtaagagaagacagcgggcacagtcattcgtcttttgtttcaacaagagtaaacttgttaaaaacaattggctgaaaaccccccagttatttacatatttgatgcttttttatttttgatttttgatatatgtgtcctttcttctggtttaggcctatgtttgcttttttatttttgatttttgatatatgtgtcctttcttctggcttagcctatgtttgcttttttatttttgatttttgatatatgtgtcctttcttctggcttagcctatgtttccgagggaaaacaggccccaaatcagaatattcaaattttgtattttatccatctatcccccacaaaagtgtcttgaatatgaatggttgttccccttttttaaaattaggaaaactgaggtttaaggaattgattttacctaaggttttctcatccttgactcattggcttacatctttattttccatttcccaaggtaaaacatagcagtttggaattctagctgagtgtcctactcatcaatgtaactctcacctctttatttacccttcaaagataaataaaagccacacacacacacacacacacacagacacacacacacacaaagaaaaaacatatttacccttcgtttactgccctgggaaaatggagatgaatcctttaaatatttttcctttgccagctggcacagtattaacttttgtcagttaagggtactgacacaatgccattaaaggaggaagggagcttctttactagtttttgagtgcttgcagcttccctggctcctaaagtgcaaaatggtcatctgcactcaatggcctgtagcttcttgcagaaccctataccctatccacccacgaggcagttttgtagcagagtaactctgctgcttttgctgcttgtagcaatagcgtttggctcctgcagtgcatggaaaccagcagcacctagcagccarcatcttctgggtggttttatagtggagtgcttccagtgagacaccacccatgaatagcttttcatgacgctctaaaggacagatttccagcaagttctgcttatgtagcaccacagcatcttctgtgccatccagtgagccatagctgtgacctttccaacaaaatctggatcttagtctggggatatagtaggtattctttcttggccattccgttttagttctaagggtggtggttgcgccttatyatgttctagagttctccttacttcttagtagccaatctctggttattccagtactctgtttagttataataatgattctttatgttgaattttccctgttcaaactcctgtgtgatttctaatttctaattggaccttgactgatatattgtatgtttgtaaaatgcatggaatataaatggctaattatgatgtttctttagataggcattcttgagcacatgtgtctggaatatatttcactataatgttagttttgatgactgtattgattttcaaaactgtcagtttagaaactagaattttagatttatcaatcagcaatgtggtgttatgtggctaatagattagacattcatctgttgatgagttaaaaagctctccctggaattaaaattgcttatcactgtatagtactttgcatacatttattaatttccttagtaattttatgaagcaggttgcaggtatcacatttctgtaagaaggaattaagtctttaaagttcaaacggtattccttaatatccttggatatttcttaaccatcatatactgagtttactaggacatatagcacttgatccgttaaaactattacatgcaatgtcagagtttgtatgttgtagatgtctttcatgtcactccttctctgggccctgcccccatcayaaacttgaataaatttgtgaaatatctttttaatatttacttttttccccaaaagtcacagtacattaaattgaatgcatttatattcttatgtcacattagcatcactttagcttactggatagtattttgtttttagttggttgcaagtgttgatttttcctctttcagtttgcaaaactatatgacaggaaatctgtagctaaatatcactttatgatttccatctgttcaagtacaatagtgtttatggcacagtccagattgcaatgtgatagaaatatcctattatagcagatagaattttaaatgatcattgtacattctaatgagaaaacatttttaaacaagtacttcacttaatttcaaagcagagtaactgaataatactacaatttgatgacagcatctgttctacagagtgtgtttgtgctgtcaacaataaaaactttttctgactcccatagaaatctatcagtttgctcaaatctgtactaataatggaagccaagtgggcagggagattattgtataagtcaatttgaataaccttaaaattttttgtttctattagcatggagagtatctctcattattttctgtgaaatgactttgggagtagagctggagatgttattttggcctttttattacgtgacagtaaaatttttgctaaattatattttgagagtattaacatttactaaataaaaacaaacccctttatcacaaggaactctggccatttcaaatcttgttggctctaaagttgagggatacaagaaagcagattaaaatgatggctcctggagtgtcaggtgttagtaattccaaggtttttagttctcacagtgtatatttgcctctattacactgatgcaaatgcatctttcatgtctgatcagctactrtttggtcattcacttttatgcttcctattctagtacatgcagtgctgaaatgaatgggaaaaaccactttcccacatgaatgctctactgcacttttatctcaaaaggagcattgtatttcttgagtttccaaaggattttagataccattcttaatttaattattttatggccctttctctttaggtctgtattagtttgtgagggctgccataacaaagtatgacagaytggatggcttaaacatctgacagttttggaggctaggagtttgagatcaaggagatcaaggtgttggcagggttgatttatttgaggccccttcccttggcttgtagatcatcttctcactgtgtcttcacatagtctctgtgcatgtctgtgttttaatctcctctcctgtgaggacataattacctctttaaagaccttgtctttaaatacagttacattcagaggtactgggggttaagacttcaacatatgaattgggggtcagggaaacaattcaggacataacaagatctttagccctcatctaaatgaaccatgaccataaacagttctgagcctcattctataggtacatcagttttcttctctacctttggttatcaaattccttagtaccccagctactcctcttttcccatttaagatgacctttctcctattccagacattggctgggaagttagtcaagaggtaacttaaggaatttagtgcagggtgtctaccttaagattttcactgatttgccttaaatcatgttcttccattacatataaaaaaaattaccagcaggccttgtccttcaggtgtgtttctcactcccagaatacatgttgactccacttgtccttcaggtgtgtttctcactcccagaatatattttgaatttgtaagaagtacgcagtttagaccttgttcagaatccatacagtattcattagttcccccctctagtcaatatttgtaggccctacagacattccatgttcttccataaatcccttcttgagataataaagaagtatagccttttaaaccagctactcagcttgcttgtcaaattcatattttccaaacaaaaattaaataaggcttatctgatagttggtagttgacaatattattggtggtggtggtgttatttatttattttgagacaagatttcactctgtcatccagggtggagtacaatggcacaatcactactcactacaaccttgagtttccgggctcaagggatcctcccacctcagtctcctgagtagtcggaactacaaggtgcataccaccacacccagctaattgtttaattttttatggagacacagtctcactttgttgcatagtctggtctcaaactcctggcctcaagtgatccttctgccttggcctcccaaagtgctgagattataggcatgagccaccaagccaagctgacagtgttatttcataccaccgatgatacttcagagacccatcaactctgactatacatttcaaccaaaagttttgttctcatttattttatgccaaattagaaaattatttcctacttcttatgtagtttgcaagatcacagaagaatctgaaagtaacacagtattgtactttgagttaatttctatgtatggaggtatcaggtatactgttttgacccagaattcccaaaattcttttgagagattagaaaggaaaattagtagaatgggtgaagtcagcaggtctgtgttgacagagattattttaatttgaaaaaaacagtcggctggtattattaagtggaaaaaatgtggatcctttcattttttaaagataatttttcattacattaaaaaattcaagtaaaatgcaaggtgacccttaataaggtagctttcttacctgtcatattagtaagatttacaaagctgccaacacaccattttcacagttatgggaaacagacatactcatatattgttatgagcgaatacagtcagttctgccatagttcaacatatatgttccttggctgtgttaggcaaaattgcaccataaaaaacacagagcttgtgagaaaaatgagattaggagcacaacactcaaaaacttcatcagtgacacaaaatttaagaccctaataaaaattgtggcacagtttttaaaatacatgttaaatggctaagtacatgaatggctaaataaaataaacatggtactttaccttgaaaaagacctgaactttgcttgtggaagtgggccctagaagggttgcaccttgtgagttaataaggtacctttcttacctatcatattaataagatttaaaaagctgccaacacagtgttttcatagttatgggaaaacagacatattcatataccattataaaggaatagtcagttgtgctataataaagaagagatagttcttgtcctccaggaactcaaagtcaggcatatgcaactcaaaatcttccatattggaaagtggtagagaaaggttattcaaaatgggttggaaacttgtaacaatgaatgtgaatggttgtggcttgtgacacatgtgagctcatacctctgtaagctgaggtggatgtaggaggtacgtatgatttgtatatgcctaccctgctctgtttagctaggtacagttttctacatttatctgctttcttgaggataaaatcaagcataaacaaatacaaaatttgtgttatgtccaaattgttcccaatatgtcaattgtgttgtaacaaattcaaatttcaragttagtgtaatagcagaactaatgagttggtataacttttatggagaataatttggaaaaaatatacaaaattttaaatgtacatgcccttttaaaaatctgcaaactctagttatcctaaagataaataacgacttatgcaaaatgatgtatttacaaggatattcattgcagcagttttttttgtcataaaaaaagatcataagcatcctaaatgtctattcatagatgagtggtaaaataagttctggttcatgcattctgagaattactgtgctgctgttaaagaaaaccacttatacaaactgatgtgtaatgttcttcaagatatgttaaaaaaaaaaaaaaagtagggtttagaatagtatgtataacatgctatcactggcacaaaaatataatatatccttgtgtatctctatgaacagattaacactgaggcatatgctagtatcttgatatgccagactctgagttccttaaggacaagaactgtattttatttatcactctgtcttcaacaggtagcatagtgcctagctcatattaggtgcatgataaggatatattgaatgggatagatgaatgtgtcttaacattcatgtctcagaaaatatgataaacacaattctaaatgtaaaattgaggattattctaaggtatcgtttgtgttactattttttttcaagcaatgacttatgcttagaacattactgcattttcagattttgatttaaatatatctattgaggtcatgccgccactgggacatatccatagtagaaaacaactgatgaagagccattggagaaagggctaacaggacaaagagcagagttggcattaggaggcattatttaagttctgtgtttctccaaaggacaaaaatagaactaatggatgtagaagatatagggagacagatttcagcttaatataagagcataccaataggtattaacaatttaaagagcagtgtcttaaagacttttggtggtggttatgcagagattgctatcaggattaatggaaggaggaagcatggtgaaattgagagatcagtagtcatttttaagaatcaggcagatctggctgggcgcagtggctcacacctataatcccaggcactttgggaggccaaggcaggcagatcatgaggtcaggagttcaagaccagcctgataaatatggtgaaacccccgtctctactaaaaatacaaaaattagatggcgtggtggtgcacgactgtaatcccagctaatcaggaggctgaggcaggagaatctcttgaacccaggaggtggaggcttccgtgagccgagattgtgccattgcacttcagcctgggcgacagagtgagactccgtctcaaagaaaaaaaaaaaaaaaacaggaaaagaaagaatcaggcagattaggtttgagtgctctgccacttagggactattgtgaccttgagcaagaaacataaccttttaaatttccttaactatgaaatagggataattaaatgtatctcatgggattgctgtaaggattgagaaaaggtaaagtaccctacttcatgttatgttaagccctcaataaatggtgacaattgccattgaaataggaatacttttttaggtagaaggtatatggtatttggtttctaaggtcctttttcaacctgatatttcctaagttttattttacctattttaagtaagaaacatttatacatctgtgtttcaattgtattataccaaaaatataatttctgaattgtgagaaattgtttattaaatgcctatataacaatcatgcttaatgtatgttttaattattaagagatgatttgcatttaattatctaaggtcgactaccacagtagagactgtaacagccatgattccttcagtaaaacagaaattcactatgcatttcagtgagggactataacatagagaattggttacataggtgtcagaggattgaatgagcaaaagtgagagctctgaggtaactgagtgataataactgctgaaagcagctaacacttctggaactggagaagtaaagaagaacaggggacctgcagactgggactcaaagacctgaggagatggtcctgcctggcggctgttgctacctgtaaagaattagtatgaaacttgaacctggaacccaacagttgtggccaagggcaaagcattgttgcttgtaggacacctacagcaatatcaagtaaacagggaacacatttgtcatgctttctagtctccctctagtgttccttattggcagaacctagcaggaagccagatggcaaatgggaaatacagttttcagatcctcagccctaggatcacaaagcagagtataaaagggtaaatttggaattaagacacaatagcttgacaaatgcacagagacatctgtgtagaatatctcatattttaacaccaaatttatgtatttttcatatagaaaatttgcattttaaaatgtttttgtctagaaggaatttgcgtgtacatatactttccatcaataatttaagatgtgttcctttcagaaaggatgactgagttcactaagaattccacataatttgcttttctccccacaacccccaactcttgctgaaaatttgatataaaccctcatgaatctctaggaaaccttttccttctttattgcatgtgattcttccaggaattaagatttgcagaatgtaacatgaattaaaaattaaatttgaaatatttgcagtcatatgtttattgttactgagtaaaattgctagtgtggcttcagtttcttgcagttaaagcagggtggacttgtagagctgaggctgtttctatgatttaaaagatactgtgttaaaaaaatatattcttattcttctttgctaaagtgagccaatagattgcaactgtatttttgattaaatatagtttgatatttttgcaaattatttttttaaaagatactagtattcacagcaaatgtgcagacgtaactaagacatccccacacctctgttacaactagatatgttcattcgattttggtagttatacagttcccagtgaagtcaccaatgtttattggccccttccttcactgagatacgttcatgggttctgatgagaaatacttgtaattattctaagagcatgctttagcatgcaaccttggtaaaaatatggtaggatcatactcttaaaacatcttttcttttgtctgagtgcaggcattaggtaaattatgtcacacacagcactgcagtgatttatagaagttaaataaatgttcgtaagtaatcttaatacctttaaaatattttgggaggtaaggttttacattatgaaaatattctgagcattttataaaattattcaacatttatactttggttatagtttttgttaaataggaaatatctaattatataaaaaacgggatatattggcagagtttcttaataggagttctttttgatgtttcctttcatctcattagttacaaggtttaaattctatgccctaagttcattggcatttcacaggtagactttttgctgctattttccaactttagatgtgtgaagcctgtactacagcctctggatgaatggcaacataaaactagggtcttcaattaccagcttaaaaaaagaagatattaaatataaatatcagaaaacttgattataaacactattgatgggaagaaaaaaaaacttgattaaaatatcctgaattgtaaggggacccattcattaagatattgattataatagtgaaatttaaagtcaactggtttttctaatttatgttaatcataattaaccctccataacattgtaatacatgttggtaatagtctgaagcagactgttgtatgtatagaaacaatttcttcatatttttaactacctgaaaatatgagtaagttaacagtagttgagagtagtacagatttttggttttgaaataccattagaatagcagtgtcactttttaagcactgtgcagcttcctgtgttattcccttctttgtccaactgttactttttcttatgagaggcttccacaccctatttggtatccactttctttttatcaaataaagataattgcataatgaaactactgtgatttcatgccctaacttattcactgtctttgagtttcataagataagcactataattaaagtcattttaccaacaattagtgggaaggaagcatacagtggacaacatgttttaaaatcatagaaaggaggaatgcatgattttagaaatctgaatgagaactcatagcatgtagagctcaaattattcttcctcaactagcagcagatcaaaataggtggtggtatagtttgaaaaagcatatttaacattatcacataattttatactgggaaaatgaaaataaaaaagatgatgttttgtaatacagtccacatgagtaaggtttgataactggtgggagtgagtagttacagattctcaactgagaagggtggcaaaaaaaaggcttttatatttatcagaatgggacatagatgttttttctttttttgagacagggtctcactgtcacccagactggaatgcagtggcacgatcttggcttactgccaacctctgcctcctaagttcaagagattcttttgcctcagcctccctagtagctgggacaacaggaatgggccaccacacctggctgatttttgtattttttaatagagatggggtttcaccatgttggccaggctggtcttaaactcctgacctcaagtgatctgcccgcctcggcctcccgaagtgctgggattacaggcatgagccaccacgcccggctgggacatagagttttaaaatgttaagaaatgctaccttagattgtatctggatatcttctggtattaattgttgcctccctttcctgtctcacaggtctgtcataagatttattttaaagtttaaaccaagttctagcctaacaatagagggtaactactttaagtagacaatttcacgtacactactagacaagtgattttcatgtcaggagaactccaaactgagactcccatctaaggtacatctgggccacaatttctaaactgtgtgccaagaaactcaaatcctcacaaaggtgactcaaggccaactcagagccaggggagaagcctgctggtcttccaatcgcccttcaaataatttatgttttttacttagttttcaaaagactttactgggagaagaaaatagttttactgtcttaaaaaaaataatttgggtacccattgaagagtatcccaacaaatagcaccattttctttcttgtggctggcatagccagttgaggacattctgtttttttaaaagagcgtttctcactgttttcccacatgagactgacaacattgttttatttaccaggctgtgaataaactgtagaaaattagaaagtggattaaaaccttattttggatattttaacagtgggtatataccatatgttagatacatgtatacacacacgtttttgcaaactctaaattttgggagaatagcaacatattcctaaaggaatttctaaagagcaggtactggatagttgaaaagaattacaggaaatgactagtgtaaaaacggaaaagctgatatttttgaaatttactgccactgttctgttattatatttgtactaaaaataagtttcttctaaaaagtatagtttctgatttttgtttttaatctctactgaaatcagagcctactttatacaaaggtagtgaaacaaagtttgccctagtgttctattcctggttgaaataaccagatgcacttagttttagacatgaggaacaaactttcccaagtgttatctttttatcttaatattttaataaatagttatataaatattagcaaatctaatccagcagtgttttaaaataataaatctggaccaagtagcatttatccctggaatgcagggatggtttagtattaggaattatacctaatataatttagtagattagcagactaaagaaaatattatgtgagtcataaaccatgtatgggcacttttgccacataggtgcaatgttttaacagtcaaaaataaccaccttcttttaatagtgtcatgtgaattattctttttttgcattagaatttctacacatggtttctgttactattgtactgttattctaaacatttgtttgattttaagtctttatatcttttcttaatgtcattcagcagggcgtcaatagtaattctgaaaaatattgtcccagaaatcagtaactttggggaaaaagttaattatggtaaaatgtagtgaagaaaaccaaacaaattgatgttaaatgagagacaaaattgtacaaaatattagtgataaagctgagaaaaggcaacagtaaaacaaaaatgttgcagcgattatagatttttgtgctctcacaccatgtcatgtacagtttctttttcctatgggaaaattaatactcaatactgagttttgacttatgtgaaatctacaggaataaatacttttcatacaagaacaaaaagaagaggtacctaatttagctagagcaggacaggaggatgatggtagggaaaatgactagaaaaatttatccagatgaggaagtcaaagcttcagaaggtgartaaacatattcaaggacacttacaaatggataaagtcgaagtttaagtgtgttggtcttaggagtagaattgagtatgactctatagtatgcttactacttattttggtttcttgcccagaagaaaggtatttcggtaaaaaggaaagcaaatttgtatacagttttcctttcaaatgcagaagaagcaaaacacgctagcacttacaaatattaatttcagcttgctcttatctgtgtttttgccagtttgtaggacttgctaaaaaaaattacacagccctggggtccttagctaaccaacacattcttgttactgaccaggatatgctggttgactgttttaccatgtgcgttaaattaggagaaaaagatatacaagttcatttggcttttatgtgcacagaatcttttcaaattgtaaaaataaaattacctatccactggaggatatcttgggccaggagttcaagaccagcctgggcaacataggagaccctatctctacaaaaagtgtaaaaattagtcaggtgtggtggtgtgtgcttgtagtcctagatacttgggaggctgaagcaggaggatcgcttgagcccaagagttcaaggttacagtgagatatgatcatgcctctgcactccaacctgggtgacagagtgagaccctgtctcattcattcatatacacagacatgcatgcacacgcacacacgcacacacacatgcctctccacttgaaataaaaataagttaattcagtattttgaagaaatcagagtatttgacttagtaatatttctttccagattttttctaagtaacaaagaaatttatttgtatattgtgatatgattaatccttcagttaatctaagtttagccatataatgctttctttctactttgtctcttactcgaataataagaaagaaaaaatttcacagacaaatatttctgttcttccagtgtcctgaatacagagtaggactgtaagaattttaactaattcttattatggggtattatgcaaagcaaaactatactgagagtcagttgttttattctcaggttctgtaaactgagactaagttgtttggttctttaagtctcagtattgttttgtgtttcgttttgagatggagtcttgctctgttgcccaggctggagtacagtggcctgatctcagctcactgaagccttgatctcctgaggttaagcgatcctttcacctcagcctcctgagtagctggggccatagactcacgcccccacacccagctaatttttgtatttttttgtggtgacagggttttgccatgtttcccaggctagtcttgagctcctggcctcaagcaatctgcccgcctcagcctcccaaagtgctgggatttcaggcatgtgccacgtcacctggctaagtctcagtgttcttatctccaaaatgggataggcctatatccgtggaaatactgctgctgcagccctattccagaccaactaaatcagagtctctagaggcaaaactcagatatacatgttttctaaagttttctggatgattctcatgttgggagtcatcgttgagaaccactgaactagattatttataagattcattctactcagagtgtggtccacggactggctgccaatataccaactgtttattgccagtcctcaagtacatgtgcagctagcttgtgccaaaatgtaaatcagctaaagcactagtgtgctatttagtttggttgcattctttttttggtagcaagactattgattaaggaaatagtaaatttaatttacactttggtacaagctccttatttggtttcagaccagcagttggagtagcacttctttgagttctttcctagttcttaaattctgcgactgaatatataatatatggttgtttaaaatctgctgatctacaatgttattgcaatactactgaacattataataaacagaaggttgttatttagataatggaaatggaagaatttggaaggttaaaaatgttggtgacaattttttaaagaaaaaatgaaatgtttaggtgccagtcttctaaaatggaaaaatgtttcattcaaccaccatattatgactaatattttatggcataatttactggttcagtgcaccattctttctttattgttgcaagagataattgaattacacatggctaattattaaaaatgattgcagggcagttttaaaatgtaaaaaattccatgtgatatttaataggacttcaatagtggtagctgaagaaaattaagaaaataattgctcttaaatatatcagttaatcagtaaacactgttctgcaaataattcatatggaaaggattgtttatgagtagactgataataccaggctcacgagaaagttttgactattatagaaaaacatttaaaattcatggtatgatgtgaaacttttaacttgtaacctttatttttgaagacagtagtattaaaaacagtgttgggtgagaattaatctattttggatatgtgtttgtgtcaggtctctttcccagccttgtataactttatttgttaaaggacgaaaaagagacctgaatattatactgctgatttaatacaaagttcattctgaacccccactgtcaaaataaattaaggtcaattttgatttctctcaatacgtttgaaactcccttttttattattatgatttcatttatagaatattataggaaattatttgctttaaaaagtacctcaggacaagtattcacagattgttccagatcagcagttacagctctttactatcagagattaatttacaatgtaatcaggattctccttattcatagtcctgcttattatctaccttgagttcttgttcttagtaaaaatgcattgttcttttttcaattatttggacagtgaaggtaagcctaataacagatattgttggcctaaaaaaactatgaaatgtatatatggaaccccagtataattaaaagttttgaataggctatatgatgggttgactccacagattttctgggtaaacagctgactcagttagaccatgtgtgattactgtcctttgcaaaaaatagttttcttccctttcatctgactcattcttagtctttggtttttcctaattcatttagtgtgttgtaaaccccatcttccaatcatgatgaacctccagattaaaaaataataatgataaatgccattgtttaaatgttttaataaattgtagaacctgagattatatatatttatgaattgttatggatattttcaaaatatacataagtagaatagtaaaatatatccctacgtatttatcaccaggctacagaaattactgacccatgtctaatcttyttccatctgtacctttccccactgcagtatattttagacatgattccattaattcataaatattcctcaagggaattatcaaaacatagttggtgaactagaatggatgagctccaagaaccccattaggtaatgaggaatctttgctagaaagaaatacggaatttctgttagagttcaaagaccatgtcacataataactacattacttagattctgtgcagtgtatgaaatgccttcacagcagctccatagtaagaacctgaaattatcttctttctctaattcttctatataaatttttaaagtagtgtttttttgtttttttgtttgtttgtttgttttttaaactgagtttcactcttgtcacccaggctggagtgcaatggcaagatcttagctcactgcaacctccgccttccgggttcaagcaattctcctgcttcagcctccccagtagttggattacaggcgcctgccaccacgtccagctgatttttgtatttttagtagagacagggttttcactatgttggccagactggtctcraactcctgacctcaggtgatccaccagcctcggcctcccagagtgctgggattacaggcgtgagccaccgcccccggccttaaagtggtaaattttttagtttgcataatactttgacttttgttgacttawaattccttatagtgaataacagtataccaccacagtgagcaatgatgagcttaatgagggacaggaatggaaaaattacagttttactggtttagaagttcagacacagtagctaacatattgtctaatgagtaatattttgcaaatattgaggattattaatttttaaatataaagatgtagtaatagttctttggtaagtctaaaaaataagtagaccatctacccttttatttgtttcaaagtgtcaaaacaaaaatagaatcaatggtgagaatggctttgatgaaataccagtgaggaaggtcacagtaaattattatttcatgacaaacaaaaatgtaaattcttttacattgcaaatataatattacaagagaatagcaaatttacagtatacacttggagaatcattctaaagcagttgaagtctccccaacaccacacttcaattttttgtgatctgtggtctccagagtaactattataagtggttttcccagattctggaggggagaaaataaattaacaatggattgataactttattgttcaagctatagtaattcttttcactgtgagattttacataattcactaaaattacccttgttttgtaaatatggaaccattcaacgaactacttttgaaaatgcaaatattgtactctagctagtacaatgagctctaggaaatcagaatcacattttgaaagaatcttgaggtttcaaagcctttcaaattctctcagttgagaaactgttacagtgtaaagtatatgtacgaagctttcccttttaaaagacaataaaaaatagttttgaattgaagagtaataggattagtaatctttataaaattaaagagccagatatgcccattgttttcagctaaataatggttccttaaatatgtccatatcttaatccccagaacctgtgattatgtcactttatatggcaaaaaggactttgtaggtgtgattaaattaaggatcttgagatggggcgattatcctggattatgtaggtagtctcaatgtaatttcaagtatccttataagagggaggcaagagaatcagagtcctaaagaaatgtaatgacagaagcaggagtcttagtcagtgagagagagattttaagatgctgtgcagctggaggatggaggctcagtccatgagccaaggaatgaatgcaggtggctcccaggagctagaaaaggattttagggaatgtattttcttctagatcctccagaaggaacataacctagctgacaccttgattttaggacttctgacctttagaactcttaagataataaatttgttttcctatcagctagtcattttgtcgtcatttgttacagcagcagtaggaactaattaacctatgaacaatttttaacctatcggtattgtaagtagtacttctaattattcttttaaatatatctttctttgaaaaacttattcttctttaggattcagacttttcatgtactcagggagaataaatgagtcctgttctaagttacttttttctcttggagatatcacatagttgagttcatggcctagaagattttctgatgtttgtacatgcccatgggagaatgtgttatcataataatttttagtatgcagcctcttgacttgatttttcacttatagtgtagaccataatatttgtcaatttcttatgcatctactgtgtatccagcattgatatagacatcttctgtacataatacattccacaataaccttgcaagtttggtattatttttattttataagaaagtatcctaagtatgacccattagtttgaaataaattagtatttgttgtgtaaatctttacctcccagtattgttgtttaagaattaaaacaggttgttcagagaagacgaaagacttttttttttttttaattattactatactctaagttctgggatacatgtgcaaaacctgcaggtttgttacgttaagtatacacgtgccatggtggtttgctgcatccatcaacccatcatctacaataggtatttctcctaatgctatcccttttctagtcttccaccccctgacaggccccgatgtgtgatgttcccctccctgtgtccatgtgttctcattgttcaactcccacttatgagtgaaaacattggttttctgttcttgttagtttgctgagaatggtttccagcttcatccatgtccctgcaaaagacatgaattcatcctgttttatggccacatcatggtgtatatgtgccacagtttctttatccagtctatcattgatgggcatttgggttggttccaagtctttgctattgtgagcagtgctgcaataaacatacatgtgcatgtgtctttatagcacatgatttataatccgttgggtatatacccagtaatgggattgctgggtcaaatggtatttctgggtctagatccttgaggaattgccacactgggagaccaaaagactttaaagcactgttaatttaattgggaagataagaaatactattcatattatagttgagatttgagatgggctttgaaggatgaataggttttttgacagcaattggagggaggatattccaagtgaaatgaatactgagcaaagactcaaagatgagaaaacatggactaggttataggaatgtaacagtttggctagtatatttgtgtagggaaaaaataaaagatatgctggaatgaagtgaaaaggtgtttagatatttccaattttgtagaattttatttttaattcagttggtgtactaattgtaaaattaccttgaccaaactgatatcaggatgacaatgtcaacattgcacactctttgaagacagttctcatttgctgaatgaatgaatgaatgctgacccacacattttcaaggaaaaccttggttatgttcaatacatgtattttaaaactgagggaagtatgtcctttctgagagattgtcatcaacatggataactgaaaggttttgatgcttaaaaggataagctccaaatatctggaacattcacttgcatatatcactacatttcccaatagtatttgttaaattaaaccttaggtaataaagtgctagggttctttttcctgttctaacgaagtgaatatcataaatcaattcatttgttttgctgatttatcacattcatgggtgctgacttttttttttaatctgctcccaacttttgcttttatcgtcattgaaatatgcttttcttctggtggtgaaagtagtatgtgaatgtttaatatgtaattctataatactgtgaattctgcatatcttgttctgttttgctaaaaaagtgaaaaaatatttccctgtgatgtgaaactgccattgaagtttggtgagtttatgagttggataactattataattactcagtgtatcttgctgttgaaaagcataagttaaaatgttttcatttattctacttggttgtagttataaaattatatggcccaataaatctgtacaataaatggccttttaatatatatattttaatttttagaaattaaaagattacagaaaagtccaaaggttatgtcagaattatcaaacattaatatttttgcatatttagctatccttctaaaattacatcaataatatgtctttaaaaatagaatatttcaaataaagttgaattttttttttttttaccaccatctccaattctgatcctctgtcttgtataaagtaacctattataaattgggtatgtatgttcctagtacttttttggtatttttactcatttgtgtaaccatacatttttaaattttttatttgaagagatggttatcatagtgaatgtattctacaacttgcattttttcactcaataattctgatatctagccatcttgatacttccagacgtagttcattcttttaactgctatgtagcatatatctataatatatctctaacagattttagattgtctgcagttatgagcagttcatctgtgaacatttttcttcatattttcttatacattcaagcaaatgtttttctagtaggtgcctagaaataaaattgcatggcatatgacagtgaaaatctttatattgttaatgattaatgtactttaaccaatagttttttagtcataaatgactgtagactcttacttaatattatagtttttaaaacttgtcaaattttatttagttaggtcacaaccatctgttttatcaaggtggatttggtctgttctatgacaatatgctgtgttcttaacaatcagcagttatctcataatcttataactactgaggaaagcagtgaaataaatggatggatgcacagatgggcaaagtctatcactaccactgaaataattattttaagtacatgccatatttaactgtgtcaatacattttattttgagtttggggatgccatcctagaaactgaatatacatgtaaataattaaactgttgtatattattccaacaagtacatttagggtactgttgtaaaacattttcaaaattaaatgtcaaatggaaattcaaattcaataaaattaaggattataaaactaaagctaagcatgttgtatgtaacagaagttattctggaaagtcctgcaaaaattagaatttgcattcatattgtgaattactgtactgctttaaaaaggaacaaggaaggtatttatgttttgatgtagaaagatcttgaagatctatttaagttacataaaggcaagacaaagcaaagtacatattgtcctaatatttgtgtaaaaatgaagtatttgttttaacttacatatacgtgaagtgatctctgaaccaaaaactaataatagtgattatgtgttgtgaaggttgggaattgggcagatagatacagaacaagagagaaactaaaaaaaaaatggattctgacagagaaactttttacatacctttttaaaaataccttttcacatttgaagctttgagtatattgccgtttttttaaaaaagtaatctataattttaatatttctattgtatacaattgaaaagtatttttaaatttcccatgtatatggaaaaaataaattagtaaaaacaatcatgagccaaatgacaactttggctgaaccctgtactgatatggaaggtaataatgatacgtgggttagtaataaagcacctctcctttggtaattgtaagggttctagttttcaaaatggcagttcatgactttccacagcctcttcctgtggtgaatttctggccagttggatgacagaaatacagggcttgctaaaagttaaagtatcttggcagttctggaaagagaccatctaaaccaccagscaatgctacctcagcaatattaccaataaccagttgttcactaagaaccggtcagggcgcggtgtggaccataggtatctttgctattctggactgttagtttgcttcctgatgtgcctctgcttatcttttcttcctctcagtttcattgggatcctcagctattgagttctgtcctggtgcattccagccccactgcaaaagaataggaatgagcatctaacacatccatctctgaatgcagaagaggttgaagtataacaaccttattcattattattacttgcttaatgaatttctggatttttattatctgtcattaaatatccaggacaggtgtcatccatttatccttatatcagttcagtaatctattcagtgaatatcagaactgggtgacatcctgattttaccacttactggctctgtggcactggctatggttttatcctcacagagcttcagttgcttcatctttaaagtttgaccaatagtaactaattaaacaggtaggtggaagataccatacgtaaagtttctagactaggtgccaaagcataggagtcgctcaagagatggtagctgaaaaaggaagtttcttacagtttttgatggtgtatggagtgacagtrttcaatgcaagtagtgtctaatttgtgtagtctaattagtggcattttaaaatcccattgtaggctttaaaaaaatctgagggattgaatgttgttcttcttactatattagaaaagaagattaagaaggaacaaaagtagtttccttttaatagatccattaatggaaaacaagcagatttctttggaatgaaaaataatggaaagttcataggcaaatgcttgaaaagcatttttccccacagaggacagtttagagattttaagaaataagagtctcatgtttgtggaaaattagaaataatacctccttwttctgatataattgagcaagaattgaggactgaatttccatctctgtctccccctccccgctccctgaacagagagattttgcctttcaaggtctcagtctgaggatttttgcttgatataggacctgtattcttttctcattctgttmctgtgatatttttagaagtatccattttccttctaatatgcccattctgcccgtctttgaagtacctrtatctytaaatgatgcctgtattcaccagtctgaagactcttctgactgggttttgcagggagcttgtggtgcatggggcatggggcattgactccgccaaggtgctttgcaggctaggcataacttatccaggtgaggacaggtactagaaggaagtgagaagaataatgttctgtggccctttcagaacctcaagaataccttggcagatccaagcgttctgcttatagaatgttagcagtagtagagcattatttctgtaattaggcacataggcaagagttaagtaaaaagtccggaatattaaccttaaaaaggaagacttggtagcacagaatatctgtgtctcagggggaaaaaagccagtaggcatgttctgtgacacctcaaaaaactgtaaaaggtggaaagtagtacaatttccaagaattagttagctcttcaaggagagtgagttccccaccattggtgttactgaaggaaaaagaagggcaaccacttttcagggttattgaaggaatttacccatcagattcattttgatgtcaataaccactaagctctcctctgtcttaaagattaaataatttttcaaattagattcattttttaccttttatccattggacagtttttacatcagtgttttatttagcatcattctgattgttgtttactttttaaaggggagaaggagaaaaggggagaggaaaggaagaccacattaaattcccaaataaaagaagcaatacaatctgggaaaaatagcgagaccttgtctctactaaaaaaaaaaaaaaaaaaaaaaaaaaaagtgggcacctgtactcctagctactccagaggatgaggtgggaggattgcttgagccaggtttttgatgctgcagtgagctctgatcatgccactgcactccagtgtgggttacagaatgagatcctgtctcaaaaagtatatataaatttaaaaaaagaagaaataaattaaattttaaaaattaaatgtaaaatgttatgaaccttcccccgcccttaacaaaattttaagtgtataggacattattgttaacacaactttaagcacagtgttgtacagcagacctctggaacttcatcttgcataactgacactttatacacattaacagcaactgcttccccacctcagttcctggcaaccatcattctactttctgcatctatgagtttgactactttagacacttcatcagtggaggcatgcagtatttgtccttctgtgactggcttatttcacttggcataatgttctcaaggttaatctgtgttgttgcatacgatggaatttcattcttttaaaaggctgaataatattttactgtgtgtatatcacacagtaaatccattttatccattcatctgttgatggacattaaagttgtttttacatattggctgttgtgtacaatgcttcattgtacatatgggagtgccactatctcttaaagattctgacttcagttcttttaaaaaattaaacacagaactaccatatcccagaagtgggattggtagatcatatgttagttttgtgtttaattttttttaaaagcattttccttattattgtttggatatgcatttccctgatggttagtgatgtccagcatcttcctatacctgttagtcatttgtgtgtcttctttggagaagtgtcaattcaagtcctttgcccattttttaattgagatatttggagttttttgctattgagttatagcagtttcttatatgttacagctgttaaccccttatcagatatgtggttagcaaatatattctccgatcttgtaggttgccatttcattgtttcctttgctatgcagaaactttttagtttgatacagtcatgctccttgtctgttttttcttcttttgactgtgcttttgatgtcatagccaacaaatcgttgccaagacccatgtaataaaaatttccccctatgttctaggaattttacagttctgggtcctttgtttcagtccttaatccatttttagttggtattgctttttaaggaagccattattttaaaaataaaaatgaaaaacccatctcctttttatatatacctcctcttgatattttttggatagatataccttcactgtgctaactagagagaggaagtactcttttgcaatgcctgcgaggcataactaaacataaaggcccttttctttcagaaaaaattgacttcctgatgaaaagatcctgtattatttagtgtttccagaatatcaagatgataaattatcactggaaattatacatttccacagtcatcattggatagattataattggcgatattttgtaattctgtatgtctgggaatatgttaactgaaatactttgtaaaaagtataagactcataggaatttacttttctgactttttgtttacgagctttacaccacataaaattaagttaaatgactacatgcttcctataaagcatgtctgaaacccagccctctctaatcatggtagccatttaaagtgaagctgaagaggagccatgctattattcttcctttcccccagccgtttcaagattagattttgccagagaaataacagacacatctggtataggagacacttataacaaatctttctatgtagagaaccgttttattaattgtgccttctaattcaaaatatactacaaagttaaataaatgtgattagaaaggttctttgtgataattttaagtactgtttgattgggagatgggctgatggagaggggaaataatctagatttatttcatcagaattagtcctacattgattattctgggtaaaaaataataaattatgtaagtttaagaactattaaacttttaagattaacaatgtagaatacaggatcattttgtaggtggctctaaattaagcctttagattgaatcattttatgagaccaaataatcagtttaaagtaccttatgctttacctgatttaataatcaacaaaacattttattctaaatttattgtaaagcaagatagtaattggattttttatccccaagaatcaactgctggaggtatcttgtttactatattcatgtagccagaagtgaaaagtaactgaagactttattgttacagtcctgtcttatattctatgtatgtctgcaccctgccttaagtgtggttgtttggaaccgaaataacatctttcttgttggaaaatatggatgtatatgtcttatgtgcattaacaatgcttctgaaacatgaccttactaaatatatcaagcctttccatatatcagctttagtatttatcaataaatatatacaggaagctatgaaatatatgtatagaaataaatatttaatatttagttgggtgactatatttgtaccatattttgtgagaataaattttctttggattataatagtaatgtttattttagaaaatttagaaaaatgcttttgtatttgaagtctcagagcaagtaaggtaaaatgctgtaaaatttatataaccattgaaatgttaggctcacaacaaatctttgataatctatattcagttcagcaggccaagacactggggaggagaaaggttctgtggtagtaaatactagcactatttagtcacataattttgaaatgcggcattatttttgttaygtagaactagaaaataggaaaataaaaatcattaaataaatagcagtaacagtaccgacatttttggacattacagctctaccagttcttagctttctagttgacaccattactatttatttatttatttaattttgtaacaagaatgcagatgccatttatttggtccataagtatagccattgagttttacaaaacatcaactataaataacctgaaactataacaatacacaaaaattggcttcatacacagacataccaggcagtacaaactgaaaacgtgagtaaattaacattgttttacattaatatacatagtgccatttaacatttaaaaacaagtttcaatacatagcatttgatacttctttgaatctgtttcagtcagagtatgaaaatggttagagctaggctaaaattaatttttctagccaaaaataaaggcatgatatttataaccaggtatcaacttaaccacaatattttgaaactgttaatgatacctaagggtatttacattaaaaaggcaacatgcattgtgttgttttatctcatgactggttatgcacatactttgttcaaagggtttttaaagctatattcctactttcagtatagcatactgcagtgtgtctaacagttctagcaaaatgaatgctttcagagggagcagaatcattttcaagtcactggtgtccattttttcccctttggaacaaaggacataacaaataatctggttctgcctagataaactaagtagtaagagggctctgtttagaggcatttctgttcaatctaatgctatgacatcatccagctcttccttctgttctatacgtgacctctttgcactgagattctctttctcgtctgatttcctcttgcggcttctctcttcttcactgacgtcagcattctttgaagaatcttcttcatccgaatcaactgtgagaacatcatcttgctcttgagctgtggaggtggaaggctgacctccatcattactgccattggttatgcttttggcagcatcttcagcttgttttggccccactttttctggggcatcaccaacacttcaaattcaacatcctttcctaggtcttcactatgaaggatgttgatcaataaagtatagtcctggaggaagtaatctgcttgaagccagctgcaatttctcattccaaattctgacaacttcttgtgattattagcttctgtctctcccttttcagaagatattaggattgttcctttcccatcttcaatttggacatctggtgctaccatagcaaatttttgtttcactaccttgtctcgtaaggtgagaacagtcactttatggacattcagcygtacagtcacctggcttgctggcacatatgtaacaattggggttgggaggatccagtgcacaaggcacaagaaacttctttcttggatttgcttgtttattcaaaacaattgttctgcagtggtctatttttcctgataagatcttcaatctttccaatactgtcaacccagcaatcactgcattagtagtagcaatagcaggaataatattccctgccaytgatttgatatcaaatctactcttcatattcatactgaaaatatgcatcctgaggtttgtagcagaggtaacaaaatccattgcatatgggtcatccttatcccatgtgagctcagctccatcccccttttctgctaaatgaactctcagagtctcagtgctgtgagctccttaagaaccttgtgctcaccggcttctcccacgtcgacctgattgatctggttactattgatgtcagcaacctcaacagtttttgtttcaaaagaaacatgttggaagatcaaaggcacaggttgccagggaaagtgcactgcagttttayctgaaagctaatatggttgcctaccatgacagcatcatgaaccctgactataatgtggcatatttttgacagtttatattggttatgaatgctttagataacagagctgcccaaaaccgtgttaatagagtgtgcctggcagctgttgttcctcttattgaaagtggaactgctgggtatcttggacaagtaactactatcaaagagggtgtgaccaagtgttacgaatgtcatcctaagccaacccagagaacctctcctgactgtacaatttgtaacacaccttcagaacctatacattgcatcttttgggcaaagtacttaagaagtatctcctgacagagctgaccctgaagctgcctgggaaccaacagaagccaaagccagagctagaacattctaataaagaaggtgacattaaacgtatttccactaaggaatgggctaaatcaactggatataatccagttaaactttttaccaagctttttaaagatgacatcaggtatctgttgataatggacaaactatggcggaaaaggaaacctccagttctgttggactgggctgaagtacaaagtcaaggagaagaaacgaatgcatcagatcaacagaatgaaccccagttaggcctgaaagaccggcaggttctagatgtaaaaagctgtgcacgtcgattttatttatttttgagatggagtgtagctctgttgcccaggctggagtgcaatggtgcgatctcggctcactgcaacctctgcctcgcaggttcaagtgattctcctgcctcagcctcccaagtagctgggattacaggttcccaccaccacgcccagctgatttttgtatttttagtagagacggggtttcgccgtgttgaccaggctggtctcgaactcctgacctcaggcagtccgtgcgcctcggcctcccaaattgctcagattacaggcgtgagccatcgcacccggcctaccattaccatttctatcttcattatttttattttatcgattccctagaaagcaaacataggaagacagcaactagacaactaggcatgaaatgtcaatgtatatttctgccttcacacataagtgagggatgtttttaaaacccctttttaaaactccacataggtaattgcttttactgttcacctttgaagtgagaagtgttttgataactgccacaggttgttgagttaatagcaattttctggtcagtagtttttcgaagaagctgctcttatagatttgaataaacaggtaatagatgagaataaagggtacaaatatttggccaggacttttttcttttttaagtaaagaagtagttcattgcctatgacatctaaattgagaatccagttttaaactcttcttaatccatattatctttaattcctacgtgtcaattcaagaagagtgagaaatgaatgactctttgtacctcattataggtagacattggtacgtgtatgcacggattcagtaactttaaaagcctgtgccagatgcaactatttaaaagaacaatgttttcaataatatgggggaactagcttgtttgtcaagttaagaggaaaagataagattcaaacgagtttatgtgttattaattgatgtttaataaaagcataagaaaaaaacagtaaagagatgttgccaaagatataacagtggttgtatttggatggtgagattgtttattttcccctttctttctggttttggccatttctttttgggagtgtatttgcttttgtggcaggaaaaaactgaactcagaacaccttaggaactctttttagtcattgggattaagtccctgttttattagttgatacatgtagaaattataccttaactattttaagtcagaatatgtaagtgtacagtcattggtgcacatgtcaaaaatataaaagagtatttttttccttgagtatgggtctacttatgagagttgcacattatctttgttttataaagcaaacctataatacgtagtctatattttccattttggaccgctttaacatgtaaccaaaaaatttaagacctttgcaaaacaacttagatctccagatttttccctcaaagtcttttgcaatttttttgtcaatgtctgtcctaagagcagtgtttcctaggtctttctggagtattcagtttgattttcatggaagcaatagtcctctttcatttcacactcatatgcattgatttttgcagttacagtaacagagaaaactgccataaactagtttgggaataaacagccaactaaaatgagaactttgtgaaactatctaagttgttcattactgtgtataacttagtatgtatcctttttgtgggaggtgggatctgggctttaactcannnnnnnnnnnnnnnnnnnnnnnnnnnnnnnnnnnnnnnnnnnnnnnnnnnnnnnnnnnnnnnnnnnnnnnnnnnnnnnnnnnnnnnnnnnnnnnnnnnnnnnnnnnnnnnnnnnnnnnnnnnnnnnnnnnnnnnnnnnnnnnnnnnnnnnnnnnnnnnnnnnnnnnnnnnnnnnnnnnnnnnnnnnnnnnnnnnnnnnnnnnnnnnnnnnnnnnnnnnnnnnnnnnnnnnnnnnnnnnnnnnnnnnnnnnnnnnnnnnnnnnnnnnnnnnnnnnnnnnnnnnnnnnnnnnnttttgggcaaagtacttaagaagtatctcctgacagagctgaccctgaagctgcctgggaaccaacagaagccaaagccagagctagaacattctaataaagaaggtgacattaaacgtatttccactaaggaatgggctaaatcaactggatataatccagttaaactttttaccaagctttttaaagatgacatcaggtatctgttgataatggacaaactatggcggaaaaggaaacctccagttctgttggactgggctgaagtacaaagtcaaggagaagaaacgaatgcatcagatcaacagaatgaaccccagttaggcctgaaagaccggcaggttctagatgtaaaaagctgtgcatgtcgattttatttatttttgagatggagtgtagctctgttgcccaggctagagtgcaatggtgcgatcttggctcactgcaacctccgcctcctgggttcaagcaattctcctgactccgcctcccaagtagctgggattataggcacccaccacgcccagctgatttttgtatttttagtagagacgggctttcaccatattgtccaggctggtctcgaactcctgaccgcaggtgatccacctgccttggcctcccaaagtgctgggattacaggcacaagccactgcgcccagcctatatgtttaactttttaagaaattgtccaactgttttccataatggttgtctcattttatattcccaccagcagttcatgagaattccagttactccacattcttgacaagtctcggtatgaccggtcttcagttttagccattcttacaaatttttgtgttatctcattgtagttttccttttattttctctaatgacaaacgtctttcatcttcttatctgcatatctcttttttggggaagtgtccaaatccttagttcatttaaaaaaatggactggctattttctcattaggttgtaagatacacattttttgttgatatgatacaaatcttttgttggctatacatttcacaaatttttttcctttatgtggctttccttttcatttctgtatcttttaatttcagtgaagtccactatattgatgtttgtttttgtagttcttgtttactgtgtcatatttaagaaatctttgccaaacctaaaattactaggattgtttcttctataagttttataattttagctcttatatttaggtctgtgattcattttaaattcatttttgtatatgatgtgaagaatgaagaaagaatgaagattcccttaaaaaaatggctatccagttgttcccatactatttgttgaagaggtgatcattttcttcattgaactatcctaccaagtttttctaaaatcaattgatcatatttgtatccaagtttttctaaaatcaattgatcatatttgtatagttatatttctggattcactattctgttccattgatctggatgtctgtcttcatgccagtactatactgtctggattactgtaacttgataacaagtcttgagataaagtggtgtaaatccttcaattttcttatttttcaatttgttttgcctattccaaattatttacatttccatattagttggtcaattcataccaaaaagtgtcctgggattttgattgggattgcatggcatctgtatataaatttttggagaattgacatcttaacagtagtctttcaatcatgaatgtggcatatctatttagatcttatttaatttttctcagcagagttttataatttttactgtatggtcttgtacatcttattgcaaatttatttatatttttgtgctattttacatggtattttttatgtgaatttctgattatctgttattagtaatatacaattgatttagktatattgatttttatatcctgcaaccttgctaaactcattaattctcgtagcttttttattagattcttttggaatttctacgcattcagtcatgctgtctgtgacaaaagacagttttacttcttgctctctaatctgtgtgcctttctttttcttgccttattgcacaggctagagcctccaagacagtgttgtgtaaaactgatgagggtggacatccttgcctcattcatggttttagggtgaaagtatccagtctgtctttcagtaaagtatgataccagctgaacatttttacagatatccttttattagtttgaggaagttcccttctattcccagtttgccgagatttttatcatgcttctagtcccagtttgcygagatttttatcatgcttctagtcccagtttgctgagatttttatcatgcttctagtcccagtttgctgagatttttatcatgaattgatgttggattttgtttatgtgcatgtattaagatgaatacrtggtctttagcttatttaataaggtaagttacattgacttytgcatgttaaaccaatctgtatccttgggataaactacataggtatgataattgtcctttcatttcactaaatgttgttaatttttgcctctataagggatttcatgtctgattttggtatcaaaggctggcttcagagactcaactggaaagcgttttcttcaagagtttgtgttgatgttttcttatgttggtatttttggtattggtattttttttgtttggtagaattttctaaagccatttgggccttttgtttatctgtgagaaagatttgttttcattttttgtgcgaaggttttttatctatacatttaatagatttaaaaggttattctgtttagctatctgtgagcttcgttaatttttgtgtttcaaggaatttagcaatttatcaagtttattggctacagttgcttataatattcttttattgtctgtagtattctctcctttgtcatttctgatattaataatttgtatcttccctttttttttcttattagtctggctagaagtttatcagttttatttttatttatttatttatttttggcacaaagaactagctgtggtttaggtcactggtgttagaactgccttcttttctaatatgatcgtgtagtgctgtatgtttccctaaaagcactgcttcagttacatcttacaattttgatgtttttgttttattaggttcaaaatgcttttctactttcctttttgtttttttctttgtcctgtgggttacttgaagtgtgttatttagtccaagtatttgtggacatttcaaatgtcttttctgttattttaaatttaattctgttttagtcagagaacatattttgtatgatttgagtactttcaaatattttgaaccttgttttatgactgagaatatggtctgtcttatcaaatgttccatgtrcacttgaaaagaatgtgtatctgcattctggatggagtggtctctaaatgccaattggctaattagttgatgatattgttcaaatttgctgtatcttagtgattttctgtttactatcaattgttgtgagcatgatggtgaaatctttaattatacttgcagatttgtctgtttttcctgtgagcttttaattcatatgtttttaaaactctcttataaaggtacaaaattgtttaggattgttatgtctttttgataaattgacccctttatcattatgaaatgatcctttttatctttgccagtattctttactctgaaatccatttgtcatgaatatggctacaccagctttttttgatttgtgataatgtgatatatcttttctcatccttttgcttttaagttatttaatgtttctctcatttaaagtggttttcttgtggtcagaatatagttgaatcttgcttttttatctagtctgacaatctcagccttttctatggtgtgtatggatcctgataattagtacattatcttttaatgtgcaaatataaatgttagtaattataaattaagatttaagaatttgaataatttgatagatcccatcaagtaatcttattcctaaaatttctattttctttatttttcgaactttgttttatttagacttattatttctaggttatcttaggccaccaagaaaaagccaaaattgggaagtaaactgggactacattagaaataaaatggcctccaaatatgagagattatgctacagagactcctgtaaaattttagctataaaagggtaaaatggagaatggtacccacagggtcacaaaccagagtcaacaaatgttgactccagtgttgctttctaatatcttctgtttgttattgattttagactacttgctcttatatcaccttgggagcttttaagaaatacagattccccagtcccatggaatttgttataccctgtaatctattttaaggtaatgtaactttccatgtgattcttagattactctagggtcagaaatcatggtcctgccctacttatctgaccactttaatctctgacttttctgccactatcactttctcctacagagtcttggcaccattacaggaaaaaacctctgaggattagtcaggtgtgatatacctagaatattatactaaacagtcttgacatgtatggagctttagctttgactgtgctatatgtaacattaggttagtagagatcaaatcacctcaaaccttcacttttaacattatccttcacttccttttaatatttcttagattgtggagtgaagaactctgtctcccatatggtttaatttagtatgctatattatttttattaagcaaatttgtgtgtctgctgtatactgggtaataatggtcatcacctttctttcagagaaagaagtagcttttaaacaagttatgctctcctcccccaaaaagtcacgttaattctacatgatttttttttttcagttttcgtggtttgattggttccagtgttcaattagaatgtacttaaatttatgttgcctaattcaaatagattaatggggatgaggcagagtaactcacaatagaacaaacagttttgagttactttgccttatccccattaattttatcaacccataccttttcataatgatcataattttatttctggcataggaaaataagccaaaaatattaatggatttaaaaagctaatatatagggtatgtaaagatcaacaaattattttaaagtagatattaaaatgtctattgtatagtaaatgttcagtagtctgcaaaataaagaatattctacttgagaatttttttcttacacttgtttcatatgattaaaattcagtaaaacacaattaaaactcaaattatggtcaagcattagtttttgtcgattgataacaactgtccagcattttactggtcattattgagaatatcaattatcattgcattgtgggcatgttgaagtgtcactagtaaagaattgtagtttacaggatcctgaataatggttcttttttgttacacaagacaaatgcaaaggaagacagtttttggaaatcgatgtttaaaaaagaacatctttagaatattaatacctgtgactaatttttaaagattcatgaaaaatacaaattcaactgaaaagctataacagtttctcagaagatacaaagctgtaaaatataaaaagttttaggccaggtgcaatggtttacacctgtaatcccagcatcttgggaggctgaggtgggctaatcgcttgagcctaggagtttgagaccagcctgggcaacatgctgaaaccctgtatctacaaaaaatacaaaaattagccaggcatgatagcgcacacctgtagtcccagctactccggaagctgaggtgagaggatcacttgagcctgggaggtcgaggctgcagtgagccctaatcatgccactgcactgcaggctaggtgacagagcgagaccctgtctcaaaaaaaatttttttttaactcacttttttagtcttaacaatgggtagtgtacaatctacttgaacttcagtttttaactagtaagccaggactggaacttgtagtttaatcagaatttcttcatatatacgtgaatgttcctagatgaatatctttaacatggttcttgaattcttggttgtaccccaaaaatggtttcagtttaaaagggtgtggggcaatgaccatgattcagaattaattaatgttgcattttcacagggttttgtaacagtttatgctcaagaacaatgtaaacatttcacttgtgctttccataatgatggtacagcatgctttaaagaggaactgactagccttaggagacgtagtggttggtggcgagcagtgaggaagatgggaaatccagttagtccaatagaatcagtgccatgagttaaagggtaatggatgtgatgaccagaataccctcacaactagtttataccattacgttgtttttcacagatctaaggtayatctaaaattccaattaatggggtacaattaattagttacatggaaaagataatattctatatctgtcttcttaataagccaacagaaatgccctctagaacaccgattctcaaagtgttcctggaccatcatatcagcattgggaactggactggcaaattcttagtccttggaattagtagctagggaatgtgggaaggcaggaatttgtattttaacaaatgctccaagtaattctgatgcatgctcagtttgagaaccactgctttagaatatgatgcatatcaaactccagtaaaataatagcaagttttcagcattgctaattctaattttcaacagctgctgcattaggttttcgttaatgatacccaaacccagctggagttgaatcctagttacttcttattctttttacttactagtgagtggagcaccaggtgcagttgttgaagtgtgaaaataatttagctttgtagacagttctggcatttcttgattttgaaaatgctttaatcttcttggtatgatatttcaacaatcaaagcacatctattttaatggcagtatggacttgtgctaagaatttaaggaaatctctgaattattcctaccagtttaatatcaaaattaatattttagctgaattacaaagcttatatataatttactcctattttatttttccaccagtatgtgcattaaaaattttttaatgtcttcctgaataatttactttcaacctttttcacatcttctacaatattatgtttagttttactttggaaaaaaatgctagcagagattttagttaaatgcattcttagtagtaaggtccagctgcgtgctttgtgagttgcaaaactcatgagtccttcaaaaaacaytttaaaggcatgtcagtaagacatgaaactagcatttatctgctgcagtatactttgagtatytacaagtggacaacatggtcaaaagcacttaaaatgtttaatagattagtacatgatcttgcagtgatagtgcagatttgtttttggttgtattgcacatatgttataggtaatgttggtaatacagatatttagaaccaaaagctgatgaattcaaaattctcttttgatgtttaaaaataaaaataaaaataaaattctcttttttttaactgtgtaccttcatgatctcatttactccttttacatcagctgatgcctttgtgttgtgactcttaatttctatctttagttcagaactttctcctgagatgtatatcttctgtaacctacatattactacctggatgttccatgggcacatgaaactcactgtgtctgaaactgataatccaaatctctccctcatactaaccctgtaaatacatatggaatcagagttacattaatagcctatttttcattattataataggtcaaatagcctattttggccattaccctagatgtttgcacagggcttcattctccattgaaattcctttctaatatttctgaaactcttctagagatatctcatgtgggtttttttgtttgttttttaaaaagcagactcccctctacccataagaatctgcttggttacytccttgtccatagaacaactatctctaatcaagcatcatcatctctgctgcttccccaagaggaaatgccagaaagtatgggagccttcatggtgctaagattgatgtcacatttcatgtagaaatggagaaagttctcttatgtcctcagtaatgtcatactttatcacttgtgaacctgctttatgtgcctgtgtgaagaaatggcaaactatataccagctattcatgcatttcttcctctagtatgtttttattgctaggaagcaactgcccaccaaggattaaatttctcaccacaacccctgcatctaggtagggccatatgactagtgtttgccaagataattaagaaatggttgtgctttctgcactctatcggccagctggatcaaaagacttcaaggtactgtggagaatggcaaagtcagaagaggaaaggagcataattccttgaattactgcataaaaggctgtctgccaaccagaaacactcatgttggtacttgagcaagaactaaacttcttgtgtagtaaacaatcgagatttcgttacaacagctgatgtttccctaattaatacagtgccccctttatattacaaagcccttctttgaaacagctccttaatcatttccctgcattccctttctctaaaaactcaaacacataaatatctggaaattcatggggctgggagggaacagatgccacattacattctaatccagaacttttctgccattgtgccctccccatcctattccctagacctgttaggcttggatattgttcttacacaagcttgaaataaagccttatgaaaatgggctcttccacagaccagctacatacttgatttctcagtttgaacttcagtgtagactacaaactatcctgaattcctttcttcatccccatttrttcttccttccccaattctcaaattcactgaatggtaccatcttcctcctcagtaaagaagcctagagacagtaccttagccacttccaattccgtcttctactcttgtcacctaagcctctaacccattaacctatctccttccagtccccatgcttcttccttactgcagttgctttccttcaagtcttaatcctcactatgtcttcaggccattgatactcaactgtaagcgttatcactctataaaatcttgcattgtagaagtcccgcgtgggttacttaaaactctttaaaaaaatggctctttatcgcttatagaagttgttctgaaagtgcagtccatgtaccatagggatgcttaagactcctttagggctttcacaaaatagttcacaatcattttcataataattctaagatgttagttgcctttttcactagttgacatttgtccttatggtaaaaagcattggtggtaccaaactgtactagtaggcattgtgttttttgctgcctttctctaacagcccaaaccctcaaaagccattttcacataagaatgtccgtcagaaagcaataactttattaaatattgactattttgtgtatgtccttaatattctgtcacaatatataaagtacatcaagcacttctgcataccagagtacagaggttgtcttgaggtaaagcacttgtgtgattgagttgtgctgtggtttgaatatggtttgtctctaccaaaactcatgttgaggcttggtccccattgtaatggtgttgagaggtggtgggacctttaagaggcgtttggatcatgaggaatctgctctcatgaaagaatcagtacagtcttgagggagttagtgagtcctcactctctgaggactacgttagttacaatgagatcaggttgttatgaagcaagattgcctctcrtgtttgcgctattttctgcatatgtcagtttctcttctattcctccatcattttttgatacagcatgaagcccttaccagaagacaacagatgtggctgcccagtcttgaacttgccagcctaaagaaccagaagctaaagaaacttctttataaactacctggtctctgtcatagcaagagaaaatagattaagacaagttgcaagctcaacaaggcaatttttttcatagaacactgtttttacttgaaagaatgatcaacacacaaactatgtttattcagacttgtgtagttgggagatattttctcaaaaatgaatgaagtgaacttgtcgctgtaaggaaaatagttgacagtattagttgccaattataaaattcaaaaaaacttgtatctgccrctatgaacataacagtttcccaatacttagacttctctgagattggtggtgttataatgaatgtgattttttaaattgtataatttttattatacaattctaatgtattaatatttggaggatctgcataactccgtataccaatatttttcaaatgacagtgcaaagtatatcaatataacagtatatattcactgatatgaacttgaatagtgtatattcattaatatggttttctatcacattgcagttaacttttaagaaattaacactaggttttagtgtagaattgaaaaagaatatttccaattatttgaaaaggctactaaagtactccttttccaactgtatctatatgagtctgattttcttcattgactccaacccaaataatatatggtaatattttgaatggagaagcagatatgaaaatccagttgtcttctattaagccagacactttataagatttgcaaaaatatgttacactaaatttttttgcttttggaaaattttttcacaaaatcatgtcatttatgctgacatgtcatattgttattttaaagtgagttaataaatgtttctcaattttaattactaatgtgctgttgctagatgtaacccacataaaccaaagctctttggtgtccttaacaatctttaagtgtataaaaggttctgagaccagcaagtttcagaatgctggcttataggatatggttcatattcctaatatggtgattaagacactgtgatctggcttctgcccacttttctgccttatgttttaccttgcccttaatttttctcctatcttctaagcttattaagaaccacttttagggcctatatgcactctacagtgttgtgcctccaaggactttgctcatgcttcttccctttgcctggaaggtttctttgtcacccagaaggcactttttttttttttttttaaagacaaagtctcactcccagcactctgggaggccgaggcaggtggatcacgaggtcaggagatcgaaaccatcctggctaacacggtgaaaccccatctctactaaaaatacaaaaaattagccaggcgtggtggcaggtgcctgtagtcccagctactcaggaggctgaggcaggagaatggcgtgaacccgggaggcggagcttgcagtgagctgagatcatgccactgcactccagcctgggcgacagagcgagactctgtctcaaaaaaagaaaaagagagagaaaaaaaactgtattttttgtcttaagctaaacaaatacatctgggtgaaactgaataaaataggattgtgggagaataagtaggcatcctactcccttcctcccacccagttgttactggcctgcttctctctctatttctgcttctttcgattttgttttagcctcggggtgagtgggtggagggagtccaaaaacacatctgtactgtagaggagaaattgatagcatagctttatggaacttatctcagggttatgcaatccagaggtcccctgatttcagctctcatcagtgcaggaatcctttttccatcattctttgacaggtcctcatgcaacctctatatgagtatctccagagactaataacttaccaccccctaaactgcctgtgtctttactttgcactactaattatttgaaagcccgttctctcttgagccacagtcatatctttttttctggagtaatgctacaaaaaggattctgcctctttttcacaataacttttcaagtatttcaagagactgttagtcatttttatggattttctcttagctaagtgcactgttttgttttgtttttttttaagttttttatgtggcatgatccatccagctcattcccattctggagtactctagcttttaacgtgtgcctgaaatgacacataatagccctgtgtgactaaatacaaatttcttaggaactgttccttcctgtgacttgaaacattaattactgtgttttggttaggagtataagctttggtatcagacagatgagggtgtgaattctgacttttttcccctgtaattcatatctctgagtctaaattccgtaatgttaccatataggattattgcaagaattaggtgaagtaatgtacatttaaacatgaaccgttggctgggtgcggtggctcacgactgtaatcctggcactttgggaggccgaggcggggaatcatgaggtcaggagatcaaaccatcctggctaacatggtgaaactccatctctactaaaaatacaaaaaattagccaggcgtggtagcaggtgcctgtagtcccagctactcgggaggttgaggcaggagaatggcgtgaacccaggaggcagagcttgcagtgagccgagatcacaccactgcactccaacctgggcaacagagtgagactccgtctcaaaaaaataaaaaatgaataaaatatgaagcattgttcctggctcacagtaaaggctcaaagtagaagcacttgttacactgataattatatacctattggcacagcctaaaattgccatacgtttttttgcagctgcttcacattactgttaatattataatcattatgctagtatatttgttgtttatcagcttgtgctactactcaggcttttatgccttctccaattagccatccccacatcttgaaagccagctctgtccttttaaggctgaacttactcagtgtattttccagaaggtttttctccaattcttggatccagaagtattttgttcttacttatggcatttgttacagtggcatttgttcaattttgtacaagatagactatgaaaataggaacagttcacttgagaaatttataaagagatgagggatgatgagattaatgtcttaataaagctcaagaaaaaggaaaagcatgtatagttggactccccattttgtatcagcgtacttatttcaagtgactgaaatgagtaaagaaagaagccttgaagtcagctcacctatgatttttaactatgatattttgtattttaaaaatagatacttggtgcaggtgttattggcagacagaagtaagaggctagggtgaacaggctatgggcgtctggtaaaagaatttttttcccaaaaatgctctgggagtttcattcccaaaagatggatgcaggtaaatctgactctggtcagtacaatcaaggcaaattggtgtttttctaaactgtgaattgggagaggattctacttacaatttgaataataggtctcatctctatacttattctggtacatttaaagaaaaacttaggccctatattggacctacttcagaccttacaatccatatagtaacccataaataagtaaaacctttgtatgttgtgattttttttccctattcaagaatgatacctagaatattatacaattactaatttggggaatgatatcaagaattatgttgtttttggctttggttgtggttttttataactttaaattttgagataattatatattcacaggaagttgcaaagatagtacagcatgtttttcttttaagcacctggaagacaaccatcttctgtccctctgtttcacttatttaccatgcctatttcaaaggaatgttgcaggaaacaattgcaaaatgcttttgcaatcccaaaataaaatatatcaaataattttaaaaggcatttgcaaaaaaaaggtagttctataatattgtagtgctgtatttaactataaggctctacctcttcctataatagaaatagacaaaatctcagacaatcagtataatgtggaacatgagctctagagtcacattgacctgtaatggtatcctgacatcagtaaacagctggtgatcacttaaagagactcagttttcttatttaaatggggataataattctgcctctcatgatatgatgtatataaaccacaacacagcatgggtgtaacagatgatatacataaaacacttaaagcatagtgagaattcaatgttagctattaccaatactattttttcatgtaggtgattagtgtatttctcagattgataataaaagaaggttataacttataaggatttcacattgttaaattaatgtaataactgtagaaaagtatagccatagccaagcttggcaagtacatttagtaaaatataactcatattcctttaacgtagtaaccttagcaataacacaaaaagaaaagaattggtgttttttggattgatggggtatttaataattactttaatgtttttatctaatagatcatctcaggagcattaactccaatatatttttagtgagaaccttatcacagatgaagttgtgaaagaaaatttgatatttattttgtaatgtattttcagaatgttaaggattaacatatatttaatgtggaagcattatgtttgtttaaaagatgtgtctaataagggcctacaaaaatttattgtacatgaagatactcaataaatattgttaaattgagaataaatgactaatttataaacagttaaatattttataatttgtttttaatgttattattaaaatgaacctgtattataagatctcaatatttggtaatttttttgaagtgaaacaaacataagttagccattttacagggaacaattcactggcatttggaacattcacaatattgtacaagcaccatctctatctagttccaaaacattactccaaaggaaaccccatcaccgttaatcgggtgctttccatttctccctccccccattccctggcaaccaccaatatattaatatatactgtttcatttttacctattctggatatttcatattaatctaattatatatgaccttcggtatctggcttcttagcatatttttgatgttcatctatattgtattactaacatatatgagtacttcattcctttctatagttgcataatattctattgctctgtatatagtaccacaatttatttgttcattcatctgttgatggacatttggattgtttctaccttttggctatagtgagttagtgctttaaacatttataagtatttgagtacctgttttcagttctctggggtggtatataccttggagtagaattactgaggtatttggtaattctgtttaacttttttgagaaactgccaaactgtttttcatcatgacttcaccatgttacatcccctccagcaatgtatgagggttacaatttgtcacttcctcactaacatttgttattttcctattcttttctctttttttttttttaagtttttggtttatctgtttttaattatagccatcctagtgtgtatgaagtggtactttgttgtggttttgatttgcatgtcccagtgactaatgatgttgaacatctgttcatgtttgttagtcatttgtatatcttctttgattattgattagagactgttcttttctaaagtctgcatacagtgctgtaaatttccctctcagtcctgccttaactgtgtcccacaaattttgatttgcttattttcattttcattcatgtcaatgtatttttaaaatttcccttgacatttctatttatttgtcttctgttctgtttttttcacttctgttttctctttctgcattcctgtgggttacttatatttttttttagaattgcattttgatttgagtttaatgtctttatatagtctttttcatgcttgttttacatattttattatataaatgtcacctgtcagttcactggtatcattttaccaattcaggtgaagtatagaaaccttacctccacttttgtctttttattctccctcacttacaatgtaattgtcttaaatatttgctctgccttcatttagagccacatcacagaatgccgtaataattttgctttctctgtcaaacttgcttttgaaaactcaagaggaaagggaaagtttattgtatttacacatatttttactctccatttttttgtttgttctttctgatgttttaagatttcttcttttatcttttcctttttgtttatttatagagtttttttagccagtcttttagggtaggtctactggcaataaatgctaattttctttcatgtgagttactttccctttcattcctgaaaattattttctctaggtatacgattattttatttcagcacttgaaaaacattgtgccacttcctattggctccatggttcgtgataagaaatctgctgttaatccagttttctcttgtaggcttcatayaggtgcattcaagactttttttgtcttttgttttcagaagtttgattatgatatgtcttgacatggatatctttgggtttaccttatttggagtttgttcagcttctctatctaaatgtttatgtctctttttaagtgtgtaaagttgtcagccataatttctttgagcacttttcaaccctgctttctttctcctattcttttaagactctgtgacaccaatgttagatcttttgttctagaccacagtttcttgagctcttgtttgtttttgtttctccttttcttggtctgttttcccactgctgttaggttcagtaatttcttttgttttttctttcagttcattaaacttttcttcatctcttccattctgctgttgaacccattcactgagctttttattttagttcgtgtatttccatttggttcttttttgagacaaagtctcgctctgttgcccaggctggagtgcaatggcgtgacttccgctcaccgcagcctctgcttcccaggttcaagtgattctcctgcctcatcctcctgagtagctgagactacaggcatgcaccaccacgcctggctaatttttgtatttttggtagagacaaggtttcactctgttggccaggctggtcttgaactcctgacctcatgatccacccgcctcggcttccctaaatgctgggattacaagcgtgagctaccatgcccggcctggttctttttttgtatcttcattttctctactgagattgtatttgctggggctttccatttttttcgtttggttcaagcatgttcataattgctcattaaagaatttttatcgtggctgctttaagtctttgataaattttaacattcctgttattttggtgttgttcatttcttgattgtctttattcattgagtttgagatcctgctggttcttggtatgatgaataagtattttatagaaacctgagcatttttgtattataagactctgggtctaattataatcttctgtttccttgcttggactccactgatactgcagaggtgccttgttacctgctgtctgagatgaaagtcctgaccctgtacttggccttctctgacatcaccccatcagggatattgggcattgtgagggtggaagtctaggctccctacttgtcctgtacagttggtgggggggccggtttttcctatgaaattggctactgtagagtggttattatctaagctttctatcttgctatgctgttcctttcctggtcctttggctacagagaataggtttttgtagggattcttttgtctgtacctgtttctagattgccagcttctatagctccaagtctggaatgtatgaggcataaataaaacttagggcaactcagcactttattgtccttaggtcccaggggttccagtagtctactgtcttctcttttagagtcttacatttgtttcatgtattgtgtgccagtattttaggtgtactcagaaggggcaatagtgaaacataagtctactccatcttcccttaaagtggaagtcactgttagctcttttttataggatgattcatataaccataacttgtaagttttaatggtaccatatgcatccctgttgactatctggaaaccacacaagaaagcatttgtcagtgttcagaatctctctaccttgcatatagaaatttattttgttagtcccccatggtgattgtgctcagggagactgattcaagctaataatactctttttgagacaggggcttgctctgtcatccaggctggagcgcagtggtgtgaacatggctcactgcagcctcaaactcctgggctcaggcaatctacccacctcagcttcccgagtagctgggactacaggcatgcaccaccacactcagctaatttttaaaaatttttagtagagacaaggtgttgccgtgttgctcaggctggtcttgaactcctcagctcaagtaagtgatcttcctgccttggcttcccaaagtgctgggattacagacatgagctacygcacctggccaggctaacaatactcttaagaaaatagtgtatacagtcagacagtcaatttacttaattctcagtgattacaaaacattacttccatgaggatcagatggtgtttggctgggcagtcaactcacagtaagtgatgctgaagcaagaatcagttaaatagcctcacaacagctttcttttggtgcatctgtattgctcactattcctcattgtgtattcattttatggggaatgagttacacgtcagagcagttattggagatgcacacagctcaagattcattcctagaaaatgcaaaggatccaatttaattcagacatttaatggcactgagcttttagagcctagcttatctagctctacaataggcatacttgccaggaggatctgactagacaaattgatatgccaaggctcctccacccatagacaattcttgggtagaccctgctggtttcccctttgatttctacttgcctttgatctttacttacgagtaacctattttttctgcatacttaccagtgtcttttgttaggttatcatcaggcctcattgtcctaggagctgttttgtttttaagggtagttaatctagggtcatagacccccttgcctgtggttgggctctaagaggaagccctgaaatgcacaagccaaccttgtaagagagcataattttctcatcatattctcaaaggagtccatgatcccaaaatcattatgagccactaatgtgtagtgttgctctgctctgttatgcatatatagttcagtctcttataaatcaccttagcttgtcattactgaagtgttattattgctgatttctgtgttttcttactatagttaaagatatgaaaatttggtcttttttgttaatattttttgctttggatttattacttatctagttgttatcaatgtatttcttttttattttaacactagaagtttcagtatttgagggcaagacaatttattgctctttctctttgctgtttcttatatccctctcgtcctaaaatgttacccataatatagaactattgcacgttttcagttctcttttcttcagttatcctgcagtctgatacagaatacatccttgtcattttaatgctgtgtagattttagtttaatgtaatgttttatacttaactaatcattttattctgttaataaataaagtctttaagggcctgtcagtatggaaataggtaaatattactgttaccttttaaaagaattgagtttgttgctaatctgacacgtggaaaagcatcaagctcagatatgtgctgccttcatcaggagcctggaaaaactagaattgccatggagctaagtgtccatcttcagttggaaataatagtgccattggtgcctggcctgcctgcaatttcatgactcctacattgcaccccgtgtgatctgtaggctatacatttcatggtgaacctgagatagcttgcatagcagattttctatacatttggatcttgaacaatgtgggagctagggcaccactccccacccctgtgccatcaaatctgtatataacttttgacttcccaacaacttttttaaaaaatttttatcttaaaaaatttttttttattatcatactttaagttctggggtacatgtgcagaacatgcaggtttgttacataggtatacctgtgccatggtggtttgctgcacccatcaacccatcatctgcattaggtatttctcttaatgctatccctcccctagcccccatcccccaacaggccccagtgtgtgatgttcccctacctgtgtccatgtgttctcattgttcagctcccacttatgagtgagaacatgtggtgtttggttttctgttcttgttagtttgctgagaatgatggttttcagctttatccatgtccctgcaaaggacatggactcatcctttttatggctgcatagtattccatggtgtatatgtgccacattttctttatccagtctatcattgatggggatttgggttggttccacatctttactattgtaaacagtgccacagtaaaacatacgtgtgcatgtgtctttatagtagaataatttataatcctttgggtatatacccagtaatgggattgctgggtcaaatggtatttctggttctagatccttgaggaatcgccacattgttttccacaatggttgaactaatttacactcccatcaacagtgtaaaagcattcctatttctccacgtcctctccagcatctcttgtttcctgactttttaatgattgccattctaactggcgtaagatggtatcttgttgtggttttgatttgcatttctctaattaccagtgatgatgagctttttttcatatatttgttggctgcataaatgtcttcttttgagaagtgtctgttcatgtccttcacccactttttgatggggttgtttttttcttgtaaatttgtttaagttctttgtagattctgggtattagccctttgtcagatgggtagattgcaaaaattttctcccattctgtaggttgcctgttcactctgatgatagtttctttggctgtgcagaagctctttagtttaattagatcccatttgtcaattttggcttttgttgccattgcttttggtgttttagtcatgaagtctttgcccatgcctatgtcctgaatggtgttgcctaggttttcttgtagggtttttatggttttaagtcttagtttaagtctctaatccatcttgagttaatttttgtgtaaggtgtaaggaaggggtccagtttcagttctctgtatatggctagccagttttcccaacaccgcttattaaatagggaatcctttccccattgcttgtttttgtcaggtttgtcaaagatcagatggttctagatgtgtggtgttatttctgaggcctctgttctgctccattggtctgtatttatgttttgataccagtaccatgctgttttggtagtgtagccttgtaatatagtttgaagtcggtagcgtgatgcctccagctttgttctttttgtttaggattgtcttggctatgcggggtcttttttggttccatatgaaatttaargtagttttttccaattctgtgaagaaagtcagtggtagcttgatggggatagcattgaatctataaattaccttgggcagtatggccattttcatgatactgattcttcctatccatgagcatggagtgtttttccatttatttgtgtcctctcttattaccttgagcaaagtttatagttctccttgacgaggtccttcacatcccttgtaagctggattcctaggtattttattctctttgtagcaattgtgaatgggagttcactcatgatttggctctctattattggtgtataggaatgcttgtgatttttgcacattgattttgtatcctgagactttgctgaagttgcttatcagcttaaggagattttgggctgagacgatggggttttctaaatatacaatcatgtcatctgcaaacagagacaatatgacttcctcttttcctaattgaataccctttatttctttctcctgcctgattgccctggccagaacttccaatactatgttgaataggagtggtgagagagggcatctttgtcttgcaccggttgtcaaaggacttcccaacacctttaaacttaactattaatagcttactgttggccagaagcctggccaatcaataaacagttgattaacacatattgtatattgcatgctgtattcttgtaacgctatatactatattcttacaataaagtaaactagagaaaagaaaatgttatttaacatacaagaaatagaaaatatgtattttttatttttttatttaaaatttttttttaagagatgggggtctagctgggttgcccaggcttgtctcaaactcctcggcttaagcaatcctcctccctcaactcctgagtagcagtagctgggactacaggtgcacgccaccaggccaggctctgagaaaatatgttaagttttctatttgttaagtggaaatagattatcacaaacatcttcatcctcatcatcttcacactgagcaggctgaggaggaagaggtgggcctagtcttgctgtctcatggatgccagaggcagaagagataaaggaggtaggaggcaggagaagcaggcacactcagtgtaaattttattgaaaaagaatccacgtattggactcatgcagttcaaatccatgttgttcaagggtgaactgcaatttattactcaaagatgaagaaaacattacgacaaaatgtatcctaagtattttgaatatactgcctacattctaagtgcactgcaaatgtggcataactagttaactttcttcagtgatttaagaaagcctcacaagaggctgcactaactagatgtagagcatctttgctaaaaaaaagaattataactatctaatacttacttagtaaataaagaaaatgaccatattgaaaacactgattgattttaagtattgccacagaagaaagatagtaatttatcatcaataatagttactgctgttcaactgagatgtgatttaatattactaacaaaattgttcttaattttccatacattttttatctttttatgtagttttaggcctaacattatattaataattgtcctatatatttaagcaaagtaaaaacacttgaaaaatagaaaatgcatgtaaatactatttgaatgaggaaagtagtgatgccaatatttctaccttttcataatttaagacatttctaaaattgtatgaaatacacagtttatatgatttaatacatataatgaaccaagaataataattactttttaaaaacatatttgtttcatggccctgccggaggtgtagcaaagttgatgaggtaattttaaaacaattttgcagtttgtctcatgttttttatagataaaatagatacctgcttatgaaataacacaaaaaatctttttttccaagtatttgatttgaagaaaaaactagtgtgagtaaattcagcattgttgattgtaagtgaatctttttttttctttagcgcaaactcctacttgtgtgagtgggtgaatcttttaaaggcaatttcacatatgtctgtgttgctagaggaaacctctcacgcttctgtcagcgcttaaatgccaacaccactgttgtatttcccttagtagaaaaggggagggtgtttggacgtaacattaccataatagttttgaactgtttagaagataatgttcctttaaaattgttgaatataataatgttcaggccaggtacagtggctcacacctacaatcccaacaccttgggaggctgaggagggaggatcacttgagcctgggagttcaagaccagcctgggcaacatggtgaaacgccgtctctacaaaaaatacaaaaattagccagatgtgatcatgtgcacctgtagtcccagctacttgggaggctgatgtgggaggataacctaagcctggggaggtcgaggctgcagtgagccatggtcacaccactgcactccagcctgggtgacagagtgagaccctgtctcaaaaaaataataataatgttcataggttctcaatacaaattagttgaatttaatctaagacaacttccaaatcttgtatggatgcttatcgtatgttaccttgatttgtaggtttatttataaagcactattgatttaaaaaatagtatggtatgtgcttctttaaagtctctcctggctcttttttctttcttattcttagtttattttatggattatcttttcctacttgccttttaaatattggtatcatctaagattctatcctagggtctctgtctgtgctacatactgtatattgtctaggcagctgtctatctgctacttgaacctttattctcaactgtacacctataaacccaattatcttatatctcctggatgacccaggctatccaacagtgtattcaatattaagctcattatgtctttctctctccattttcagttcataccttcccccagaataaaagagtatgtatatttgcatataaatatataacacatacgtatatctctcatatatgtacttctgttttggaaggcccactgctagtaagcagcaggcctggaatttttaattctggttttttgaatgcaaatcctcagctcagagtgtattctatataacatggtgtccatatcttttcaaccaaaatcaaagatgcatgctctgacaatatttgaagtctgcacttgttgctgtaattataccacattgcttttcatcttactttattaagttgtcagcatcataggggacactaataaccacacatacaatgtaaaactgcaattatgataaatatartgagacatgtagtataagatagatgaatgtatattttttaaaagatagccgggcgtaggggctcatgcctgtaatcccagcactttgggaggccgaggcgggtggatcacgaggtcaggagttcaagaccagcctggccaagatggtgaaaccgtgtctctactaaaaatacaaaaattagctgggtgtggtggcgggtgcctgtaatcccagctactcagtaggctgaggcagagaattgcttgaacccaggaggcagaggttgcagtgagccaagttcgaaccactgtactccagcctgggtgacaaagcgagactctgtctccgaaaaaaaaaaaaaaaaagatgatttgacctagtcagagctatcagatgcttccctgggaagcaattgagttgaaatgtaaaggttgggtggggaaatggaagattgttcaagataggtgagatagcttgcacaaagacttgggggttaagagagtacgtgctatatgtgtaactatccccgtgcaaagtatttgcaatcttgctagagatttcacgctcctcatttccttctttcctctccttttcttgcatccttattcatatatatttataaaagaaaaaatatatatttgaatgtatattagaatgtatagatatttgaatatatatatttgaagctgaagtttgcattaaatagagaatactagaaagcaaaatgtaactgcttttgaaaccacatagcagataggtaattttagaggaaccatgaaatttaagtgaaaagcatagccatgtgctaaacatagtttctaatgcaacaccaaaaagaaaaaggatttatggtagtattgtttctacccttctaagtcatattgtttctactcttgttaagtcatattagcatttataatcactttataatcactgtcctgttacagttttttaatttataatttataatcactttataatcactgtcctgctacatttttataaaccagagaataactaaatcgggtaataaatttcaaaaccttttcttaaattataagtaatttctcttttaagtgcatttttatactgtgaagtttagtattccatgcaatctttgtgtttgagaattaattcaggctgtaggaattctattagaatgtaaagtgacttttgaactgcactgaagtactctgtggtctgtgctattctgcatttgttgactctttattcctttttgttcttgatatacatatgtattatccttcataaggaattctgaagctttggtcctcaaaacatttcttcaacagctcttacctagttcttgaataggaagattatgttccaggctgtacarctgttttagaatcaactagatcctcttagaaacccaagcaatttacccatgttttccatatcccttggttctttgcttttgttttttgttttcttttttgtatcttttctaatcatggtccaaagttcagtgttcataacttccttatagtgtccttaaaaacttagttcgtatctgtttttctttccagaaagggctattgcaagacacgaagtccgagaaattgagcagcgacatacaatggatggccctcggcaagatgccactttagatgaggaagaggacatggtgatcatttataacagagttcccaaaacggcaagcacttcatttaccaatatcgcctatgacctgtgtgcaaagaataaataccatgtccttcatatcaacactaccaaaaataatccagtgatgtcattgcaagatcaggtaattaccacttaaggaatgcccaaatattttctaatacttcctcactcaaattttctagctcaaggggataaagtattttaaagggatgtgagtgctgatctcartggatcataagccttttaggggagagggccagctaacttttgtataattttacttgacagtatttgacacatttccttgcatatagtatgtactcaaatatttgtgaagtaaatgaattaatgaatagcttgaatttttgagaaaactgatgttcctgagcatagtatccttttaaaaatataattttggcatgataccctgcaataaaaattattgtctcaacttatgatggagaaatatttgatggatacttgtattcaattttgtgaccagcccctctttactagatagagatagagatagatacagagagagtttatatatacattgcttataaatgtatatatagtttagttgtggcttcttcaacataatcttaccttttaaattctcacgaagttttagataaacagatgaataaataattttgtgaaatggttttaagaaaagtagaggaaattatcttatgaaataaaatttgctcatctctttaatagtagtagcatacatttctcccacacctggaattttgactgcaattataaataaagttctctctataaatatggaagggcatgggaattccaccccatgagaaggaaagataatgtttgcaaatactacttaggatcaaataccaaattggagtaggcttattagaaagatatttgtgatggtcctgtagttacaatgatatttatctgtttgaaagcagtgaacttgttacagaattgactgtcatctcactatttagcataactataatccttacacttaaacaagagaattacattgagacacaagactaaggttggctttcttgctagagagctgtttgtaaaggctagtagtatatggtatgtcatctgcccatgtaatttttggctctttgcagaatcctggagtactctttttcgtagaaccaaaattccacatctgtcggccaaaccaaataactcttctatgaatgagaagaaacatgagttgtttttagctatgtgtgtcataaaaactattcattatgtaatattgtgtatctcaaggacaagtatcctaaatattctgtttttatacagtgtgtagtaggttttaaatctttttgcattactgcttttcaaaatatgctttggtttaaaaggaatatgtattcatgcttagataataatttcagatttattcagtagtactttttagaaaaataatgttaatttgtttgttcagcattacaaagtcctggtaactgcaagatgtctggcaatgacatcaaccattattttcatgaaatataaatctggaggagctcaccacatatgacatttataggcatcatgtagtagtatattttcccagttgcatttggatgagataaagcttctgtttttcttttaataacttgttggttatgtataggaaaaaaaaaacagcaggagagaagcataaatgctatcttaaaagcaattggattgcataatgaccaacacttaaaaaatgtttgtgtggggcagcgcagaagaatagtcttaatcattagctgacatacttcaaaattatcakctggtagtccaaaacctgatcttaattaagagtaacttacttaacaaatgttctttatataccctatctccagttttgtgatctcttgttctatgtagacgcagttcttcaaacaagttatatttactgcttccccttcttttgtgtgacatgttttcatgtttacttcacttttaatctagtaagcttcatctaaatgtaaactaaaaattgcactgtatttcttaaaaataatttttaaatattccctgaaccccatctgatataacacacttttattttaataatatcatattttgttgtctctgtgtactgttctcagctaccttttttttttttttttttttttggagacagggttttgctcttgctgcccaggctggagtgcaatggtgcgatctcggctcattgcaacctctgcctcccacgttcaagcaattctgcctcagcctcccaagtagtgaggrttataggcatgcgccaccacgcccagctaatttttgtatttttagtagagacagagtctcaccgtgttagtcaggctggtcacaaactcctgacctcaggtgatccgcccacctaggcctcccaaagtgctgggattacaggcgcctggcctctcagctgcttaaataagaattaaatgaactattttgctcttttttcttctctaagaaatagtttctaatcaagtacaacttaaaagatgagatctttcttaaatctgttgtctccagcttccgtgtaaagctcagtttactcataaaaatattttgagatatgttacctgaccatcctctttattccctcaccttccaatcttagttcagtctgcttgatatctgcctttagccccagctttcctagacattttttgtacatactatattaggtattgttctaaactgtttacctgcttaattatttgtctcaaaaattttagaggcaaagcccaaatatttttagtctggtataaaaccactcaatgtataatagttatatatattctgctatccttagaaatagttgtcaactctgcttttgagtttttcatttatttgttgtgtatgtaatatacacaaaggttgtactacattctttggggaaataacaaagaaatagaaagcatggccacatccttgaaggagcttatttaaaatttacttgggaacataaaacataaacacaggggctatgaaaacagttaaaataaaacatcaatttgtggtgatctcactgaaatatttaaccaaaagtgttccctaccaaaatgtttgatttggacctaatcccgagaaaacaaattaatgtagaatattctacagaacaactgacttctaaagtgtcagtatcataacaaccaaaaaagttggagggaggcttctctagactagagagacatggaaaccaaatgtaatgtatggtctgtgatcagatccttgatcaaaaatgatatctttgttcatagacatagtacatgctgaggtaattaggggttaaatatgaatgacaactatttgctttcaaataggtcagaaaaaattgagtatgtatgtgcatacatagagaaaaaagataaaagtgacaaaatgttaataattagtgaatctaggtgaagagtatagagatgttcactgtcctattttttcatcttttctgtagtttagaaatttttttaaataaaaaagttgaaaagttaaaagaaggatattaaaagataaacatttgagaatataaggtatgagaaactaagcaattagaataaggtgtggactcagtcattaaagatacatttttgcratgggctttacttagttaatagagaggaattggcaagagataggtaatcaatcaactcttctagttgaaaaatggagtttgctttgctgtcatgtgtttagccataccatatatgtgattagccacatcttttatgatttttcaaaaaaagaattcttttttgctctcatatgtttaggtctatgattatatataaccccttttgttaaaacattggaaatacctagaatttgtattctctgaagaacaacatgaatttttttctttttgaaattcactctcaagccaactttaggttatctgcgttagagcccacagttcaccaggagttgcagatacttttcagagcagcactttagatgaattttctccacctataatgtgtatgctaatcactggttaaaatgcagattcagattcagaaggaccaagatggagcccagttttcaatttttaaacaactcccactggatgccaaaattaatgccgctggtctttaaactgcagtttgagtaacaaagatacagatgatgattctcagtagggatatgggaagatgaatactttagtcttcccaggatggtagggtacttatctttaaattgttattcctacctcccctacaaaatccacatttcttacatagaccaagaggccctttttaatctagcccttgtgtgcaccaacttcttacccactagccacactggccttgtgtttcattgaatacgccaagcctttcccattttaaggcctccgcacttatcctttcctcttagaatgcacttctcctggcttcttccagagttggcttcatgttatccatttaaggtttaatgacatcctcttagaaaaaccatgcctggccatcctacatattaattacctcttctaagttactgtgtactgtatcactcttgttgtgtcttctctggtactaatcagcttactaacttatcttatatattggtttgtttactgcctgtcttttcctctattataagatctttaaggataggaaccttgtctgtcttgttcactactatatcccttatgtttagaatagtgcctgagacatagtagaaactatacattttttgttaaataaatgatgaatgaatgaacaaatggaccaacatagattttgatagcggtagatgataataattactggcagagtgagcacctctgattgacagcagtatgatctattcttatctctcaggtggattgggaaccagccccctgccctacactcctaaaacaggttgaacagcacagctctgaacttcagtgaagatatgttcaattactgcaaacttttcttatatttttatccaaccactactttgttttcctgtgagtgtagaaaactttctccctggcttagtctcataaaagtacccacagccatacaagaaatgtttaagtaaatgcatgagtgggagtttggtagatagtaattactcaagttaatagtagcattcattcaacagatagtaattacagagttggaatttggccagaatgttcaggatgacattcctgctcttttagatagtgaaaacaaatgcttttgttatcacagataatcataatattgaggttgatctattaagaatataggtcaagacactactgttagtgagaagggtgcttcttagctttttcctgtaacatcagtttaggtctgattcaactaacaaaaaaccccaacaccattacctatattgtttgtgtttttccttaaggtctcttcttattacttgctagcctgacttgagtcatcaaatccaacaaaaatcacggtttacactctgcttcaggctagctgcgtttcatgtactatatctgactactacatctgaaacattcttcttggtagcatatttcagtcagagtatgaaaattttctatgactaaagtcactgtagtggccttatttcttctccccaagccagagttttcagtgtcttcagtctccttaacttcaattgatactattaagttttgctccttttttggcctatcactttacctttcatttgtgccaagtatagtcagtaagaatccataaagtgaactgagtagaagtttgcttacctaatctcagtgtcctcttcttactcctctgtattttcaaaccttgtctcaaggtcttaggcagcatgcccaagagaaataccagaagaaaacaaactgaaagacaaagcaagtggtgcagggaggtgagaaggcagatcatgatagagcagaactgggactagactgatgagagagaaaagatgaaggtgaaagagtagagaccaggaaagttctggagaactaaggataaatattaaactgtaaaaggagaagtggccgaattaatactttaaaaataaaacttttaaaagtactgtttttcaaagggagttactcatattatttccttggagaacagttttgaagaggagataaagataatatggaatttcagcagtatgtaaatgatactttttttttttttgagacacagccttgctcggtcgcccaggctggaccaggctggagtgcagtggtgcgatctaggctcactgcaacctccacctcccgggtccaagcgattctcctgtctcagcctcccgtgtagctaggattacaggcatgagccaccacgcctggctaattttttgtattttagtagggacggggttttaccatgttgccttggctggtctcaaacccctgagctcaggaagtccacccgcctcggctttccaaagtgctaggattataggcgtgagccactgcacctggccaacactttcaaatgctcagactgttttctagattagtgtgaaccatgttagccatactgacatcatttatttgcttcacacttttttcttcgtcataaagagaaggtaaacctcagttcagcatcttttgattcattgtaaattttaaatcggccacagctatgttaatgaaactttaacatattgccttagttaaatgctgatgagatgaaagaaaaatacgtatgccagatatattacatgtctagcctttagtatgcttttagtttgagcttagaaagagattctgtgtgttttgaggactttaacaatagtagaggccaggcacagtggctcaggcctgtgagcactttgggattctgggaggctgaggtgggaggatcacttgagcccaggagtttaagaacagccctggtaacaactctacaaaaaaaaaaaaaaattttttttttctttaaatcttggcttggcatggtggtgtactcctgcagtgctggctacttgggaggctgaggtgggaggaccacttgagcccaggagttagaggttacagtgagttatgatcatgccactgtgctgtccggcakgagtgacagaatgagattctgtctcaagaaagaaaaaacaaatagattctagagaattttaaagcaataataatcacctgaatttacctcagatagcatggatttaggaagtaaaattcaaaatcctacatagatatttagatgtagtctcttggtttcaaccaggagtactcagcaatcccagtggttacccaagataataaaaagacaagggaacaaacgtcaagggttattgttaaaatggttgtccggtaaagagagtagtgatcagggtgaatgggaagttgatatgacaataaagttgatgaatgaattcataaggaaataaacaattgagagagttatatcaacagagctttgagatgttggagagatggagtagttttgaacgactggatctgagggattgccttagtagtggatagaagttgagattttcagtgtccaatttgttaaagcagaatcatgatatgggggaggaagacagagcaatatggccaaatagaagccttcagcaattgtcccccagcaggaacatcaaattgaaaaactatccacacaaaaaagcacccccataagaaccaaaaatcaggtgagcaatcatagtacctagttttaacatattaaggaaagaggcactgaagaggataggaaacacagtcttatatctcctataccacccctcctccattccccctggtagctgccacatggcgcagaaagagaatctgcaccctgggtagggggagagcacagtgattgcgggactttgcgtttgaatatggtgctgccctgtcacatcagaaagtaacaaggggcagagctcagctggtgcccacagaaggaacgtttagacagctctagccagaggttaatcttccatctcagcagttggtatttcagttccagcagcccctgccaccatgggctaaagtgcttgggggtcctaaataatgataaaggagtcaattcagcaagagaatataaaatttttaaacatacgtctgtccaacactggagcatccagatatataaagcaaatattactagagctaaagagatagatagaccccaatacaataatagctagagacttgaagacccttctttcagcactggacagaacacccagacagaaaaaccacaaagaaatatcatacttaatctgcagcttacaccaaatggacctaatagatatttacagaacatttcatgcagtgactgcagaatacacattcttctcctcagcatatgggtcattgtcaaggatagaccatatgttaagtcacaaaacaagtctttaaaagttcaaaaaaaaattgaaattatatcaaatatcttctctgatcacagtggaataaaactagaaaccaatagcaagacacatggaaattaaacaacgtgctcctgagtgaccagtgggtcaataaattaagaaggaaatttaacaatttcttgaaagaaatgaaaatggaaatacagccttccaaaatgtatgggatacagcaaaatctgtgctaacaggaaagtttattgcaatcagtgcctatatcaaaaaagtagacaaacttcaaataaacaacctagtgttgcatcttaaagagctagaaaagcaagagcaaaccaaatccaaaatgaatagaagaaataatgatgatcagaacagaaataaatgaaattgaaacaaaaaaatacaaaaagatgagtaatctcagcattttgggaggccgaggcgggcagatcacgaggtcaagagatcgagaccgtcctggccaacatggtgaaaccccgtctctacttaaaaatacaaaaattatctgggtgctctagtcccagctactcaggaggctgaggcaggagaatcacttgaacctggaaggcggaggttgcagtgagctgagatcgtgtcactacattccagcctggcgacagcaagactccgtctcaaaaaaaaaaaaaagaaaaaaaagaaaaaaaaagaaggtttttttgaagagataaacaaaatcaagaaacttttagcccaggataaaaagggagaccttacaactaataccacagaaattcaaaggatcattagaggctactatgagcaactatatgccaataaattggaaaacccagaagaaatgagaagycttgcagtagtgtagacattatccagcttcctgggcttttttcactttgtgttgaagggtacacattggatgagatatcattcatcctcaggagagggtttagtttaatattgaccatccttaggaagctttgttggaggaaaaagaatacttgaatttgtacctgactcttacttctgcccacgtctttcactacagtatactccaagcttgtactatatgatcttccctgctgtttagtttatataacactgttttttcagacctcaatgtagcatctttcatttccctcctacatcaccatgtccacattaaatctcagcttctggaaaacagaggtgagttgctaaatatatcttaagctcactttagccaccatcttcaatgccttattctctttgccttcttttttcctctcatttttggctgaaatactagaactgattttcatagaaccaaaggtttataggaaataatctaccattaagtggcagttataaagacttttcatattcagcatgtaaagtatgttaaagatgcaggctctggattatttaattttatattttgtttctgtttcatttgcaatttggtattttcattctgtttgatgccttagttgaagaattggaaagaacatgaaaacctcaaatcacatttatttggctctttcagtttcagtggggaaaaaaattgaaaatatctgctaaaatgacattgtatactttctaatgcaaactaatttttatctgcaattcatttttcagattttaatttaaggatgtatatgtgtattgagaggccaagtaaggcatataaccatttccattctaaaagcttcataatttctcttagtatgtgagttattaatgcttcccctaaagataaattatcccagaactcttccatttttstctagttcacattctctgacatatagctatatctgcactgtttcccctccctcacctaccaataggcctttaacaggaggcagctatcatcattcattgatattattgagtgtagtgtagtatgaagtgttccagaatatctccatgtgactacccctattctatgatgtaagtgaaagattgataagttgtcagaattatgcaattgacagttctgtgtttgagaggctgaagtcatagcttgcagatggtttcggtgcggtacaggttggtggacctcactgcccccactttctgcactctatctaggttctaaaagagattcttaaccacttgctatttatcatgcagagatttgcttatcaaaaatgtataccattttccattgagaaattgtatatcactgctttgcagctagtgatacttaggtttatcaaattctatattaaccagttttagacatattaaaatatacttatataatttttcatattaatttttgtgtacgttaattccaataagttaaatatttagaaattttaaatattttgacctgtattacatctctaattttattaatctttttatcaacaagcttgtgatatctgctcttaactcttaaatatcttctgataaccatcacctttttaaaaatcattttggttttaaatattactttttatttgttgagtcattaataaaaataaacttttatgaacagcaagcctctgagaagaaaacatttgatatgctggaatgttcctgtattgcctgctttagcatgtgtgttggcagggtgtagatacatacacccccacaacgaccctcctcccaccctatgtaaatgtactcactctacagcattgtaaaggatttcattgtgccattttgttttcagaatcatctttcactcttttgtgagtataatgatagtagctgtctctatgatgaattttaatagttacagattacagtatactttccttagtccaaacctgtgtttcaagctctgtaaaagtggttttaggtttttaaattcctatcttggaaatattttgctatcatcaaatttcattttctttaaattgtatataatgartgtgttctccytttttaggtgcgctttgtaaagaatataacttcctggaaagagatgaaaccaggattttatcatggacacgtttcttacttggattttgcaaagtaagttacactgaaatgacacgctaaagaatgctttgtactctagtaacctaaaaaggaataaattcattaaattgttatgattttctaataaaagaatgtactgtcttgcctttgccagttttagatctgtaatttaaatataccttcttagtgttttactgccctctagtgttcataaattggcaattcttatattaattacatattagttattactctttaaagtttattattattgtgtgtatatgccttgtacaaccagaatgacactacttcaggagagctcaagttataacctagaggccagattatgacttaccacatcattgagaaagcaaaaaagctctcactaagttattggtgctccagtgtgtctgcttctcacccaagacatactgaagtgtacactttcccttgggctaccttattttagctttaaaattatgatgtattacgaggcttttttaaaaaaaattcatgatttcctctctcaccccccctctccttctccctctctccctctctccttctctcttgctctctctccctccctgtcactcactcactcactcactcactcactcactcctggactcaggtgatcctcctgcctcagcctcccaaagtgctgggattataggcatgagccactgtgcccggcctctgtcatattaatagttctctcaagaagggttcagaaaactatatgcctactcacagtattcaagtactatgtggctttctgtacagtctgtgccacattattaatcagaaaattaattaaacttaatattccaaacataacagtcttatggatacatttgaacttttttggtagtacacatagtaccattgtagtaaacctcaaatccaaatgttttccctaagattctgcattaacttcaaaaacactaaaaamattttttttattatttagcttagacatgtttattcagtttttaaattagctattatgatttcagagtaacacaccttgatatattggtcaactttaaaaggcattttttataaaatttaaaataaaagtgatatcccactctcagttttacttaattttgaaaagaaaaagtagaatgaagtattactgattcaaactgataatcttaactttttgggaaatcatgtaattaaaaaagaatcacccaaatattacatacataaagtgatatgttcctatttctagttcctctcatagtactcaagatctttcaatcaaattgtagctctaaagttagatgtatgtttttctataaataattcatactgcaatattgaaaatattttataggcagctttaaaataaactaattatttttttctttgcataggcattgaaccaatttcataagcttcgttcatgtgcatattttccctcagggctgcattatccttgaattgaatgtttgttaccctttcacctaaatgatttattctttccacacacagcttggtttctaatagtctaggttttcattattaaaattataaattgagtgcttttgcttttggcaaagtcttatacttagaacaaagctctgatatatgctgaggttcttgtagttgaaaaaataaggctttttgaagagattaatctcatttattaaatgctgacatgaatttttaagcgtttgaatattttcatagtgagtcttatgttatttgaagggaaaagtattgtgaaaatttttcatagatttttccaagattttaaatacctaaacaaaatcagcctaggtgaaatgtattttgatgtatctatgtartcaagaactgttgtagatgtaactagtatcctcaaatatcttttagcttaatagccatatgctccataaatggggaaggaaaaggaaagaaacatcgccttaccaattttttagattacagtcgttcctggggtatgtccagggtattggttctcggactgcctgagtatataaaaatcgcatactcaagtccctccgttggccctgtgaaacccacgaatttgaaagtcaccccttgtacacgggtttcacatctctcaagtactgtatctgtgtgtggttgaaaaaaatctatgtatgcatgggcctgcacagttcagactcgtgttgttcaagggtcaattgtgctttactcttcaaaacaatattcttgactggcatagtactttgtggagtccagtaaaatacttgctttcaggagaaagtggtgaatttggcaaaatacttatttaacacatagtttttttaaacttaccttatcagagacattaaaaygaatgtaagccccaagaaacctaggaaataagatagagaaataaaaaatgaacgctcctttctagtttagcccgaccacgaagaaatacacattatatttgcaagcttgtctactcaagccatgttttgattacatacatttgttttttactgaactttagaataataacaaaaatatsttttttacatttttgcattcctatcccatcttgctcctttttgtctgaatcttattctttgatttttttaaagtatatttcctagttcttcttcctttccatttttccctttaatgttaggttatgttttgttttctttttaattggtgaatgatacaattttaagataatgtagatataaattattattataaatttgaaaattttccagtttaaaattgtatataggttggacattttcaaaatgtcatagtatgcaggaaatataaagttgagtaagttgcagttcttgaccttaatgagttcactgaaatctttttttctgtaattaccagttcatgaagttttattataaacagtaaaaatattaaatattcctccccttttaaatgtgcactatttattttttaatagcatctattagcccattttgattttcttcaaactttagaaaattaaaatgttagaagtctctttcaaaaacacttcttcagcaataaacattttcatttataatgaataatagctaaaagaacacttttaatgctgtactttctgtcagactctgctaagttttttatgatctagctacctcagtgtcacatgtcagcatctgtcttgagaggtatttgaaaattatttttgatataacagttttattcaggcacgtatcaggtatgtacctttgtagttgtccctagaaatgagaatgagttttcattgctgccattttggttcctccatattgccgctagtatcattttcagaacaagtgaggtgaatcagtaaagaagcagctatgtcacgacaagaaacaactaaatgcttcattaggtctgaaattctaaacagtaatcaagtgacaacattttaggcctaaatagaattagttaatatatagagtcatgtgagattgtcctttctacctaatacttctctgctaaaccagttgacgtttgccccattttctacaacttttaacaaatatgtcacaacattgtagatactttagaaaattattttaatcattccagacaatatgtgggagttgcgtttttattaaccttgtactactagctctttctacagcattgatcctgtagactgctaagaagcaatctctgaagtctgtctctaaagtcagacagatctgccattaaatccacttagactccttgctagctgtgtgatctcacccacattgtttcagatctttgagcttcagtgtcctgtttttaatttgagaataattaaagtaattacttcatggggtggtggtgaggattaaatgtgataatgtagatggagcacttagttctgtgcctcacgcagagcagtatggtgattctttttaaaattctgtcttctttcagttaccatattgtcttaactggtgttttcttcttctccttgtctgaatctctgctggtccttatttccaactcttaattgggcattgtataagactcttagcctccattattctctyttggaaggtttacacatttttgtctgtcatgacacccaaacaagaaactttcaagtaatcttggacaacttttttttatcaccacctatatcttatcagtcatcaagtcttttgagtgtcttctttcatttaacatgatgcttttgacattcatctaatttgatgcacatatcagtagttagttccttgctaagtagtacttcatgtatgggtgtacttcgattgatccattcaccagtttctggatattgaggttgtttatggcttttggtgattatgaataaagctgtcaaaacatttgcatacaggttttgtgcggacttatgtcttaacttctcttggataaaaacctcaaagtgggatggctggattgtatggtaactcaataagaaactgccaaactgttttcccaagtgattgtatcattttgccaccaaaccaacagtgttttaagagttccagctgttgtgtatcctcactagcatttgaaattgttagacttgctctttattacaaaatgtgagccattctaataggtgcacagttgatgaatgccccttttaagacataaattactttaaaaatatttatttacactatcatcagtgagaccaacaaataccaacaggtcattcacttttttggrtacaggacagtgggaccttgccactaggattagaaagtttctatgaagctttaggkctgagagagtccagaataactatgtacaatgtctccagcaagattgttgcctaagtagagaagttaaatttagtatgaagcagaaagatttcaaaacataatgattcccaaaggccattcagccctctttcaggttcatcacctccttttttgactttttccagccagttgacaaggttccttacaaatgttctgagtgtgcagttgatcttttaaccattattgttgttcatttgcatattgatactgttcacttgataggctattgatagaatgtaattgtaaaaaaatgagcctagtttatgttcttgctttgtcacacttcgtatgctgacatggcaagaatgaaattcctaaaatatctttttaccaacctgctgctcagattatatcttttcgtttctgattttcatctgcagattcctaccaaatatgctcttcttttcccaggaagatcgtgttctaacaggtcaacagtagtttattttctgctagtagaaatgggtttttattcttctacctgagctttgttgagaaatagctgaaatgattraccagagttaaaggtgaggtctgaccacagacttcctatataaactagctcctatagaaactagctggttggcaaaagagtaaaaccagcaaacctcgttagctcttgttttctaactggctgagctgtgtggtccagttgctatttttaatcatgcccattatctgttataatcccttgcctccagcccttygtgtctatataactgttccctaagttacatatcatagttcatatccattttcaaaatgagttcacagattatatctcattaaaatcatacttcctaataaatgccacccaaagccattccacacatagatagtcattttcctggacagcaaaaagagttttgtaaaatgccatattcccttttactgctgcctggtaattgctgtctgctccacatgtcagggactaggggaaaggaggaaacattggtaggagatgttcttctgcgaggagattattctcaaaggaatggctcaggatggagcagtggctaataatggagaggatagagaggattcccaggaatctcagtcttaagaatggaatcactaacccattgtcctgtaatctctccttgtagtttcctattaaaaacctctcagctctgtgagctaagggagcagcaatatattgctgttgcctccttactttcttactactcagtgtactctctggcaggaaggcttttgttagtggctaattcacaacggtctcctcaacctaattctattaatattcagcacctgtgtgttgggcacagtgctgagcattagtgataaagccatgaacaagagagaaatggtccctgccccggtggaacttctactctaataccgaatgtgacagtgctatgtatttgcaacagtactgtccttcttttaaaaaaaactgtgaaagaaaattttactgcactattggtactatgcctaccctcaggtgacttataatgctgttggggagaaagacttacaggagaaacactagtaggataagctaagagttaagttgcttgatagctcttaggtgcaggatgtgtcaaatgaaagcacatagaactgtatgctagagtcatcaggaagagaggtcacaagattttgttgtagcccctctgtttattccaaaacagcagccaatgaccttttaatatgagttgtgtcatggtaattctctktttaaatctttcagtggcctccctcctgactctgtataaagtaatgcttgtaacagtatagaagacccacacagtctgcactcactccacctcacccccacctctcttatcttccatggtattccctttttgattctacaggcagcttgatctccttgctgttcctcaaaacacctggcacttagctgcctcaaggacctcttagttggaaatcccatctttccagaacactttctcacagatgtttgcatggtaccttcctcattacataagactagtgatgtcttcccaaaaaacacaattttgaattgtattctccctcacctccctagcactccttattccctttcactgaattatttttctcctttgcactttttaccatctgttatatatgcttatttgtttattgcctatctgtcccaagtagaatgttagctctagaaggacaagaaatttagtctttttgttcattgctgtattcctagtacctagaatagtattatatctggcaatattgggttcatacaaaaagtatttttgaaggaattaatgtagaaaaaagaaaaatgagagcggcactcaaggaagacagaataagcaaagatatataaagagaaatagaataagtattgatatgggaggagataaaagaggccaacctaactataacagataaatggtttcttgtttgaggagagttaaagaaaaagttagatcaataaggtggtacctaagacataaggtaaaagaatcctaagacaaccagcaaaggagtttgggtttcatatcgataaatcagtagagttatttcagattcctaagaagagtgatttaacaaatgatgtttaggaacatcctttgagaattggtatggaagatagattgaaagggagagaaactgaatgttagaaaactatattcttgcagtaatctaagcaagcactgagaaaaagggaagtggtaaagagaaagaatgatgaagacaggtcacatctgcgagaaagcttacaaaacaatcaaaatgactttgaaattttattaaatgaagaataatggaaaagtaagaatcaagatagctgtaacattttaagactgggacaagggtgtataataaaacagggagccagttgtacagttctagggtttgcaagggttgctaaagtaaaattcttcagtgttccatcaactctttatcattccctaaggaaataatgctgaaaacctagtgtctttcacctctatcttgtctttaaaatcagcaacagaaggtagattgacatgttcacacttgtgttcactaatgctgtatccattgatggtgttcaaaaaacactatcaaatctggctagtgtgatgagccagaagtgagaaatcattgctacatagttaatgcagatttgaaactttctgtagcagcagatgatttattcaggaatgtaataaagcaatttttaaaataagtttgcttaaaaattataaatattaaattctttcctagtaatatgtgggtactaatttgagaggggattttctacttggacttaaagtataatgaaggcatagaaataaaatgttttatataattcttgctggtaaagtttaaaattatttttcattcatttttatctcctttatcttcagacatartttttaaattcatatttcttgtttactttattctgacatgaataatcatgaaatagttcccaatcgccacatacacaaattatttaaattaattcatgttcttttttccttataggaccagtacttcagacttaaacatgtaatttcagggcactcctaaacagattgaaaatgttgatttcacctttgaaattttgttgtatttcagatttggtgtgaagaagaaaccaatttacattaatgtcataagggatcctattgagaggctagtttcttattattactttctgagatttggagatgattatagaccagggttacggagacgaaaacaaggagacaaaaaggtaatattttagttttaagatttttataaagataattgtttatgaactgcagtgagcaatgtgcttttaaaatttgttgttaattataaatttattacttgcttattgtggaaattttgaagagaacccaaaatataaagaagcaaaatgaagaaaattatwtagctgatatattgtaatatacatttttttgtgatttttaaaaatatttcttttccagggcggaatcgtgttttctttatggttctattaacaattttctgtgcgattattgtaattattcactaatatgatatatttttgtgtattttttggttctctaagtattgatggcagtttatatttgtgatcatcagtttaaggacactattttgctgaagcagctatttttttctggcaagaagagaataatggctcaacaaagttcttaacaggctcaaatttgggttgtcttccatttcactgcattttctagagtatcaccagagttacatttctaagaaatcaaactgatttgtcacttctctggtggaaaacctttactgggacttcatgctcatggattaagacataggagacacaactggacacgatctcagacctagctctcctgtctgattttcctttaggtgtccagtgcttcggccacatgaaatgtcaccatcctctgaacttattgcttaagttattaatgcttcatacttttttacacatgtattattccctatattgagaatgcctttcctttactctggaaaactctttatccacctttaagatctagctcaaacatgaccacttccgtaaagtcttttctgatgcctccaggcagtgagtcatatctctttcagggctcccagagcacttcattcaaagctctcttttaagcatttattttgtgatatttggattaccagtttacctactgtcttttccaaaatgtggtgaatttcctgaagcatatatttaattcatcttcgtttcctcagaatttagcatcatacctaggttacccgtaagtgcttaacaaatggttgaatgtgtgaattctgcacattttaaacctaaactattacacagtagtgatgccagatacttggtatgttaatgataattaacatccaacagtatttttttctaagttagttataccctctgtgtcacatgatgggggcagtggttttttgttttgttttcctttttaatgatttctagaaattgctgtttctttagtctcaaagctttaggcagaagatactgatccaaacacagataactaaccaaatctgttttcttaaataatgctatctctcagcattatttaatcttctagaaatatttattgtggagattctgcgaagttttataaaatctattagtataactcttatgacttactactttagaatttattgatatttatttctaaattcacttgtgcgctttctttttattttttattttagccctacttacactaactcttgactcagtaaatgttagtatctgtctccctcctttgaccaaagtaatattagcgtcggtgttggaaaggaaaagattgcagtcatgtaggcccctatatccatcatttatcattgtcagccctggatagcatggttttgtggttcctagcctgtgtagtttgggggattgggtaataataactaataataattattaacagtaataatagctcacatttactgtgcaccataccaagcagtgttttaagttattttatatgtattttttcaggtagcttgcgcaacaattttatggggtagttgctgttattgtcctcattttacagaaaaggaaactgtggggcacagaaaggctaagtattttgcacggtgtcattcagctagtaaatggtagagctggaatttaaaaccaagcactctaattccagagcccatacatcttacatcctttgaaaagaagagaagaaatgcaacatgtcactcgacatttttctgtgaaacgtgatccaaagttgcatattcaatattcacaaaaaaatccaggcagcattttaacatcatctccctttcatgtttgaaagttttaggtagataggccatcctggagctttatctgttcttcaccctgactataataaggcctggggttttgtttttttattttttaacttcgttataaaatacacattaatatgcctgcttatctagatgtagtgttgataacatcagcaaaatactattgcattgtcttacttcttatgaggacagggctgtctgtaaataattgatttataaaaataagaaattactttgttttgtgctagacagaatgtaccttttcagtcttgaaacatattggtgattagacatttttagtaatttggcttgtttcttatgatacacatgttggtaacctaatgctgataccctaatgagttaagtggtgtttattgcaaataactccttaatatctttaactagcaggagttttcattaaactcatctgtaaagttgataagactgcatacatataacatttctaaagctggacaggttttagaaagatattgggtgttaaagggtggccatgattatgttggaaataccttgtaatggcgcttattctcaaaaatgtgtagatagctttatttctataaaattctagattctttgcacctcaagtgatattttgaggtgtattaaacagtattcagttcagcacttatggcaactattatgttttaaactgacgtactctagtaatctgaactgctccgtggttacacttcaaacacattttagatatatgtgcacctgcacctaggatagctttcacttgatcttgtaaagaatggaaggcttttgatttgggagatttcaaatttgcatattttagaactagagttttatttaatttaacctttgcccagtacctgggaaaatagggatattaagtaatccaaagatgagcattgaataactatatcaatcaaatcagtggttctcaaactttttgatataggaactccttttatactcttaaaaattattaaggattgcccaaagagcttttgttttgttttgttttgttttgggttatatctattgatatttaccaatatcagtaaatttgccatttactgaaaaaattttaaaatattaaaacaatagtaaagccatcatgttaacataaattatattttaatgcacataactatttctcctccgacaaaaaaatgaaaagagtggcatcggtttacatttttgcaaatctttttatcatctggcttactatagacagccggttttctttttttttttttttcattttctgtttttttgttttgttttgttttgaaccctgagaagctagacagctgattttcatatttgctcctgaattcaatttgttcgaaatgttcttttggttgaattgaggaaatccagcttcacacagatatataattagaaaagagaggattttaatagcttttcaaaaaattgcggctattctttaataaacactaaaacttgacaagtggtagtttcaaaagttagttgcaatgtagaatctgaaaccatagcagtgaactttttatactttgctacattaaaatctattgatatgttttacactttgaatgaatcttttaaccaagcataattttgaaacatcatacattggtcatttggaacatactggttcactgagttatgtggacttttcaaatgttaacatattttgttatacagcgttaaaaactcatatacattaatatcaccactaatctcatcagaaaagtctttaagtattgggagactgtcaagcttatggtggcagatacaagttttccaaaattttattttttgcttgaaagcttaatttttatcattggcctatcacaggatttctcaacctcaacattattgttgttttgggccagataattctttgttgtggggggcttcttatacattgtaggatgtttaccagcatctcttacttctacctggtagcatcccccatacctcagctgtgagaacgagaattgccttcaaacattgccaaatatcacctgagggtcagaatagcttccagctgagaacccgtgggatatcaacactgtcagtttttccttcaagtgacrggcataatttattcattttgagaaaatatcaccaaatactcaaattcaaatagctatagtttgggatatggtaggtgcatggatatataaggttttatttcttatttcttcttatgagctacaaaatctggcacaaatgataataaaaccactttttagaaaatggcctaggctggcaaatctaagaccatctagaaaaattcagaaataatatcaaatgcctcatgaaaatattttatttcctctgtcttcacctccactagagctatgcctttaatacccatgtaaatccccaaggtgcagtcttttcagtagtcatttacaaatattaatagtgcaagtggtttatatagcactattctatatgctctggaggacacaaatgctactgcttgatccacaaatgctacttcaggaagttttcactgtagttggaaagacagaacataacacataacacatttaaaaagcatatgaaacaagttatgtagataaagatatagacagacagatcaacctatcctaagattctaaaccagatcctaagagctgcctgttacaaggcagtatgtgattttgttttgttttgttttgtttttgttttttttgagacggagtcttgctctgtcgccaggctggagtgcagtgtctccatctcggctcactgcagcttccacctcctgggttcaagcgattctcccgcctcagcctcctgagtagctgggactacaggcgcgygctaccacgcccagctaatttttctatttttaggagagatggggtttcaccatgttaactaggacggtctcgatttcttgacctcgcgatctgcccgcctcggcctcccaaagtgctgggattaaaggtgtgagccaccgtgcccaactgtgattaatttacatgactccaaaaaaaataagagtgtctcatcccacctactctggcccatttatttaataatttaccacattagatatttgataggtgagacttggatttatggcttacccgtgctgctttgtctttgttctagacctttgatgaatgtgtagcagaaggtggctcagactgtgctccagagaagctctggcttcaaatcccgttcttctgtggccatagctccgaatgctggtaggggagataaagttggctcagattgattatcatccttattatctctrtaatctgtgtttcatttcacaagggctagatatagggaaatcggtgaaagactagactaaaaataacatgtaattcagtaatatctagttttgcagttacttytaaatgcatttaaaagattcctcatgtagagtgatatcctaatatccttgcattgttttctgagatgccggtttttagtatttcttatttttggtgttatgttttgctgtattccagcagagctcttagagactgggggtgggggtgggkgtcataaatcttattttgtccaaagcttactgttttagctattcatgttaaattaagaaaaggcttagtgggttaaaattcacctggttttactgttaaactgattttgactttaagagaagccaaggttatggctgtggtttagtttgctagtaaatatcaagtggaaaataaagatactttaataaraactgtatttcctcagaatgtgttgagttttcagtttttaaaaataattttacgtatttatttgttctattcaatcattttaataggagaagtaggagaaaaaaggaacatattcaaagtttcttccataaaccataatgagaaatacaaggaatgtcttcattatttgagataatattattagattgctgtggagtttaaggtcctactcattagattacatcaaagcctcataatagtataagaattggaagcctataaagaatgccttctcaatttttaaccatttctttagaacagggattggcaaactacaggttgtatcctgcagacccagtttggcctttcacctgttttattttttatttttttgagacagaatctcactctatcacacaagctggagtgcaggggcacaatcttggctcactgcaacctccgcctcctgggttcacaattcttctgtctcagcctcccgaatagctgggactacaggtgcctgcactaccctggctaatttttgtatttttagtagagatggggtttcaccatgttggccaggctggtctcgaactcctgacctcaagggatccacctgcctcggcctcccaaagtgctgggattacaggcatgagccaccgtgcccwgctgtgtcacctgttttataaataaagttttattgaaacacagccacatacatttttttacttattgcttgtggctgttttcacactgcagcagcagagttgagtaattgtaacctaaaccatgtgtattagctgttcttgcattactgtaaagtactacctgagactgggtaatttataaagaaaagaggtttaattggctcactgttctgcaggatgtacaagcatggcaccaacaagggcctcaggaagcttacactcgtggcagaaggtgacgcaggaacaggcatatcacatggtgggagcaagaaagtgggcagtaggggtgggggtatggttcccagactttcaaacaaccagatcttacgtgaactgagcgagagctcagttatcaccaaggggatggcactaaaccattcatgacagatctgctcccatgagccaatcacctcccaccaggccctacctccagcattgggaatcacatttcaacatgagatttggagggaacaaacatccaaaccatattattctgcccctggctcaccaaatctcatgtctttcttatatttcaaaatatattcatcccttcacagtagtcccaaagtcttattccagcattaactcaaaagtcccaagtccaaaatctcatctggagatgagttccttctacctatgagcctgtgagataaaaaacaagttatttattcccagtaacaatggtggtataggcattggataaacatttcccttccaaaagggagaaattggccaaaagaaaggcgcagtaggccccacacaagtctaaaacccagcagggcagtcattaaatcttaaagctccaacataatccttgacttcatctcctgcatcctggtgcaaggggtgggctcccaaggccttgagcagccctgccccyatggctttgcagggtacagcccacatggctgctctcatgggttggaattgagtgtacctgtagtttttccaggcaaagcgtgcaagccgatggtgagccaaccattctggggtctggagggcataatcaccttcccacagctccactaggcagttccctgtttgagtctttgtgtggggtgagggctgcagtgcaacccagttctgaaatctaggtggaatctgcaatctaggtggaatgcaagctccttcatgcttgcattctgagcatctgcagacttaacaccacctggaaaccaccaatgtttacagtttatgctcccccagagtggtggcccaagctatacctggactcctttgagctgaggctggaactggagtggccgggatgtggggagcaatgtcccaaggcttctcagggcagcaggaccctgggcctgcccccttaaatcattcttccccccaaggcttctgggcctgtgatgggaggggcagcctggaagatctctgaaatgcctttgaggcctttttcccattgtcttggatattagcagttggctcccttttagtcatgctaacctccttaataagtgattgctccacagtgttattaaattccttccctattccctgccctattccctggaaaataggctttccagtgggagtggttgctcatgcctgtaattccagcactttggaagaccaaagtgggaggatcacttgagcccagaaatttgagactagcctgggcaacctcatctctacaaaacataaagttagccaggtgtggtggcatatgcccatagtcccagctacttgggaggctaaggtaggaagaacacatgagtccaggaggttaaggctgcagtgagccaagatccagcctgggtaacagagcaagaccctgtctttaaaacaaaaaacaacaaaaagagggggctttccttctctaccacatggccaggctgtgaattttccaaatgtttatgctctgcctccctttaaaatgtaagttccaactttaagtcattcctgtgctcttgcatttgattgtagcctcttagacacagccaggccacatcttaaatgctttgctgcttagaaatttattctgccagatgtcctaagtcatcacttttgtgtgtgtgtgtgtgttttttgtttttttttttttttttttttttttttttgaggcagtctcactctgtcagccaggctggagtgcagtggcacgatctcggttcactgcaacctccgcctcccgggctcaggcaattctcctgcctcagcctcctgagtagctgggattacaggcgtgtgccaccatgcccagctaatttttgtatttttagtaaagatggggtttcgctatgttggccaggctggtctcgaactccagacctcaggtaatccgcctgtctcggcctcccaaagtgctgggattacaggtgtgagccaccgcacccgaccagtcatcactctaagttcaaacttccatagatctctagaacttggacaccacatagccaagttctttgctaaggcataacacaggtgacctttactccagttctcagtaacttcttcatttccctctgagacctcatcagcctggacttctgtccatatttctgtcagcatttttatcacaatcattaaaccagtctcgacttaagaaatttcaaagtttccctcttcttcctgtcttcttctgagcccttcaaattcttccaaccgctgcccattacccagttccaaagccactttcccattttcaggtatctttatagcaacacccaactccttagtaccaattttctctattaggccattcttacattactgtgaaggaatacctgagatggtaatttataatgaaaaaaggtttacttggctcatggttctgcaggctgtgcaagcatggcaccaacatctgtttggcttatgatgcaggcctcaggaagcttacaatcatggcagaaagtgaagtgsgagcaggcacatcatatggcaagagtgggagaaagagagtgaagggggaggacccagtcgtttattattattattattattatttttgagacaaagttttgctcttgtcrcccaggctggagwgcaatggtgtgatctcggctcaccgcaaacctccacctcccaggttcaagcaattctcctgcctcagcctcctgagtagctgggaatataggcatgcaccaccatgcccagctgattttgtatttttagtagagatggggtttctccatgttggtcgggctggtcttgaactcccaacctgaggtgacccgcccaccttggcctcccaaagtgctgggattacaggtgtgagccaccgcaccaggcccccagtcttttaaataactagatctctaatgaactaactgagccaagaactcagtcatcaccaaggggatggtgctaaaccattcacaagggacctgctcccatgatccagttacctcccaccaagcccagcctccaacactgggaatcacatttcagaatgagagttagagggaacaaatatccaaaccatatcactatgtagtctgcaaaacctaaaatatttatcctctggccttttatataaaaagtttgccaatccctgccttagaacaataaagacttgctctattgggcatttttgagaagttaattgtatttctttagtatgtttcatagattcacagaactgggagggttcttagaaaccaattaatcactgttcccctccccctctttgttttttttaatagtttgagaaaacaaaattgagaaaggtgaagccaccagctcaagatcatactgctacttaaatgcagagctagaatttggattaaggaatatttgtgctaaaaagaacccaaaagtatagtttattttggatcaaatctctgttaatagcattagctgacaatgtaaattaaaataaaaataaaagattcttagcagagccattatctattttctgttcctcagaaatttcagaaaacacttagctcacaaaaacccgaaactcacacaataagcagtaaacacaaattgtttacactttgctagagagctcttaacagaatttagagtagtttaaaaaagttaaaacacacactaaatcatatgggaggggtgtatgtttcttatatccatatacatttttaaagtgcccttaaactaaattgctcatgttaagagtcctctggtaaactctgaattagcactcatagttgagcagaaactggagatggaagcaaatgaaattggaaacaggtgtgcctcccacaggatggtaataaagaggcattgaggctttggatatacatgtgtttatctattttctctgtaatatatggtgtcaaaggcaccagaaacactcagcagatttcacaaccaggttttaattccttttctttggtttcaggaatgtgggaagcagrtgggctatggatcaagccaagtataacctaattaatgaatattttctggtgggagttactgaagaacttgaagattttatcatgttattggaggcagcattgccccggtttttcaggggtgctactgaactctatcgcacaggtatataaaggaagggtttctttttaaagctttctttggtttggttttttggtttgcaacttgtaaatatgtgatttgaagtttcttcagtgaaacacaacagatagctccagaaaggcaggtatcttgtcggtttctgctcactattttcaaytgagtaactgtgaattaggtgaaaattagaaggcactgtagaaatagtggaatgatacaaagtacagaaccagccatagaaatgtatggtattcaataatgccagatatcaaacattaggcctgtgtataagtcctgcctactaccattttgaagtagaggtgtgataggggaactgaagtatgcctaagccatgttttagcagcctcagccgtattatcatgtgtctgaaagtgataagctaattgtgtttttgttttgtttcgttttttgctattgcttgataagatgcagtcataggaactcttctccttgaggatgcatatgccctagcttctaacacataattttagagaatacagattatgagaaaatagaatacagtttgacaataggtattttatcaaaaataaactagtctcagagcaccaagcacttgagaatatagtgtgtgaggtgacagcctacactttactgtgtgccaatccttacattgactatttgacatttcattaagtctttactaggttaaggattaacattctaaaggactgaatcatggctctagtttgatcaaggctccgtttttacctgaattatataagacaattatgttacctgttcttaatgtgtcatattaaccacctcttcaaataaagaggcattgatcttttgtgtgttctccaagaattatttacctttcctttttttccccctttgtaagtaggaaagaaatctcatcttaggaaaaccacagagaagaaactccccactaaacaaaccattgcaaaactacagcaatctgatatttggamaatggagaatgagttctatgaatttgcactagagcagttccaattcatcagagcccatgccgttcgagaaaaagatggagacctctacatcctcgcacaaaactttttctatgaaaagatttaccctaagtcgaactgagtataaggtgtgactattrgattcttgaactaawatttgaccctgtcttcacctttgttctcagctccacagtctggattgctgacagtaggtgtatatgacaatttgtattgagccaaattaggaaacagacagtaacgtcaaggaagtagatactggctggcattgtcagtgttctaagtttcaggcatttttatttttcctggctaaacgttggtgaaagttataacctcctgcctgggagaaaatatacatcacctaaaatgaacttatggcaggtctaatcaaaaggctaaatacaatttcagaaaaggttctgatactcttgtttttgataaagcattttttcaactaaccatgaattaagatgagtccatttgcctcttctgccttcactgagggtttgggttatacacctctactgaattgtgttaataactgtttggcagtgtgtactttgtttttgtgagtcatgtctcatgaaatttattggaatgtttaatcatatttgctaagaaatgtttctgctgtagttggatttgcccatatttatgtaggtggttttaattttttaaatggtgattagtgttaaaaatcaatttaaatcatgactaatatggtaaaaagataaagcatcaaagcagtatttctcattcctgcctcctcaatatctaatactgggaagatacttcaaagaatattgagattgtctgaagttttagttaagattttcacacattaatatcaaaaaagtaagtttagtatttgtttctccatgggttatttgtaaagctgtaaactgagatatcggtgactccgtattatgactccattagtgagctgtggtatgggtaggattttcctacttcttctgtacttttacctgtagactatttttactaaggtgctttataatgtgttttaaagcattgcatttacaaaacaaggaaaatgctgtaaatattgcatattttatgtatttggaccaaaaggttacaagtaattagacaaaagtggttttgcaccaattttatgtcaagtaaaaccatcagacctactgttcttgtatttctcatttaactttactgttaagacatcactgaaatgaacttcagtaagctttcaattttgatacacagttcattattcataacttgaggcagtaattacagtggaatgagtactggacaaggagtcaaaaaacttgatttcaggtcctagctctagcacttacagctgtgtgatcttgggcaagtcacttaacctctctttgcctcaatttcctcatcttgaaatgaggataataatacctgctgtacctacctcacagggctgttgtgaggattaaatgagatggcatgtgaaagcactttgaaaattgtaaagcgctatgtaaatgtaaggtattatagaaacatctttaacatatagtttcataccattcattttttaacaaagaaagggaaaagtctgcttgtaagctggttgaaaaagttaatcttgatataaatttgtgtttgataaatatcctctcagtgttttatcttccatgtttcaacaactattgaaatatgaaatgcctgtgaactcttaaagcttcatgagcagctgcttgagttcaggaagttcactgttagaaataggctttgttagctgactagggtcagggaaacttttctcttcaaatttgaaagctgtttctgttttcattttacattattattcagaaatggtagctattctatacctatggtttaagtaaatatttctgaataaggcttcaccatactgtaagcattttaggtagattgccttaaaggttatgggagggcatgagggaacacttcttatgagaaaacatttataaacaaaagaaacatttataaactaaagaaaaactaaaagaatgacagaacaatcatcttagcaccctttcctcacaataatataaaaatattaaaagaacataggcaggctttttttaaatttggcttttttctttccttttttcaaattgacttttataggtatttcctgaaagtgtatacaaattatttcctcgcccaaaataaagcaccacttcaaggtgtggtttgacattacatgctaatgaacaaacccagtatgcaagttattcttgcaccacatgctcaaatcttcttgaggtgcattaactcttttaggtaactagagcagtacttggtgaactagatcaggaggtcagtaaactttctgtggaagggccagagagtaaatattttaggctttgcagcccatacggtctctgtcacagctagtcaaccctgccattttaccacaaaagcagcaatagacattatgtaaacaaatgagcacagttatgttccaataaaactttatttacaaaaacagatgacatcccagatgcagaccatgggcaaccaaccattgcactggcyaaatcattatttatggagaaatcctctttgtgtctctactctagatgcctaaaagagtttatatacttctaaaagctcctaacttatatccaaagaattgctttctgattcgtgtagtctctcccacagattcataaacttttatgacttatattgtttccaggtgggcatggtttatttcccagtttaacagttcagaataggggcatttattttatcatattttagggtgggttaggagtatcctttctggagactgagaaaggggtgtatttaattccatcaggtccagtacagtactaggagtcataatactttataatcaattaaataaatagaaccactgagacaataatgtatttttttaaagtggcaaatgtggttttcttttttcagcctttgcgctttttcagtattttgaccatagggagataatttttttataatacaaaagtaaccacttggaattttaaagataatgttatgtgtgtatgtgaaatatatatacatatatatatatatwtcctaaaagaagaaaagatacctttctgttcaacttgtatcaactcctcttttctaattgctgtgaaatggcaactgttgataaattattgtgattgttttaaaatctaatgggaagtaaaatatattttgattttacccagcttaatctgtaaagtagcacttaaatatatctgatagcaacacttaagatattgcatggggattactttcctatcatccatatgcatttgtgcaacttcaaacatattgggtgcttctgaattcctgatgattggatttaagctattgaaaattggataatttaaacttaatgatttttataattttctgatcttaaaatttggttaatgcctataatctgttgctttttctcaatatgtgtcctattggaaattcctcaaatcgttggtgccatcagtgatttacaaacaatattttgatattgcagatgacttgcttactgtatttgcaytgttagaaaacagtttgtagacaatgattcttttttaataaaatcaaataattctaaaagtgctagagaatttaactaaaagctggttcccaaatgcatagctggcattttaatttaaattcaaatctacatagagaacatcygtgtaaatcatctaactggattttyccattggtcattcccaaacacacctatggtcctagaatccttaagagaagcaccctgtaaccttttatgtggtttgcctttaagaggcccaggtgcttctcctttatgatttgagttggcctcttcataaattagtgctgtttactttcagaggaagcagagaagttgctgttatgtttttgcatccgtttaccctatgcaaagttgctgtatgatgccaactaaactrctctttaggcagccttctgaggagaaaagcaaccctgtttcaaatccactgccaattcagctcctctggagtggagctttctgatttcttggagcaggaattttagagattgaaatgaatgatcatttagtcagatttatcctgtaatttcatgcagctttgtggcctttgcagtactatttataaaatggaccctgatggtgatgaactctttagaacgcattactgttaagcctgtgttgagacattgatgctgtctatctcattttttagacagtttttgtagctttctattgagagtcaggtatgtgagcatctctgaagcagtgttgaatgtaattttcggaaacatggattgtgtattttgacttttattttataaatacacagctcaacagtgccttttttttccctcatagtcctgttggaagatgctcactactttctctcttctctctccctgccctcccccactccattcagttgattcatttatgcaaattctgtttccaacttgaaaccattttgtcacatctgttggagagataatcactccttttccttaacattctgccagctttctgatgttgaagtgtttcagttgactacctgatgcaaaagctataaaataaacagtgggaaggggaaaaattggtgtcctgttttaatattttcttttgtagccttgacactgatggacattttccaagctgactcagtgttcagtgtcaacttaactctcagatagtgttgccatcaagaaagcatgcaacatcattggtttctaatgattttatggcttgtgacaatattttatctggactgacatgcctctgctgcttttgctttgtacttcattgctggtaataaaatttcagatggaaaacttacaaaatatatacttaattagaagaaaaaaatagagaaagggctattagaattaaaaaaatttgaaagtaacttaatctaacatttatggcacagtttggacatatccataattttttttgggaacacacatttctgattttttttttcccccttaaagaagaaagtctcaattccattgattttcaattcttagccactggctcattgctttgagcaatgcttgattgattctatttatattatatgatattgggttgataaaataccagttcaatgatgagttttcttaacagaatttggtttgtacttgcagtggctgaacaaagagcatggcttgagaatcaaagggatctgcatttagcaatgtgatgtcagtaaatggacataacaggattgttgtaaaggttgggcatgatgtatgcaaagtactggccagggtagactaataactgatggcatttatatgctgtgctggaatattgttaccaagctgatgtgccgttctcaccctgcagaatactggttttgtcatttcataaatgatatttttataaatatttttgaatgrctgtactttttactgattatcttaataccgcctcacttatgtacctgtagcataaatattcctggttctgattcttgctgttctttccacatacaaatcactcatttgtacagattaaaggggggaaacgctgactgttctaaagaagataggacttgcttattccagaaatgactgagttcatatcttagtatatttgaacagtaaggactgctaaatagtacacacataaaattcaggatcacaggaatgaaatgatttgcactctttgaacagaaaggacagcagcagtgtaaggaataggctctcaagctaaaaactgagaacatgaaaacctctgaggacctgactgcagttgtcaagaaaagtagagataaggttggggagaagcagacagatctcagggccagaaacgccaacatttggtgacaggtgggatataatcaataaatggggaatgaaggcattaacttgggtttgtaacacaatgcatctgtgcaaattttcagcaccccttgcttttgcctcaattaggcaatgatgattacttcctgtgtcaaagcttataaaacagactagtgttttcccaaagaacataggatcacaaagaaagaattcactgtctccctatcagatgtttggcttccttgcctcttttgctcttccagattttgtgacctgggttagagtttagaaagaaccccctagaaacttttctgatgttctctggtttgatgatgaaggcgtctaataaaacacatcaactctaagcctctacctctacttctctaaacctgaagtttaraaatgaaagtcatgcctggaaatgtttcacatcattagcactgacagcgtttacagggaaatagagaaaacgtatatggattaattttcttttagatcaagggtgtgggcaactagatttctagagccttcagcctgtctatcggtgatgctggaaaaggaagaggatgagctgtaagtgcagtaactgacccctgtctaggttttcttgctaaatacgccctccatgaaacagacaacataagtattttgaactgtaagaatgttaagaaatttctgtccctgagcagcagatcgaagagtgattattctgggattctagaatcagttcattcttttctttctccctctccctccgctctcctttctttccagtttaaaatcactcagtctcttagtagaaatttaacatcaaagaactgtcaaacttgctaatttgtgattttttaagcatgtgccgccttaaactatcaaagctttaacctgtatctaattaaatgttaaaatctggcaaagagtagacctacagtccccaagtgatctggtttctgaactttgttttgctttcacaaatgtgagccaatttgccctaaatctgggtatttcatgtagcatcttgagagatgtatttaaagtgcctgtggcaataacatttcatttgtacccattttgatgattctgggtgccctcttgataaggcagccaggttgtgctgtaaaaaaaaacaatgtagaggtttcagtcttaggtgtttgaaactgttggatctctcaaaattgattagctgaaatataccttttctgcgtaactgaattcaccagtaattccatttgaagcgggcagagcctttctgaaaatggatgatcagaaatgagtgacattttattcaaccaagagttaccagagacatattttttttcctttaaaagtaatttaaaattcgccagaggattactaattaggtctcttggcatagcatggttatctgatcagactgtcatgcccataaacagtaaaaatgcagcatgttgatccattcatgtctgtttttaaaggaggctgtggactttaaactcctctctcgcaggcttgctctttgtttcatgtgggggctctttgaataacaccttagatgagaacaatgtttaagaaataggccagttatattttgcttttctatttctaccatgctaatggctctctacttgatcgtttaatcactgatccaaatccagatggaattagatgctccttcctgctgtagtcctgcagtcagacagtctgtaatgtttgatacggatcttctgagtggacaagatgagattagattagtctctctgggagccagccctattcattttctaagaaagttatactggaggcctgaggactgccaagagcaaagtggaaacagagcccagccttttcctcttatcaagatccacagtagttccacattaagtagtggagatttgaataatattggatcagaatccaggaaggaggtccttgccacccacgattgraatgtgaacttcatgtgttacaactttattaccttttcttattttaatatatgacaaagactgaaatctctggcatggagtcagtggcaaattttacttttgtgggtttttttttctacatttagtatttattgagcccccactgtttgccaggcactgcactacaggctctctctgcaccatgagcttaacctttcagtaatcctcatattcaatcctttacaactgtttagaactttataatttacaaggcgctttcatttcacatttatcctctcattagattctcacgtggaagggtagataccattatcctcgttttacagttgaaactgacacagctaggaggtggaagatgggctccccagccctcaagattcctagtccatcaaaccctgatgcccttcctgatatgtgcctgtctctcaaagtcagcaagggctgtaatacagattaaacaattgcagtggttcttaggctataatcccatctctggaccaatagtgtcagcatcccctaggaacttgttgaaaggcagattcttaggccctagccttctgagtaggacctagcactatgtttattaataagctttcaggtggttctgaccaagactaaagttaagaaccactggtctagagcaccagtttacagatgagacgactgaagctctagttgagcttaacctagctggttaagtaacctaaggcttctcataacaaaagttgtgaactaggatgtgaacccaggtcagtctggctccaacaccatctgttttctacattggactgcgttataaactatagtgtatcttatatatttcattattggtaaattcctctctgaaatatcgttttgggggaccacagagcaggtcaataagaagaaaaaagtcccaatgtgctcttctggagtaaggcaaacaatgccaccccttctaatgagtttctgttttctgtgtgaggtgaatgtgggggctaaacctcagcgtggctactagtgtgctcaggaaattcagggacagagccgagaatccaaaatggctacccaaactaagtgcatttcatctggactttctggtcccagtgttctttggtcatacttaatagtttactgtgatggatttaatggcaagagggctccttgccctggcttggcaatatctgtggagccatgggttgacgtagtgtgggaatacttgtggctacttggaaatccctgttgctgtcatcattggcagtgcttcccagccgagattcttagtctgtggtcacgtgtgaactcttccagtcatgcagcttaaacagaagtgcccacttgtttctcacaaattatatctgcatttttttttctcctagaagcaagagcccagaccaagggttagtcgatagctcaagggacttccagggaaatcagaactgatcttcgtgcatagcaatgcttataggcttccttccacacacactgagagatcagcagggcagtggactgagccttcgggtgcaatgcatttcctcaacacattctttttgaaagaggaagattgttgcccatgtatagtgtacttcttatgtgccggcactgtaccaagtgctatgcatttgttaacactcatttcatcccccctttttttttaagagaaagaggatctcactctgtcacccatgctggagtgcagtggcacaaccatggctcactgcagcctcgaactcatgggctcaagactcagcctcccaaagtgctaagattacacgcttgagcccccatggctggcctcatttcatcctcttaatcctctgaggaaggtactactagcagccccattttacagatgagaatgaattagaagttcagatgctttcttacagtcacacagctagaaagtggtggagcaggattcaaatccaagtctagctacaaattttctgctcttaaccatcctgttgcataggctctgacagctgtgacaggcagtagtggggggttgttttgaaagtcttgccataggctggatgcagtggctcacacccgtaatcccagcactttgggaggcccaggtggggggatcacctgagatcaggagttcgagaccagtctggccaacatggtgaaacctgaggtcaggagttcgagaccagcctggccaacatggtgaaaccctgtctctactaaaaatacaaaaattagccaggtgtggtggtgtgcgcctgtaatcccagctactcaggaggctgaggcaggataattgcttgaacccaggagatggaggctgttgtgagccgagatcacgccactgcactccaacatgggtgacagagtgagactccgtctaaaaaaaaagtcttgccatgtcttttctgcctcttttacacagccccacagggcttggcaacaggaaaagcatgacctagggctatggcagtcacccatgtgggctatagctatggctgcaactcagtgcggcctccaacgacgaggactgggagtttggaggggcaaatttaggccattttgttttcttgaaatgcttcctcctagtccctaaattcagtcccaggtcaataaatggcagttagttattctyggtggtcgtggtgatgtctaaagactgacaggattcccagattcaatgttgggaaaatcaccttgagtccacttttcaatgtgctggggagtgagtacaggccaagttcaagtcatcagttcccagcggttcagccagcgtgtcttgtgaattctcccagggctctctggttttagcagggtctccatgtgcaaaccttgcctttgcacaagagccaccatggcaggaggttgaccaagctgttctggggaggtgaaaggtgctgagaagttgatgcttcctcctaagtgctgtatggagcaggcttggcccagatccaacatgggcacccagcaaagactggttgtctcctggtgtccctgcagccctcccagccatcccctcacttcccactgtggcatgctgcttacagctctctccctccacatgcctgagggcctttctgcaaagaggggttcagagatatccatgaccagccagtctaaccttttcagggtgggagggcagagcagaagttttacagtggatacgaggcctgaagccaaaggagtaaaacctctgcctcatgggagtccargcatgcttaggcaggaggggtggcaggtgggtaggacagcctcttgactccagaaatctcacttcataagtggcacctgctctgagctctccagatatccctgaatttggttttaccctctgttcttgcctcttcctgtctccctcctcctgctcagtccctcaccacaacattccttttgtgtttagggagatttcctagcacctccctggctaacagatcagatccatctgagtcacactgagcctcccatttagtaacttaggactctggagtccgggtggcctaggcgtcatgccaaactcactactgctaatagtaatrctattataatggcttttatacttaaatctcctttcttccaggagccccaaggtctttaacaaatgcaagaattacactactctccaaaaaatagaaactgaaggaaaatacattccttattccaagtctactccttcatggccttacatagttgctttgaaggatggatctttaaagattcataagctttggtgggtgagtggggtggayaaaggagataggctttcttattgcctgaggccccaccagtttcaccatcttatctttcgttggttttgcagctcaaagaccttgaaactacatctggatgagtctaataaactggtatcttagaagaagagataaggttcaatacgaagatgtttggctctcatacccccagaggttatgggcccaacagatgctcactgagctcagcttgtcattgcgtggtttaggacagacaacaaggaaccttgaaggatggagtcagcttaaaaggcaagcattaggtttgkctacacacccctatccttagcacctgtgaagatctcagagtgcaaagagaaatacagatcatggcccactcctctatgcctggcactgctgggtgcagaggaagggaagaagcaccaggggtgggcttggccaggacgtgccctcctttcaagggtccagccaccttgtttaatgtaagggaaagagaattcatcttgatgccaagcaacatagcttcccgttctgactgcaccttttctcacctggcattccctcaatgtccaccaggttgctttctttctgttggaggagaaaatgctatctaactttaagtattaagatctgatctcctgattcaaactcattcttcacactgatgccagaaagaaagtttctgtcttccagagagaaagttcatgttgcttcttccctcagaaagtctcagtggcttcccacccactgtgggaagaggtgcggctcctttaaggtagcattcaagaccttctatgctaggtccctaacttccctttcagccttgtttatcaccacagctctctggtagcctggaccaaccaggtcacttatgcctgctttcatacctttctccctgttcttctcccagttctctatggaaatctttctcaccgttcaagacctagctcaaacagcatctctctgggacagtttctttgatcctgaaagtcagaatttactgtttgtcactacactcacaaagcccattgcttgttcctatgttcaataatagtgacatgggaagcacatgctttttgaataagacagacgtgaatttaagtcctggctcgctcacctgtcatgtgccttttggaaaatcactaatctctaagtttccttgttctaccaaaagtaaaaccaaagccaacttcaccttatgtgttgtaagaattgaatgaggtcatagctctaaaatccttgggagaagaacattgtgggtgagctgaaggcgtcagcgttccctaacattttgttcttggtattgtccacctgcacttcttccccttaggtggcaaactccaggtgagggccttttctggctcttgatgttggccccatccaactccaacaccatgtcttgtatagggacactcactaaacatttacaacattgaaagcacttaatttctcagttcctcagtttctctatctggacagtagtgaaaaagaatagcaaaaaagaacattttgggctctgaagaaaaactccccatatgcccctcccaggacggagcctattgttaattggaaaataaatagttctcagctgagcatgtctttgcctttcatggggccccctgcgatgctgtttgggagacagttacagctactttgaggataataatgactgccccaaactcctktggaagaatgttgggaagataaatgagataatccacctgacagctctttgagctcttatgaaaaagatacccttgaaatgtaggatacaggtgtgccttgctttggtaggtgaattttggagattttataaaaatctgaacctacaaaacagacaaattaaggggtgaaaattagcatcgcaaacagcctcttggtttgacagaaagattcacagcagggtccctttaaatagccagctcccctggtgcatctaaaatatgactcaatctataaagaatttgatttacatataaccagtcaggaacacttctactacagaggaggaagcacatatgttttttataataaaaatcgataactctggggttttaaaaatataaaatatttctttcttctcatcatctttaatcctgcagttaacacttccactgctaggaagtcgcctaaaaaacaactgcatgttctgcagaggccgggccctcacgagcacagctccaggagtgtgcaggtagaaaatggctgttcagctgatgcccatcacatctaaatgcaacttgctgttcctaattgggctaaagcttttttttttttttttgagacagagtcatgctctgtcaccaggctggagtgcagtggaatgatctcagcttactgcaacttctgcctcccgggttcaagcgattcttctgcctcagcctcccaagtagctgggactacaggcgcgtgccaccacgcccagctaatttttgtatttttaacagagatggggtttcaccatattggccaggatggtctcgatttcttgacctcatgatctgcccacctcagcctcccaaagtgctgggtttataggtgtaagccaccgtgcctggcccatttattttttttaatttttttgaggtggagtctcactgtgtcacccaggctagagtgcagtggcgcaagctcagctcattgcaacctccaccaactgggttcaagcgattctcctgcctcagcctcccaagtaactgggattacaggtacgtgccaccaagcccagctaatgtttttgtatttttttagtagagacggggttttgccatgttggccagcctggtcttgaactcctgacctcaggtgatccacctgccttggcctcccaaagtgctggtattacaggcatgggccactgcgccctgccggctaaagcattaacttaatgtaagattgaaagcaagtggtagaccgctgacatctgaaaaagtaaagcccagccttatttagaagcgggrcgatatttggcagatgcaggagcttctagaaatgagtgagctcattgttcaactttcctctttgggagtctctcaggggtgtgtgtgtgtgtgtgtgtgtgtgtgtgtgtgtgtgtgtgtacatgcatgtatgcataacagccagtgcttggaacaatctcccaaagatgtccacattcctaattcccagaaccttcacatatgctatgttacatggcaaggggaaattaaggttgcagatggaattaagtttgctaatcacctgactttaaaacaggaagattttcctagattatccaggtgggcctggattatctagtgtaatcacaaaggtccttaaaagatggaagaggaagaaaaatcagtgtcaagtgatgccatgtgaaaaagactggcctgttcagtactggctttgaagatggaagtgacaccagcctagtgagacccatttggacttctgatctcaagaactgtaaggttatacattcgttttgctgtgagrcactaaatttctggtaatttgttatagcagccatagaaaacaaatctggtagtagggaggtgggtggtagcaggggttattgcagcttcactgcatatttcatgctgaggaggcccgtgtaaaatctctgattgtttttgtaaacatggatgcaaattcatattcaattgctacaggccccatgtgtctagaaccacattctaaccaacaggcgagatgcaggggaaaacagaaatattgtgggctggcccttgaatcatcctgtgtgccacacaggagaagacgtagaatttcctctaatgacaatgactgctttcttctggttaacttcccacttgtaggttaccccacaaagccaatggcacaagtatgaacaattccaagttcctcccttcctcaaaattactgtgtctctaggcccctcctctggcttcagcagctccctctccatgcagagccctggttctagccgaccaaccatcttggagctcctctatgcctcccagcccttcccttagtccctccagagcaagaggatgtggtaagctggctggcctgcctgagcatatcctagaaaacggtttgtgttggaggagcaatggaacactgctctgcctttgacagcctcctgacccctgagggttcaacacacttgtctccctcacctgcccctggtgggttgccctcttgccacttccattgatgacccctttgcaccttcaactgaagtctgcacccactcccacctcctctcacagcctcagctcatccctgatgactcagatcaagtttccttagggtgaaatgaagtggggtgaagctttgtctgcttcttagagttcagggaatacccaaaacaatctaacagtcacaccacctgaccaactttgtgaccttatccacatgaggagaaggcaagaatctcaacagctgaagtgtgccagaaacattatgttttgttttagtgaatccgttacaagtccccatttggcttgctgattggcaatttcagttactgctggatagtctttctctcgctgggggttgtgtctccattgtaggtggcttattactatcacaacagcctgtgtgtgtgtgtgtccatgcatgcacagaggggccctctgacccaggttgtccatccacaccagcctcccaggtctgtatcaccccatcccacccttgatcactgatacccacaggtttgtggctgccctctctcaccccccactgcaaggtctgtgcagatttgactctttcttaactactcctgtgcccccttttgagggcctgtagggaattctgctatgcctctgccccataccccacacaactactctagggctgtgggaattctatggggctgtcacaggcctctcgatctgggcacacccggaatcactttctactctgctgctcctgtccatgctgggcacccaggaaacagacagtggtgtctttgctcttccatcccacaacctcttttgttgttctcttattcccctccatcctccagggggcagcagtaatgcagctctttctcagggaccccactgaggagtcctctctttccttctgctctcctttggagactccatctcatcttgggtggcaagtggggtggatacaccaaatcttttatatcttagtcagacttcacttttgaatctcaaaactcaaacagttggatcttgggtgctttagttccactgggacaacttttctttgacctagaaatgccacatgtgggagggtcacaacacaacagtgacactagtgaatatatctctgcgttgtccccatatgcggcaaatgggtgcaagatgctgcctgccactcactgtgcaaagactacccacaccaggaaaaagcagagcctgtgctccatgaatctgcaatcacgggcatctaagcttagaatatcccactctgttgcaagtgaaaacatgtaggtgtatctctttggcccaactcaaaaggtagatgttttctcccttttaatacagtcacttggcagtttcagctttctatgaacattcttctggaaaagaacctcagctcgttgtgtagttaaatttattcagcatataaatctcttaaaatccatgcccttaaatgtttatggtcatgtgggatattatcagtgtcagagatgggcagggttgaaggaatttggggtcagactactttcttttaatcttctccaaacattttaggtttggcaaaacttgaattgcattttgccaagcccctgtgcctgtaatttgtaaacccctgtgtattttcagttaaatgtagtccatatgtttctgattgatttacacttaactcatctaaacgttgttttgttagtgttatttgatgtccaaagggcctcagagcctgtttacatctgtctaagctgctcgttttcctccctgagactcaggaagatctgttttgccaagagtaaactaagtcgaatactgcaccgcccctccccgcctccaccccctaggattggatcagacttgggtagaatctgacaaagagctgaggaagttgcactgggctttgaagttgaccaaacactctaccctacatttcaccaagaggaatcagagcgcaaagcctcccccttggggactgtgaccaataacacgaatacagagaccagatcctaggccaggccaacttcccagcctggcccttttccttatggcactgacattyggctgcaactagccaccaccgacctcaataggcccgtcccttacaactctttcatccaagcttcagtgggaagggtggaatagattttatacagtgaatgaaagcaatcaggcctcttgctagatctgtggtaacaatctcataaagcaagagtgtggttttaaaatgaaacaaaagaaatccttagctagtgccccatttcactgaaccttaattttagakagcttgcatttgccttgcaaatgagtccacaaattaccaagccacaagcatttaaaaccatcctgcccactgccagaaggagtatgcctggcagaaccaatgaggctggccccctactgctccaccacagtaaaagtgagttataggagtgatgcttgaactgagatggcatcccacaattttggaaacatggtaactagggatggggacaaactgcaactttatgattcaacattgagggaaatggcgctttgttttgaaagaagcgcagtggctcacgcctgtaatcccaccactttgagaggcccaggagggcagatcatgaggtcaggagatggagaccatcctggccaacatggtgaaaccccgtctctactaaaaatacaaaaattagctgggtgtggtggcgcatacctgtaatcctagctactgtcggggctgaggcaggagaatcrcttgaaccagggagtaggaggttgccatgagccgagatcattccactgcactccagcctggcaaaagagccagactccgtctcaaaaaaaaaaataaaataaaataaagcagcactttaatgtgtatttggtcgtgttcaagcaaactctatttggaatggaggtatttgagacaaagaggagccaagtaactctgtaaaatactatgacgggttgtcttctctatatgcagagttgcatctcagagataattatttcattggacttggaggaccctctgggagatttctctcttttttggaccccaaaatgtatcagggaagccagattctaggtagaaggaacatggtcaaagcatttggggaaaagcaggctggcccctgaaatgagggacaaattaggagttaaggacgaagatagttaggacttcctatctctgaggtttaacctttctgtttctattttgtaattcccttctgctatctttgagctttcagaaaatttcgatcaatattatagtttggtcttatgttctgggagactaaaggaggggtatggttgtatgcagtgggggagccagcgacctggagaagccaagggtgacttagaggcagtggaaaacttgtccatccagggcaacctgatgtggcaaacaggcctgatctttggaacgtggatgcattcctgggtgattcttagaaacaactggggtaggagaagctcactaaagactggctttcctgcagcctcctgggataggagctaaggttgtagctgtttgcatgttaagggaagagtcgagtcttgaaggctgaagaacttggggacatgagtatcacatcagtgttaactctggtgggtggccaagtggccatatttgcatgtctcactttcaaactgggcagcagtggtgctatcacaagttccctcctgctggagcctctgcagaaggccaggcaggctgctctcccacagtcacgtgagcagatgtcctmtcctgcctccatgaaccatcccgtttggttacctggacgccattatatccccctgccccaccatagtgctttctctgaactgcattttagcgtgaagccatcaacctccactgaaggctgagaaatgcgtctcctgtaagcatgttgttgaagctgccatttgcaaccttaaacgtctccttttggtggaactctaattagagaacttcttcctcatcttcgtatcagaaggagaagtagttcagctcctcagggcctggctttttttttttttcttttcttttcttttttaagtcataactttttagaattgcggtaaaatgcacacgacataaaatttaccatcttaaccgtttttatgtgtgtagttcagtagcagtcagtgcctacactgctgtgccaccatcaccaccatctatttcctgaactcttttcgtcttcccaaatggaaaccttgtacccgttatacaataactccccattccccttctctacacttcctggcagccagcgttctactttctctctctgtgaatttgactcctctgggtacctcctctaagaggaatcagacagtatttgtctttttgtgactggcttatttcatggttctggtttgttatgatcactgaattctctaacaaatcagatgtctctcctcccccattttttgctttgccatggcagctagaaaacaaagccaaatctctgcctgatccaaaataagcatatgtgctagaaatttttgatgtagcttcatcctttattccattttttatttatagtcttgtgtttttttaaaaattgctgacccacctgtgatttattaaatagttctttatacaaggcatctttaatcttctttgtaatgaagaagaacgtacatttaaaaatacaggttgagtagcccttatccaaaatgcttgggactaaaagttgctgacccacctgtgatttatcaaacagttcttatagaaggcatctctaatcctctttataatgaggaagaatatatatttaaaaatacaggttgagtagcccctatccaaaatgcttgggaccaggaatatttcagatttagaaaattgttggggattttggaatgtttgcattataaaatctgactctgaaatgctccagtgagcatttcctttgagcattttgatggcactcaaaaagttttggactttggagcagtttggatttgggatacctgaatttgggatactcagtctgtattaacaagtagttgatggagggatttaggggattgggtcaagcacgtagtgaagtgggttctcacagccgatgtgaggctcatccaaacaattgcacccatccttgcccctggacggcacctcctgttgcaggtgcaggcagtggggctgctctcactaatctcttcttccatgctgaccccctccgctccaaagtcaatgaattcagattgcaaattagaagcccaggaacttttcttataactaaatgtactggtctaagctagtgggtttctaaaagtattctgtgtcttgccgccaacaccttagtcttttagggaccccagtaaacactttctcttggaagttcctggcatccaggaatgggttagccactctgaccagtgggctttcacgggtgagattgggcctgaggctgggcttggaggtgagggatctggcttgaaagatgaggacttcttatttaaagccaatactaccaagccaggatctgagtgcttttccttggagttatttttccacactggagaattgtttgtgaccattaggccctgaggagtcagtttctttttgctcatccttgagtgaccacttaagcctgaactagtgctgggtggggtctgccactgggccttccaggggcttctccttcataacctttaccacctggcaaaccctgttgttacacttagctaactttattttattattattattattttgagacagagttttgctcttgttgcccaggctggagtgcagtggcataatctcagctcactgcaacctctgccccccaggttcaagcgattctcctgcctcagcctcccgagtagctgggattacaggtgcccaccaccacaccctgctaatttttgtattttcagtagagacagcatttcaccatgttggccaggctgctctcgaactcctgacctcatgatccacctacctcggcctcccaaagtgctgggattacaggcatgagccaccatgcccagcccacttagctaactttaaggaggactggtccgtgcaggccatgagggttgagtaccgtgtttgcagtcaggagactcaaaacctgtccctgccattcactagcagcatggctttgagctaactgattcacgtctctgaaactccatttcctgctctaaaagagggatgataatacccttctttaagagttgttgtcagagtaagggagtaaccacaaagttaataacatgttgtttttacaataattattatggagaaaactgattattagacattatcccctgaatccagctctttgcagcaactttgtgcttcctcccttgacttaatttttacaaatctcagagaattaatgctgaaggactttaaaaggtcatctggaccacggttcccaaagctggctgacatcaaagtcacctgcagagctttaaaaggcatttaaagtggaggccgaggactccgtatttttaggtggctttcctggtggtttggctttgtctatagacgtacgtttgagctacccctggtctagaccctctctctgctatttgccaagaactcttttctgctatttcaggcaggtaaaaacccatcctgtgtttacagttttcactaagcaggactccacaccttgctgcagagttcatatagtgtctaatatcctctcacggctctactcttccctttgcattctctgcttatgtctccaaagatcttgaatggcttgtgatgactgtcctgccagtttctttgtctctcaatctggttactatcatgatcatctcctttgggagatgggttctaccatttatctcttctcgttattctctgaggctagaggtttgctagactctaacttcaactcttcattccttccccacactttctcctgtctggagtttgggtttatttttcttcctgcctaactattcctaatatactaagtcaataaacagattctctgtggttacatatggcaaacagctgaaatttacagttgagagtaaaatttcctcatttgggaaaaaaacccatcatttcacagatttagaaagtggtcattctgatctccagggcaaataaaagtgttttataaccttccacaaaagcttatgccttgattaaatttttattatgaattattaattaaaccaaggaaatgcagaggcctaaaccgttgcttaaatttgctccagattgagacacaaaccaaaggcggcaagaaaccctgaaggggaggtttaatgatgagcaacacatataaaaccatccgcacgctttcatctgccaaaggctccaaaccagccatgtaaatgagcccatgtgcccagacccggacagaggctggcaatgggcctggaagaaacaggacctccctggcttctctctcctgggggtctgtgtttgggttgcatggggcactgtgccattagagacacaggggcttatctacctcatggagcagctgtagttagagggagtagctggtagtagagcagaaaagcagcctggtgtcttggaagctgagccagaggtcaggagaagtgggtcactgctctctggatggagtgattgatccaaccagagccaaccaatacagttgtgcaggttacctggagcctgggcccagtgggtgctgacatccagctcatctcctactcaccacgccttgctccttgctgtagagctgcacccactatgaggagggagaacctttttctgacttgaacaagggagtcacatggccttgcwtggaggctgacagtgtgcgtatggcgtgagtgggagggatggggctgcattcttctttttcttagaacacagaggtgttgtttgggcaagtggtagcctagaactgaaccagtagatactggggatgcaaacctgaacaagactctcattcaaagagctcacagtaccttgaggaagcagacagatatacagagtattctaacacgtggggacaaggtgtacaggacatctctatgggtacccacccagatgggactggacagtggggaatcagaagctttcttggggatgatgtctaaatgagtcttgaaaagtggaaggggttgggatgagggtgtaaagagtgagaaggcactgaaggtaaacagaactgcaagatcaaaatcatggaggatgaaggagcatggtccaagagctctcagggaagacgtggagatcctgtgggggctccccacttcatgttgttgcagttgaagacattttcaagtatgagcagttattcaaatatgaactaagcgggtgatacccattcccttccccagtgaccaagactggagggcttgagaactccargttcccagcatgatgcttggcgtttgaatgctactttcttccccttcctcacttcctcctgccctttgatttttaatatgaaaacattttaatatgaaaacataaaatatatacatctgtgtatctttcataacattcaaaaaagagctaaaaaatgtgaagtgaagggtaatagcatgatgctttggccatggtcggctccccatgattttgtgtccccgcttctgggctggcttcttacagcggattgcagctgtgccccagcaagaagctggcctctctggatcaatcactccagaagcgcagaggaaaggggagcttgcctcagtaagcaaaagtcaccattatctgattatctttagggattccctactatctggatagctagtcatgactagagaagattctgcatggagacaatatatcatttatttggcttttatttttactgaattcagtgctcatggaaagtggcacattgacaacgctgcttcctagcatgacatcacataaataagtttgaagatactgcttaataagaaccctttaaagataagagaaatggtagaaagaattgaaggatgctgtttcctttttaatatctgccatgaatcatagtccagagagaagacagccgaggcatgcagggacaagacactagcacaggggtcaggagatgggcattcacagtgggtacagctcagatccctgcctttgctttggcctgaggctgggcagacagggacatggaaagctatggggctggtctgaagggtagggtggggtggttaagcctttgctggcacatggctttgcaatcttgtacactgaataaatccatcagagcactgcatccactcacccaattagcctgcacctcatgaacacctattgtgaggccagcaccatggggaaactgaaagaaccagatattctaccaccatggaggaatgacctcaccctgggtagtaactcttcccttctgctcatctacccaaaggkaaaagaaagtgcaagtttcctagtttacattgtgtttcttgagggagaaaaggctcttggtaaaacaatgccttattcctttcgtttggaagttctttctgcagaatacagctcaactgggggtccccaaaaggcccctgaataatttaaaaaaaaaaagaggtggtgtcaggcaagggctttaggacgtagaaggtcacttttggttgttgtcctgttgatccaactgctttactaactggagctattgctcaagctggagggtgagggaatgggtggggctgaggctgggagttgctcagtagttgaccccaagtgatcttgtttgaggaaaactcctgtgatcccccatcagaatattttgaaagtggaagagtctgctggcgggaagggagaagagtgggaggaggaaataagcaacaggcagcttccyttcttgacagatggaaaataaagggcctgtgcacagctcggcgaactgctccgtggacctcccagyggggctgctttctgaggtgatggtctcctcgctccttagccagcctggtggagccagctactgacgttggaaaggagttggaggatggaggtttgtggccggcaaatgagaggtgtcggggagggagaagagaaaagcaagcgggctgaggaaaaatgtaagggagggagatggttcttcgatgaaacctctggcctcttttaaaccataaagaggtctggctggtttgattccagtccataaaatggctcagtaggatcttagggattatttagctcaaacccctgagaggtgaggaaactgaggcccagaggtcccacttgcctttggtcatggggtgagtatgtagcccagcagggtcccagctcctgtgagctgcgattcatggtgttatctttgctggggaggcctgaagttcctttagcttgtccatgtgaaacagaggaagagcccacaaggaacgcattcatctcagagttaggtgaccttggctttgggatctagttgctcattacttccactttccttgccaacatctttcctaagccttccagatcagggcacagtaccactcccttgctgccagacaggtggcctgtcgtgtgggcaggaaggggagttcaaggcaagcaaggcccactgtgaaccccctgctagaagtgctctccccttccttcttttggaggtggcagttactaggcagcatgacccagaggaggagataagctgcctctgataggaaggttttatctttgaggttattgcaaatatgcctgacttcttcatctggttctgtccggatctgaactggtagccagataaactgttggcggtcccatttcatgtatttatcaagtctaaacaattgtcaggaggcaattatcccccaggaagccaatggcagataaatagtgtcccgcagtctggttccagccatggaatctgtaagttgtccctccttgccctgtgcagattttctcctctgtccctgctgccctaaattttaaaggaggtttgatgttccaacacgtttgctttggtgttctttgcccacagccccaaataaaatctaatggtttttataggtggataaatcctttttaaaggctcttttgttatcaccatggggtttgtgagcactaaaactggattttaagggatcagtgaaaccttagaatcacggtttgctgtatctggaaggaaccatgaccacttggtacagacccttcaagcggtagatgaagaggccaaagcacgaagggatttgatggcttgtgaaggcaacgtgctcttcagagtcgggcagacgtgcagctgaagcttggtctggccactgatctgctgcccggccttgggtaaactcctggagcccctatttccttattgattacatggagataccaatccagactgcacagtattgtgagaggtagtaaaactgtttccctctggtcgaggtcaaacagacaactggggggcagagctaatgccagaaccttagtatcctggctcccaggtctttatcctttccattattctgcaggaggtcttcaggctactgttaaataaaaagtaaagcttctacttcgttccacccaaaattctagttcagtgtttcccagacagagcacctccagcgggtctgaggctcagttctatgtggagactcatgtttatacgatgacagcatctatattttttctggatgaactaataatcgactggccattgtatttaggaaaaaccagacatcacctcatggacgtctcattgaaggggaccgtcagttattccattcattctggcaaattttctttttagctttggttgcagcaggaagagagagacgtctggggggctttttgcctgktggaagggcatcactcgtccacagctggagcccctgggatgacccatcccaaggtcccagcctaagtctgaggttccagggctggtcgcaggccgtccttgcagccctcgccagagcgttgtctgcacctccgacactaggtggcgccataggaacatcctcgcggcccgaggcgcggtcgcagccggggagcactcgccacggtgctgtggaattctctggtttttcacgcaaggtcaggcgtcctgctggcgccctctcgccaccctgccctcccgtcagaagcccggctcctcgccggggaaggccggatgctggcccgccgggacctgggacttgtgccacatggagtgtcgggagtctccattgccgcgagttctacaccacagggccaggctgtttgctccccatcggtcgctgcccccagcaccctgttgttattaaggactcatttgcttggagcggcatcattacaagggtgtggggtactacatatactccctatttttctattttcgaaaggctgcaggcgcgatgcacagtgcgcttgcacggtggggcctagtgctagcccgaggagcggacgggggccgggcaggggcggtgggcgccggcctcgtctcggtgctgctcggtcaggctgtcccggcgcggcggccgcgggaggccctgccgtccttcacccctggaggcgggctggggggcgggtgcggggcgcttcccctcctcagggccctcaaaccgcaagggggtttccgcttcccagtcgatggtcgtcctctcccatccccggctgcatctccatttacccgtcgcccatttcctttgcccatccaggctccttggctccactggggtctccgttcccttctcccggtcccccctccaggtcgcggctcctttgtccaggactacgcaggggcttgaccccagggcgctggtttaggccggatctggggtcccttgtcactcccaggcttcttccacttccgaattctggagaaccgggaatcaagccctgcgcgttcctcttcttcctccttcgtgccgaaagcacgcttcatgtctgccagggcatcagttctgaaagtgagcggagaacaaggagtttctttttcttccccagaagttgccttttgtaaggactatgtctgcgccagggcttgatacatgttgctactcctgggagtgtgagactgggaagctgatggaaatgtcagcattagctttaatggtgaggccaaagggaggatggacccagcatcaagcctgggtagaggagaacgggagagggaggaccagaaccaggggccgcctgttcactgccttgaggtgtctgaatcctgcctttgctgtttgtgagctctagcactatgggtaagttggttaactttttgagcctcagtttcctgttctgtcaagtgggaatacaacttcctagctcacagagttgtggtgaggattatgaactattatgcatctacagtgtcctcctggcaagtgaaaaggctcagtaaagggtaactgttatcatggtccagtctaaacttccgtgctagcccttcaccaaattgatcttacagaaatcaaaaggttcctgcttttcccaccttgtttggaattagaaaaaacttcccctgcactattagtgttttataggcctcttctctccaagacagaaaggaggagagggtaacggggcttattttcttctcccaggactcttgaagaaggattcaggatgtggctgtgccgctggggataaacggtgtaacactggggcaggtcagtttccttgttggtacgatgggactcttacacaggccccttcctttccagcaccagatactgctacaccatctcatcggcatggacctatatgtggcagcaagtccatctcatcgcttttggtgaaagtcagtccagtttgtaaagattctcattgtgagtatggctaaaccatccctttgactaaaaaccaaaccagatactcctttacctatcaatacctcctgctgctaaaaagcagcagctaaaaagcagcaggaggtattgataagggaagtcctatctaaattcctggtttagagaatgactatcctcattttatgagttaaacattacccccaattaacacctctgaaaaaccctcccaacatgtttatctcattaatatcacggggttggcaggtcactgtagacgaggaactgggacaccaaaaggagaaactctggccacacttgcaccctgttcccaatcctggtccagtgtcacccacagatggtaaggagctctagagacctcaccagcccctgggattggtcacctcactcttctatggacagagattcctgctgggatcctttgagggcaagcagacccttcttccagctcggactgtgaactccactgcagccgtaaggactgtctgtgacagtgagcccgagatgactgggctctgtgctccctcccggccctccaatccttggcctgmcacagagaactgagctcttttattagcaccatgaatgtgactgatacagctagccattcccttgtgcgaatgactcagtttattaatgctctgctaaagatggcttctttgcttgccagcagccttaaacagtatttcattaaaactggcttaattattttgagaagacggcccaattaaaagctatacactccctctatgtgagtgtttatacatagagctgtatatataatacatatttgtaagtgtgtrtatatatatrtgtgtatgtatgtgtctataaatatataggcttagcaatttcattacatgggataaattgttggaaaaaatacccaggagctggtcccctttctgttgctagattcagagtagaggccacccctccactctgggagaggctggtgttggtgatctctcaatgactctgcaatggaagtcccaactgcacagagccctgccccagtttcaggagccagcagcctcgggagaggcggatcctgacctctgctctgctcttgggatagcctttcccttcccagcagggttgagatacttgggccgggaaatgttgtggcaaagtgtttgccaaagctcaggagagacacagacttggggcttttgtttcttgagctggctgtctagctttcctaatgagcaaatatgttctctttaaggaaacaaacaaacaaagcaaaaacaccaattcatctggattttattcatttgttttaaatacaaacaaacaaaaggagagtggttatttctgcaccaactatttcaaatgcaagttactccatcgctcggggtggttggatggtgcttgtcaccataggacccacagggctagttccaactgttattcggtaaggcttttttctttccaaaattcccagtgttcctttaaggcccatttagctgcgggttttgtttattctcccggcaatcagcatttaaaataagacaaacaagcattttttcctgggctgtgaatccccccggccagcctccacctgcacacctgaagccagcatgtccaatcaaatttctctgtaacccatatcccctttagagacttgcccccgtcgtataccaggctggaaatagagaacttaagcagggcaaatgtaattttaagaattgctaatgatgctagaaatctgcaatgcaattagcgtcattggatttggcgctcctccgaaggcacaaaactccttgtcatagcgcagtggcagcagcggcaagtgcctccgcatgtgccgggctgtccgggtatgctggcagccgctttgcactgagatgtgagcagttggttaggcttcctctctttctttctcacagatactgacttctttgtctcttttctgggttgcagagggatgggtattttccattgattattactttagcatttgaccctccagtggagtcaccctgttttttttttagaaaactgagactctcactttgtgaattcactgtgctctctgggatttcagtgctgtagttcaaccaccaayccccctgtcctgaactccagtacttctgatgctattaattggttcctcaacaattgtggccttttccatcattgcccaccatagtatatactttttctttctctctcttttttctaatttccttgtcttcttcactctccatggagccagaggtagtatgaagagttaaaaataggaatataaagaaagccagagggacagagggagtgagaaagaaaaattttaaaaagggaggaaatgaattattggattaaaaataaacttttacttttttgcagaaaaattatttttgctctctgggaaaataacatgggccaggcataaaaagcatgtcagctggctaaaagattgcaaaatccagaagatgatctcgatgtgtctgttcaatttagcaagggtatctactagkggatcctcttttaaatatggaggcccaaatcagaagcttgtagaggggagctattcttccaagattccagatgtgtctgtgagacaacacgttatggggcaaattgatttcacccttgggaaaccagggagattttcaaagttatgtctgcaaagccagctaatgcaattccccattagtgcattaaagtgcgcccttattaattcaaacataaaggcaacaaaataagcttttaaatttaaaatataatacatatataatgagcatgtgtgaaagccttattcaaatgaaaatacaggagtgtttgaactactgaggtatcttttgtattgaattatgagcatatgtaatagatttaattattaatttccccattgttctatgcacacagacagggttcaaggcacagtcattctctggctttcatagatctaatttgtataattattgcctgaataaaaaattgctccaattcctagctctctttctttctttcccccttctaaatactatttcaatgctgcattccaaaaggggaacacctgccacttcttcaaagtcagctgatcatttggaatgatggacggcgctgctgccgatgacgtcccctttcaagtctctttgtctaagtgaattatcgtgcatccttttaattttattgaacaaattacatttgtcaaggtctatctttgtaaataaatgataactagagacacatggatgcgtatttctgctgttcaagggctcttgttccatttctggaagccagatgaacatggaacaaaggagaaactttcctctaaaagcaattatctttctgcattcccatcagtataattatattgcagggaattttaagaagctgtagaagtagaattgaatgcttaaaactgtgtttgctgaattgctatgcaaaagttgaacaggctgtattgcatcacacaaaatagtctaactctctcctggccacatttctgtaagtttagaatgtgcctgaagggtggagatggtgtgggggaggcggtggggatggggatgaggtagatcgcatttagggtttcctgtgtttcttgaatggaatatttaatgacatttctgaaacctgagggctgttagcaaggtgactgggaatgtgtctaataaagccacccattccagtctagttggaaagcttctgatttgcagattgctctctgtctgaaacagtcctgctagtttactaactaatccatgaatggtggtgggatgaagaggggaccgttcatgaaatgatggcagcagcaattacactgctcccaaaacaagccagcagctggcttacagagatactgaatgtggtttgtgtggctactgtgtcaatactgcgcatcaaccaggatcattcctttctcattggctcccccacaatttagtgaagtaaactgttgctgtgaggtaaattgtattgtctgatcactgacagctcaataacctcattcctgccccttcccaatttttaacaaactccctgatgaacattcaggaggaaaataaagcaccagtgaaaagtggcaacagagaatgccataatcatgggttagtttagtatggctggtaggttttgagttactggacaattgatgggataatattatagtctagagatcttgaagaaaggaaacctacaagaaggatgaccttggatcctctcagagaagtgaagggtgaatcaggagcctggcgataactcccagttcacagagactgcatggaacagcgggatgagcatgggcttgggttgggatggagacaacccctggcccctgcattcagtgtctgcagtggtaagatgagggatctggaccagatgattgaatagcctatctttagattccgggtctaaggtcatgaaacccattgtatggggcattgatcaccataggaaagtgggggaggcaaggtccatgtactaggattgcattgttaaagctttatgaatgtgttgaaggggaaaaatgattttttctcataagaaaaatgagtccagtgcttttgatctctaatttctgtggctgaggtttggtgataagcaagaatggaaacccatgggatcattgcaggtgacatgatcagaaagtggtaggcccataaartaggtttaaaatggtgccttggccatcttggtgattgaaaagcctcctctctcaggagaaagtggccagtgggactgatttgtttgattcagatcatctcactaagcaggcaatgaagggaattgcagagaactagcatgtccagcttagagttgaattcagtgctccctgaaagtgtcagaccctctgctggagctaggaataggtcatatggtccctgtcatcaggatcaygttgcatacatatgaccgtgaagccaggtaggaacatctgtgattctaggacacagtgatcggggccatgacacagttctcctgggagggagcctggtgggggctgaggtagtcagggaaggccatggaaggaagtgaggcttgagtagacacagtcagataaaggtaggggtagacaatggtaacagagggaagaatacgtgacgagcagtgacgtaaagcagcaagacatgttcaaaaagctgctaatgcttcaagatggccaaggcggagggtgagtgtgggtgagcagaaggggatggggctgaggaaatcagcaagtgccagacatgggggcctagccaggaggctcgaactttctgctctgagttagaggaaaggggaaagcactgaaggagtgtcacaggtaagcagtgtgtcagggtcagaatttagaagggtcatgtttacagctaggactggatcctggggtccctgtgcaaaatgaaaatgtggggccatttattcaaaaaccaggaaaaaaggtgctgttaaaggcattagaatacagagcgtttcccttcattctgcagcctctcaatctgtcgtggcatttttgtatcctctttaatgtcacatccctctggtcctcatggcaggacacttgtgggacaagtacagactttcacgggagctggagccctccctaacacttgggacacatgtggtccactggcagctggctcctcctctccatagccatgggactgatgtgtcatgcttcagctaggggtaggaagatgcagccaggtgtctctccttccgggaggcctggtgctgtcacccttggcaagcaggtaaccctcaagggtattgcaacttccctgtcaagatgtactgggcatcttggttaaggttgagcctgaggcttcctgtaccaagttgcctgctaagtgcatggtagcgctgacagcctggggtgargatggccactgccacaccccttgcaagatactgtgaagcacgctcaccaaccctgcccctctccaccctgcgcccaaccctccactgaagtggagtggacagtgtcactgggacaggttgtgggggaggttgggcagggcccaaggtgccaggggcagtgaaatgggtagccgagtacctgtcctgggaggcagggaggtggtaagagatgctgcacatgagagccaagaccctaagcccccggcccatgttcatgtgccatggacttcacttccaaaatggtaaatcattaagaatttcaagatggcaaccagagagcatgtgccctcaagcatgggcccttctgagcatggatccctgtgctttgtgactacaggaatcactcacccttcatgaagcccattggcagcaaggcaactgtagcagagctaggcttaaggcagggaactcaccaggaaggggctggagctatctggtaatgagtgctgagaaccacagtgaagatactggtggtgagaatggagaggaagcaatggagggagatattaggaggtagaagctgtaggattaagaggcaaacaggacgtagcaggggtgagtgaggccgtgggatacagggtcacttacagggttctcatatgggtaactggtactttatgaaatacttttacataattttatcacttttacataaattttatcacttaatctgcaaaacatattattgttacttccatcttattggggggaaatagctgaaataastgaggtaattcactcaaactcctctggtcagaagacttgggatcagcccaaggcatttgattttgatggcacattcaatctaccatgactcctctgctgctctggatgagtctgccttgtttgtttgttcattcatttatttattcattgcttcactcagcaagtacttatgaggggagcacaaggtgctgggcattcgtctaggtgctgaacaagccaggcaagscttccgctctcatggagtgcacattctagcagggcccaggtgccagatttaatcagaagtttcgctcgggctttaagggccagtggaagcaattatttatttatattttctgtttcttgtcccagtttctaatgaattagagtttgattagcttcaacagagcgctatgactagagggagaataataaagtgtcctttcatccacccctatccaaaagctgtgtgtaattagaggaatcaaaccctgtactcttcatctccacctgggttggcagaggtcagtttattctgtagatatgtaattatgttgttttgctctttcatttaaaaaatatattatctctttcaatgaatcttataaatctcaggctaggagactggatacccctgataaagaataaatttctaggtgttacattgttgtcgtgccaacagcaatggttctgaatgctgatcagatgactcaactgtacaggtcagaaaggcattcactggcaactcagcccctcccaatggcttacaccatagaagaccatcagtaatgcatgtgttgaatggtgttaggatgaaccagttttcttccttggtgcacagccccagggaactagaatggctgccagatggctccgggtgctagggcatgagcattcattgtgtgaaggaagtgtggagactgaaatccttttaaagacaatgtttcacttgataggaaacaacattacaataagactaatcaagaccactgagttagtagtcatggagaactaaaatcattattcttgcagcacaaattcctggacctgatgatacctctgtggcctgtcatgtgtcagagagtctgcaggaatgtaacatgaaaacctgtaataccagaggtgtagagcacactccagtctattcactctggaatgcctggggatggcccttggcttctgagctgatggccaagagagggtggaagaataagtggaggagttggtcttagaaggtctgctctacagtaggcctggggagagtggtggatcaagaggaagattcaaaccaagtgcattgagggatctgaagaccatacccataccaatcagtactcccctggaccagcgtcatcatcctgggccccatgtggctgcccatcgcatacaggaggcctaattgtatgtctgctgtgtgtggcatgactccttcgaatggcgttccttttcccaccccgtggcattgctctgctctcgcagtctctctccatagtaacagaagcttccactgagttaacacctcaacctattaagcttaagtgcttttcaaaacattttattattggctgagtgtttgtgaagcagtttaccttggactccgactggcttcaagaggtttgagcctgtcttgtattccagggaagcgtcattgcaaacccagcacccagctttccaccctttctttacctctctcaccaaatggtgtgaggccattcatgggaaggccacgatgaattttgatttcagtcgttgtatcattacttagctaatttaaagatggatatcggcccttaaaattaaaaattgtatgttacatggaaggactccacccacccagggtcaggcaatgagtatatgattagacaaatgagggagtggtgctttccatgttcctctgttgagtgaggatcccagtggaccatgtcctgggtcctttctgggacacttcctggtgtcaagttccctaacttctgtgggctgccaggcacaagtgtcagcattcatgttgcaatcctgatgccatagtgtggctacttcaaggagatagtattcataatattgacctcttcttaaaattatttaaataggcaccccagtgcttcaggtaagmgccatgaatcttgagcaaatttgactcatgaggtaacttcagagaaccattttagctggtatgtgtgtgtaaggtggggcaggggtagggttgggtattaaacatcaaaaggtcatgctatgtaatacatgcaatatataaagtactgattcaatagaactatggcaggtgctgttgtaattcttttttctgcattatgcagaatttgcaatataaaaattaatgcatgttataaacttaaggtagcttcagcaaataggataaagaactccatgataacaaatcacagtgtatattcaccgctggtgagataaattccattcatgaggagattttgatttcaaccccttataagagaattgtaagatagtggcagcatctaatcttgaggtaggtagatagtggtgagatggctactcatgaataattttaaaatcaatcatctgtggctaaatgtagtgatttcaaatcrcttcacagctttgggctgtggaggggaaaagccattgtggtgaaatagagtaagaaacaggagatgtaaagctttcctcatttcttgcttcaattcgatccctgttctttaattgctctgggacttaagattccttttcctgaagctacagtgtgttctacatcttctcagagctgggtcctgccgccctcctcacacagcgggtgaagctgctcccctgcttccagctgctggtggctcagcaacttgggggaagcccagtttgctacctttctggacatcctaggggacctgcagttcagccacagcgaggcccagggaggggacagctggtgtcctggcagctgggcttctgcactgcccatgactttgaagacacagcatcagagaacaggtttctggagggtccttgaactaaaatgtgatgagaaaatctgtgtcaggagaagatggcaaggagggaagagtggtcttctggycacagcaggactcggggtggtgctgggccacagatgtgtgcccacctcaytggagtgcagggcttgtggtgggagctggtgggcatagcagcatttacactgtacaaagtagacactcttctgcaaaccttcctcccataactccctgccctcaagtgtggcctaaactgcatgaacctaaaacattccaacagtatattgatgacagctaaactgtcataacacaacaacatggttatattgaatgctgccttttagccatccatgatgtctctgtattggtgacaaaatattttcctacaaccacacatctgttttcactctcaggtctttgtatcatatccttattcacaattcaggatgatgatgacgatgatggtgatggtgatgataataatagtagctaacactatgtaatattaggcactacgcacatttcatctgttaactcatttaatctccataagacccacctgaggtagrtactttattatttctattgaagtaacataaggtcacattttggtaagtggtagaaccaggtttcaaatccacgcactctggctttgctctctgtgctcttaaccactttgcaatggtgcctctcatttcctctattcttaagtaaagaggagagcaactcagaacaattacctacagtattcaaaggttagaaaattttctgttagttacaaagtatcagcaaccaatccacatagcccagggaattagctttgcatttttgcattcttgcatgggtgcattcagaaatttattgattaccacctgccagaccaccatgctgggagtaagaccaaggcagacatgctccctgacctcatagagcttccactcattctggaaagttaacaaattaaataggcatcacggtgatgtgtgatgaggattatgctagatgaaagtatagaataacaacagctaatatttactgagcattttgctatgtattgtgtgatggttaatattaggtgtcaactttactggattgagggatgcctagatagctggtaaagtcttggttctgggtgtgtctgtgagggtgttgccagaggagattgacagttgagtcagtggactgggagaggaagacccaccctcgtgggtgggcaccatgcaatcggctgccagcccagctggaacaaagcaggaggaagaaggataagctggcttgctgaggcttctggcattcctcttyctcttgtgctggatgcatctgtctgttcctcctgcccttggacatcagactccaggttcttcagcctttggactcttggacatacactagtggtttttcgagggttctcrggccttcgaccacagactgacgtctgcactgtcggcttccccacttttgaggcttttggtctcagactgagccattactggcttcttcttcctctgcttgcaggcagcctatcatgggactttgccttgtgaccgtgtgagctaattctcctcaataagctccctttcatatatacatgtatcctattagttgtgtccctctggagaaccctaacacatattgctaggcactattctcagtgcttttagtggactcattcatttaatcctgatagctaccccatgaggtaggtactattttattcccattttacagatgaagaaatggaggcacatcagggttatagaaatgctgagtgacacagctatttaacrgtggagccagcagaacacatcggggagggttagctttgcctgggagtttgggagtccagtttcaatcaattggtgagcagtactcatggagacaatgaaaaatgggaggtccttcattcagttggtgcctttgttcattcaaaagcatttattagtaggcatctttgatgtgcamagatcaagggagtgggtggtggttggtggtagatggctatagagttgggtaacatagggtgtttacatttgagacataattcagtaggcaatactgtattaagtatttaagggtataaaaataaagaattgctccttagtctcaaattgatatattttaaatatatatataaaattataaaatgataaaattatgcaaatatattcatcacctcacatacttatcatttctttgtggtaagaacatttaaaattcaaacttttagtaatttagaaatatacaatacgttcttattaactatagccaccttgctgtgcaatggaacaccagaacttgtttctcttgtctgactaaaactttggactctttggccaacatctctccattacccactccctcctccccagcctctggtaaccaccagtttactctctacttttcggagttcagattccacatataaatgaaatcatgcagtatttgcctctctgtgcctggtttattttacttctcaatttaatattctctagatttatccactttgtcacaaatgacagaatttcattcttttttaaggctgaatagtattccattgtgtatatataccacattttaaaaaatccattcattcattgatagacacttaggttaattccaccttttggctgttgtgaatagtactgcaattaacatggcagtgcagacatctctccaacatactgattttaattcctttggatatacccagaagtgagattgctggatcacgtggtagttccattgttagttttggtacatatttarcagaggagttcaggcagatgaattggcttgtgcttgtaggtgcacacagagcttgatggagtggagagtgtggccttcagatgggagcaggctccacttctagcctgcattgtcatacctctagctgtgtaaccttgaccaagccttggacttctagaaccttagaatgaagaccctcattttacagatgaaaaaactgaagcttagaaagttgtcataagctagaggaatatttgaaaatggaccaattctgattcaaaagtccctttcagccccgagacatagaaatcttaacttgtaagtgattgttgagttttccgatactcaatgtacacattagaggctttaacaagctgtatatttgggaattcagtactaaaggaagccttcctagagtcaatgagaggaacttccaaggaagagaggaaagcagcacaggaaacaagaaggagatgctcccagcatttgggggtatcttgggtgggagcttggaagtaacatgaaggagaattgtggggccacacaaagctagacttggctggaatgaaggagggctgcaagaaatgctgtagggccagtggtagtattggggaggtttgggaaagcagaggagataaggacagaaagaatgtttccctaggttgaaaactttgtcttgtttatcaacatacccaagggacacttgcgcaagtaattgacaagaggtttctgtgctggtttcggttgctttgggaaaatggaagggaagtgtttaattacaagttcaggtggtagaggatgaggccttcaaagcctcccacatgggagcaggataattcttcctcttcctcctcatcctccttctccttcttcttctccttctcctccttcttcctcttccttttcttcttcctcttcttcttagagacaagatcttgcttggtcacccaggctagagtgtggtgacccactcatagctcactgcaacactgaactcctgggctcaagcaatccttccacctcagcctccctaatagctgagactacaggcacatgccaccacacctggctaattaaaaaaaaattttttttttgtagagatagggtcttgctctgttgcccaggctagtttcaagctactggcctcaagcgatcttcctgccactgcctcccaaagtgctagaattacaagcatgagccactgggtccagcccagaatttgtataatctacttgcacaaccagcctttcagattcacctgaagcctttatatcttcaacaagaccactctttagtttggccccattcacctgctagagttggcgggggtggggttgggggtgggggggaggtgggggaggaagaatgcagacataaaagagtttcctatttcctcttagacagtgactatatcatgggcatcatctagtaatggagagaggaaaaagaggaagaaataggagagagagagagagaaggtttgaggggaaggggaaggtacatagcacttggtagctccagttcctttgagctagatggtcccctggctgatgctgcttcgaaagccatgttgatgtcactcaagtctgtatgtgatttctttcctcattttcttcctttgccaaaaaaacaactatggctcttattccaagtatagtcaatgagcagctaccaagagggtcctagaaagcatgtttctgaagaatgtcatctcggcaacgttgttccatctgcaccagtcagggaggaatggaggcagaatgcctccaacacacactttagatctggagatattctaaggtgtaagggaaggatggtctcttctggagaactttggtttaatccctgaataccttcccccaggagtacaacatggatatttcctcagactgcsagagcattttagagtgttatttgaccagtatataagagatatttgctgtaataaaagttacactgggcttggaatctgaagactttggtctgygatctrgccatttttacttcctagctacgggtaagttgccttcttcacagcctggtaatgaagagcaaatgagaaaaatgatgacaacactttgtaaactgtaaagtggtgcaaatattacttgttattgttacctagcaatactcggggattttccttgtttggttccagtttaagtaaccagggcctgtgttaggcttggaagcttcaattacaactgaagggtgaaattaggtgataaaggctttaatataggttttgtgttgaggacctaagacaacactaagagtgaaccctgtatgagtccacaatcctgaacagttgctttgggtggtagctagcmrttccttctcaccagggattggtcatgtatttaatggcagactctcccttcccctaccttcccygcttccccacrttttcccctgggtgtcctaaaggcttggcacccttaacagtgccttctcctcccatgggctcagccacaggtatttcttaagagtctcacctcctcaggtgacttttccagcctgtcttcctggctcatcccactgccttgyctgggctsaacggctgatgctttgctccatttcagttcccactttccttctcctcccttgacttgatacttcctactcccccttgcttcccagggtcccttcccctcccatgytgatcacttgagaggagaggtaggtgactgggtttcacagccccaccttggggcaggttggaggtccttctgttggaggatgtatttggaagtgttctgaccaaggggtcttctcacgctcctcagcatttcctaaagtgcactttctgatggcgtgcgcgctccactttcactgtggctgctgttctactgttgagacacttccctatttcaccggacagtctctttgaagcttccacagttgcccattacattttgctaggaacagggagtcacttctctctggctgggaggagacctctgagtctagtcaggctccagggtccctggatgactggcttttgcctcagtggccttactcttcctatggcacactcactgtccgcctctactaacctacaccaccttcttagactgctgtttgcatcttcccaagacagagttttccctgtgaccacttgtgcctacggaygagtcttaagcctccaagtcttcccaagaaactgaccttaactcaaggatcactttgttacacaccaggctacttcaatcctctggccttgtttccattcttgatccctttgatctctgctgagccttraggcttatgatcctgtttcagggcttcagtgattccccttgctcccagctctggggactggtctgcttatcctgtctccagtccccatggttggagctgcgaagcaagagcttctgggcaagatgccactagaaagcctgtctccctaagaacaacagaccgcttttctctctagttgttctgaaacttaccccttctctctcgcagctgtgtgaaaagaagccaaatgcccattcttaatgtgtgacaactgaggctcacatgcaaactgctgttatctcagcaggagagcaatttgcaatcatttaaaatcctttcactcttcccttctcctcagtgtatggttatacacacaccagtccatatttattagtgcagatggtgagaaactcgtcattgaaagggcttagagcacagaggaaaatggatttttggcctcactctggccttataaacaagaaagcttaaatgattttaggttcctgattcttgcctcaaaagagcacagtttgcttctctccaaacacaagaggttgtaaattggtaattcatctcaaccaaaggccacatgatgagcaattgtagaagtattttttttcttgttgtgcaaaggaggaaccagacatctgagtataggttccagctggaatttgcctttcaccatttgtagcctaaaggcactgtcttggccagccctgggcttcgtgcagcttctgcctcttcacctgcatcactaacagggcgatcgctatcacaagggtagaaatcagctcagcatttccatgtgacttcttttttttttcccagctaaaaaataaatctgttctaataaaaacatttatacttttttctttattgtcagctaatcctgcccaaactcattaaatggcagtgtgtgggttatttgctgtcagtgaaattatcaaaggcatttttcagctggggcaccaggaaaacatatgcttcaatgccaactaaaacaataatgaggaaatgttatgatcagtcttgaccagatgaccctgcccattttagattagttcttaatttcagcacaagggtcatcctgtgaattcttacaataagtcactgctcaccactcacatgaaaaagatgtgacttattagaaaactcactgtactcattgcagttaatgagatgtggaaagctttgtaatttgatttgctgggccatatgctgtaaagggatactgctgatttcattcctccgtatttaatttaagctgtatgcaataccttcttcatatggctacttatataataaaaattaacttggggtataaaaaatacaccattgtggggtttatgacttggtgtggttcagtttcaagtgttttgcatggaaacatctgtaagtaatgtgtgcgggtctaattttaaatcccgccaaatattttccatttaacatttggtttaactgacaggcttgcagaggtggttttcagaattgtcggtaacagatatgtacagtattcccaaggccgtagccttttttttttttaaaggaagatagtaattcaaacttgtttttttttaaatttttttaatgtttacatttcagtagatacaaatagcagttcagaatatggctactcctgtcccttgaagacccagctgcagttaaatctattaccccctaaaaagagttaccttggttttgacttttgcttcaacatctgcgagctaggacacctgaggctgactgggaaggttgaccgtgggaacgggacccttcaggacagggtcctgcctccacagtggagagagacagggagggagagaagagggtaggactgagaaggggggcaatgtccagggaggtctgagcctccagagaggctccgagaatccacattcggactattttcctaccgtttaaaaataagtctcacctaactcttaggagaggcccaggccccctgaactatcccgatctgctcagaagctgagctgtaaaaccataaaacagamcctctcctttctctactgggtaggattgccagataaaatagaaggccccgagttaaatgtgaatttcagatagaccacaaatatgttttagtacaaacatatcccttgcaatatttgggacatacttatactaaaaatgtatttgtggtttatctgaattcaatcttaactgggcatcttgtatttttacttgctaaatccggcgactctaccgccggggtcggacgttgtttgctgactgcattctattcgtggccgcggaggccttatttcaggttgtttgattccggtggctgacaatatgaaacagcttgaacaggcaggccggtgggcagaagccataaatagccacctcgggggggcccccctggtcgctgggagcgccacgctgctctgttaataaacatgcgctcgctggagtcctcatcctggggctcgcggaagcgctgactcagcaccggggcagggaggatgcggggacccccagaaacataattaaactgtttccatgactgacttgaaaataaaattgtgtgtgggaagagaaacttgagggggaagttaaacaacaaatggagaggtgtggagtgaaacctcagggaaactgttggttttgcttcaagggaattgaattgtgaaacttgcagttgtgaaatttcactcggttgattcttgtgagaaccgaagtttgttttaattgtcaattaaagcgaatggtgcttgggtccctgggatccagggaacctcagggcggtgctcgcctctgcccggcagcgagagagggacccggtgcgggcccgatgacagggtcgaccgctgggggtcaggataagcttgcagagtggccccgccgccgtcctgaactttctcgggaggggaaggcggctgtgtacagaacagcacgccctgggaagcaaaggcctgtcggagaagttgatgaaagatgcaccttaggtgtccccgagcagggccgccggcctccccagaggtttccttggcagcccttatttgtaaggcaaatccaggcccgcgcacacgttgctcgaatgtcaggtactaaattgcctttatgagagtcgagcaggcttgccgatgacaacactctgataacaaaagaagtgtggcctcgttgaagattttatgtaaaaggaaatgattcatttgaattcagaaggagccttaaaacagggcagagacagccaaaccctagattttctgccttatgacttgtttcttaaacttgttaaagaaaaaaggggagaaaatttaaacaagaaaagctaccccaaatcgccaaccaaggtttagattttcgtgggttgctattttcttcagatcaaggttgccttcttgttaacccgagactgcagccgcagaaaattagattccccccactcagggattaaccacatagaacagttagggaatgtggaggtctggagagacttgagatcaacgagttcgaaacgtttgaaagaaaaaaatcttcagtggtttgagagcttcactaagatactttaaaaaaaaatcaaaattgctcttgtttaagagctttggagatccaaatataagtcccttttcttttgccaagaaggcccttattcattttgtgtgtctttaatgctcaaaagagatgctgggattcctagtcaattcctaaacaggagtctgacaaccaactatatgattttttttgcaaagacctttttttttccttaaagcttcaaatttctgttccttttgatgatgatatgttgaagaaggaatcagtgcctttctcagtaagtgaatgacagaaagcccttacatcttttgagtgggccagcgtttgggtggcagggctgcttggatkgggagcgatgtgacagggctcttggacaaactgctccttggcttagggatggtttattttgaacattcattcattcacttattcaaccagtgtttattaaacattcacggcctctgtgcagggctaggtgtgagggctacagtgtctaataacacagagtcgtggtcttaccctccaggagtctgcagtctgctggggaagccaacaacatgagaaggttattctgctctactggaaaaggcactgatcttgtcctctctttttcttccagaagcaagaaaaaaacccagattggtcaacacagttttataaacaagtggtactttagcaacagcaaccaaagtcctatttaattagccagtggaaggtatccatctgtgatggccaactgtttcctttttccaaggggctcatcttctcctttggtgacccaaaatgccttttactttgagccacaccctctgcctgaaatcctgcaggataaaatggggatggaggtagaaagcaagtggatcacttggtactgtctgacttgataaccagctgttgaatggcctgccatggcttcactacaagaatggggaaactgttcttttacgtctggaagaaggagaagccagaagtttatttaatcttttctaggcaacttattttattgcatttttaatttcctctcttgcattaacatgacccttttcactggcttcccacgcctggtacttaattacttatcattagcaatgtacacgggggccttgctgcatatttataaatgtgatcattagtacatggaaagacaaaggcttctttaagactgtcattagttattctgttttcatggaaatgttcattaggagaaactacccacctggttaaataattataattaagaattggtaatctcctttgcatttttaacttgatcttccgtctgtttgtgtgaagctaaacaagccttatttggcaagtattctatctttcattttcacaagaattgtcaacaaatacgtactctttgtttttaacctataggtgctgactgatttgcagcatgataaatataatttttgtaattcagcagttaatctccaaacacgttaaccagctgtggaatggtgagtcagtgaatggagttaaaggatctctggttgattttattttctggacttcagtcagtggtgcaaattggactccagtctcccagtcaaactttgcaaagggtcccctttaactcttcaaccacagagacaccacgctgggtggccactggccactgctcctttgggtgtgccaggcaagacaggtggcagttggatggcccgagtctttgtgtgtcagcatctgagtctttatgtgtttgtgactaggggtaaccacagcagtgtcatagctgtggccctgccaatggctagtcaaatagagtccacaagcactgtttgaattgctagcaaatggtcatgcggctcgtacgtggttacgtgtcagctgarctgaaacaaacgaggtgacagaaacacaataagggaagctcggttatgctgccgcccactcccctctgcccagactggttcaagccgccaccctggactgatgagaatatgccagggataaaccacaactgtgggaaatgctgggtgggggcataaatatcatctgtaaacaattaggcagccactgctcattcagtgccgttttgagaagctaaggaagtccgcaatcagttatatctccaattaccataaaaatatattagccattcattcatttattaatgattcatcagttaaccacacataatgagcaaataattagcagtgctgtacggttgccaaaattgaagaagtgttggcattttaaagatgaaaggttgaatttatgcagaagtctggtgatgataaagttaatatggaagataattataaaagtggctgtcctctattacaggctgaggtaccacaaaacttgcctaattgaactgaaattaatattcttccaaagtctgtgtgttgccacacacaaactgctgaatttctcttgaagatctcccttcagtaaggtgcaccgcacaatacaagttaataaaatgccagacagctagactgtgttctttgtttgcttggttcagggcctcgtggaaaacaataaattgcattcatgtcagctgaggcccatccctttgctaattaccgtttggtgctgaaatgacttctgtgaaattgggagcatgaggaaacatacagccatacaagggaggcttttcagagttttgcagtaaatgtgagataggcctcaggcacacagatgttaaaacagcgaattcccccacagattacactaatggaaaccctgtcagggtaagtcaaatccgggtctgtggtcaaaatctaattaaggtttctgtacttaaaaagaatatgaatgcctgggggtggcgatgaatgtataagaaactcacttgtttgtaaaattgttagcatgaatagtaagtaccgtggggctgttacctgcaatgtaacacctgttttctgaggctttgctgaatgtctcaggatgggttatttcagaggtcagcaaactaggctcaggccatggcagcctcccatctttggggcctggggcacggcatggtttgaggtcacagatgcaaatggatcccttagaagttgccctggaatcccaaaggatgctttactttgccacatgaaaaccaccccagatgatcctgcccaactgcctggcgccactgaggaaatcgttcttgccgagggtgttggactggccaaatctcccctactggggaaacaaagggttgtctgctcccggctcgccctccagcctgtcgggactgcctcctggaacagctgcagcgtgcaggcgcagccctgcttctaatagaggaaatgaatttataatgctgcagtctcttcattttcacccagcacaaatttccccttaaatacttaaaaacaacacccagagctggatataccttaaatttccaataaatgaaaccttaatccagtctgttgctgagtctgagctgttattaaagaaataaatttgaaacagcaagtggkttgagaatttttgaatttaattatttaaatctacttagggcaactctcacgcgctatttcagtttcccatggagaacatgaattctgggaaaggtatcccacgcagggccctggaaatattaactttcatgtacaactgtgggctcagccatagacagactgtgccaccctcctccccggaagagcagaagaaagaaactcagatttctttttctgtatgatccagccaagggatacaggatatatttttcaaagaacgagggaagccaagtcctcttctttcaagttctgtgggcctcttcagatgcactgtttacatggagttcgtttgaagctctttggagagcgacagttcatacagtcattcactgagcaacgttagggagcaaaaggtaaagagaaagtgtaacctgtatgatttaagtggccgacagctaatttagggtgtgctctggcctcgtgagtgtctggagcctgatttttgacatttgtgaaaatggaccatctgctgtgactgtcccaagggtgatagcaccaggcttgggctggagcacctgagacttttggtgccacttcagtcttcaggcttggagagagtctgctttcatgattagagacagatgacaccctggccttagttctgagagcgcaggataccttccagatattagcaattgagatttttaatggcatccacattgggatgtgggcggggtagaaggtgaacaatttaggcacacactcgtaagtgtctccttctccagttcaccgggactttgctatggcacaagatggctttgttttggaccctgtacaagttggttaaattaccagatacctgtgaagcatctcactagagcatgatctcaccaacacagtgagaccccaagacctgagtcagagagatgctcaatatccaatttgtttctcttttgtgctagccatttgatagtagttgggacctcagagccgccaagtggaactttcccacacccaacccagactaccaagaggatattgacttggagtgatttctagatccagagttctatttttccttccaacataaaaatcttcatagaagccaaaaatctttaagaaaagagcagctcttagtgtggggcccgtctcagcctctaccttgtacccagtaaatgcaaagggctgtggaaattgcacacaattcacagtgttcagaggatgagtgaatgttttaccatctcaaagaggagattatggggttccacaggaaataaggtccagtggctagcaatgcctcagaagtcaagagttttggggtttatgttttttaataatggtagcaaagacttataggtaatgctgggtatttaatttaaaaaatctataaatatttatggaataaaacttctttccaggtgcagttttgggctytaagacttcagagagaaaaagtcatggttcctgctcttgggaggctctcattgtgtctgggggagcaggcaggcacccaacagcctgaatcaaactccatgtagccaaatttctacatcattacaatgcttagcatgtaggaacccaataaatgtttgttgaatgaatggatctgttaaaaagggagtgtcacgctttctctctttctaaggagttattgtgtgaattagagggttaacatttataacaccttttatgcccctacatgctatataagtacaagttattaaatatcataataaactagggtcctaggcagtcaattacattttcttctgaagttagtgacatttagattcttttgttgggcagatggtgtaatattgcacctgttggaagagtaggcattttgggaagggaccttaattcagaactatttataatatagcaaagctctggcttcttaataaatgtatttgtattgtttctcaaggaggtaacatagctgaacagtccgactctttgaattggaacttctgaaattggaagaccattatttcttaaaactctatttactctacattttctcttcactttcttcacttctgattttcttttgcactctctggattggcttttaatacccaatttgtttccagccttctctctcctccacatgtctctctgctcctcattcctctctcttcgctgtctccctccatcttccttcctttccctctcctgccaagacattccatttctctggaatgcccctcaagccactttcgagtccaactaaactatggtctgttgggaagtccagagctgctgtttctgcttggatgtctaagctttccataatccacccacctcctagtctacttctgggcaagaaacactgcagcggccaggccgacttcatcattgctctgcaaataccatgtttgttgggcctttgctcttgttaatatctcatctggaagctgtcttcttctgttacacctttctaaagtccatgtatcaattgactgtctgctctttgaaattgctcttatttacttccttgatctttacctcttctaagctcccagtgcccacagtttagcaaccccttttgttgcatctcataatttagtagcttctcatataggccccaggcttcttctatctagaagctacagtgttccttattatgtgccaggctctgattaaggtgcattgcattattatttcatttaatctccatgacaaccctatgaggtagacatttttgtcatttccattttacagatcaggaaactaaggcccagagaatatgactgacttgcccaaggtcataaagttagtaagagctagagctaggttctatggaagtcactatttgctaccacccagatcccccttcaggattgaagccttactcctccagctgctgagagtaccatcggctgacagccctcagctgtctccctctctgctcattgccctctatgtaagtgagcctcttcactcaaggtaacaacccctttcctgggttagcctgtgtccaaaatcttatattgcagggctataaaggtctctccacttcaccacaacttcagaaaactcctaagtgcaaatcagcttctgagctctctgtgaggttaactgatgccttctttgtgactgtatcacagcccaacttctcccttgacccagtcctgtttctttccctgtgctttcacttctatgaatggtgatttccaagggcaggcactgataaactttctatgcaaatccctgattcaaagtctgcttctcaaggaacccagcctaaacagttggtacaaggagtggtccgagaaaggcaatgctaagatgggattctggagctagatcacctgctggctactgatagtgaggacctcatctctgggagcgggagtgggtggagcagagtagatcctggcacagggttgcagtgatgatgtggaatggtatgctggtgaaaggggatgcactagtaggtgaatgtrccaggcactggagaaatacggggaaatagtaatgataagagcaatgacaacggttggatattactggaggcaattaatgcattggataagaaggcaattcataagcaattagtatgtaaaccacagggcgtcactactggatatcaagtaagtctcatatcctgtagttagaagccagaaaaagttgatatcagggctaggacttaaacataagattgagagaattcctgggaaggttgaattctcaacctaggcatgtgcgctgtgccaggcaaggttctgattgggaaagaacaagcccttgagatattagatggtgacatctgacttgatgcacttaaatatcttgagtytccagattcccttaaactctctgggcctgcagaagtggcctactcctgtctgctaaaggctagcattactcctctcttgcttgaagaatatgcaggggcctctgccttagaagacaaatgtgtccttcccactttaagatctgcccccacggtccctttcttggcagccagactaataaatagggttaaatcacagcattgcctggctggggaagtgctgggcccactagcaaaggaaaggtactgcaggaactgcaggatgtagctaacaggcactggcagaatatcaaacattatttaaggactgggttctgagagtactggatcaaggtagatggaatgtaaagttatataagggaaaatttatcaatatgggatcactctcttgggctacaggatttagcatctggcaaagatcctgggatcctgctaatgtactgctaggatggctctcagaagcttggagaaagtaagagctcacataaaaggaagtagaaatgaattactgtgacagttggtgggagaaaggacaaaaaagctcagagaaatgggcatggcaggatgggccagaaaacccaccaaatgactatgttcagtgagagggttcaaagcagaggttacacacattttgaaaagcaactcttggcatgctttgtgactgtacctgttagtcatccaatggtgatgaagccagaactgcccatcatgaacytcttactgtcagaccaaatacattataaggttggtgggtgaccagaagtaattcttataagatgaaaagggtacatttgggactggacacgagcagggccagaggtcagcagtaagttgcaggatccagtggctcagactgccaagttttcatccaccaccatcacgttacctctgcctcagtgcacacctgtggccacatgggggtcccttatggccagctgatggaacatgtgaaaggttgagcttggttcatgagaaggttggcttggtatgtgggtacaagctgaaaatgaactgctgctgcactttagccctactcagggtgaccttgaagtcactaattagtagaaatcatcccaatgggcatagctttaagtggtgtacctgctcatccactttgtgtggaaagagaatatgtctaagctcatgggcagtggaaaatggcttagtcaaatggtcagaggactggaaggaaaaagacaaggggatttggggaacgggtacacatacaggagtgggcatgaagtgtgaagagttttgtatcacatgttaactaacacccaccagaaagtattcaacacaaagatagaatgaccaggccagttgacgtaagccagcctctgccatgggtcacagcagtgctggcacaatgggtgcataagcggagtagccagagtggtagggttggaggtgatatatgggtccacggcatggctcatactcaccaaattaatatagctcttgctgctgctcaatctctgattgtcagcagcagagaacaattaccaacatgatactatcttttgaggtcaaaaagaagccacttggtggcaaattagctacayggctagaaggagcaccgattcattttaacttgaaaaaatgatatttcacaatgggattgcctttccctgctgcagagcctcagcctgcgccaccatctaagagcttagagtatttgatatrtcaatagggatcccacatcacattgtatcataccacaggactcactttatggcaaagggggtgcaccggaagaaatacagccaatggtcctatctcatatagcaccacatagaagaatctggtctgctggagtgaatggcctgttgaaggcacagtggagggaccagcttgaagatggtatctgcgaggatcaggcactattctccaggatgcagtgtacactttaaatcaatgaccattacctggagctgttcgccaataggcggaacacatgagttcaggaaccaaggagtgaaagtcactgtggctctgcttaccatcactcctggtaacacacttggggaatttatactttcctttcctacaattctaggttttgcaggcttagaggtcttggcttccaaagggagaaagcttccaccaggggacacagaagggtcccattgaactctaagctatggttactggtggggcacttcagattccatgtgctgaggaaccaccctcttagcagcactatttgatcctgatcaagaagaggagggctactcttacacaatggaagcaggaagacctatttttaccacccaggtgagccatttggatgttctctttggatggtcccttgcccagttttgaaggtaaatggacaaatgctgcaaccatggcctgagaagaggctgagaggctcagatccctcaaggatgagggtctgggtcactccaccagttaaggcacacagacaaaagagatgccagctgagggtgaagagaatctaaaatttttattagaagagagagacaatgatatctattgcaatattgagaccagcagatgtagtytgccccagccacagtagtaggggctgtgtctgcacagctggagctggtggggatayatattgctactcttagtgactcaagttccttaccttccagtctacacaatgatttggttcaaaaataggcctcccatttctgatataccacattagatgtgttggatggtagttaccatttttccacagccttttcatattgtttgaagacgatttttcatccagtgaacatttattaagcatctactgtgtgacaggctttgtgcttggtacagggaatatgaaaatgacagagagaaataagaaatagcccttgcccttaagggccttgcggtcaagtggagcaaaagataattaactactgtaaacattatggtgaatgcagtggtagagctgagcatagaggagtgatgccttatgtagttggagaaggatggtaaaggcaagtttctaggaggagttgatacctgagcttagccttgcggaataaaaaaagagctcaagatatggcaggagaatattctaggcagagcaaaggtacacgatgaaaaatggcatggatgagtgtttctgtagcatagaggacaaggtcagagatactgaagggtcagataatgaaggctcttatagcccatgctaatgagcataaacttcactgtgtggatgatgtggagccattgacagatgttcagtggggagtgtggttctcgagtgtccttcagtctattttcttcagcttcctgcttgcagtcacctctgcttgagtgtcttttagtcattgtctgtggcatcttacaaaagccctacctgaagcatgtggggatgacgtgtttacactaacagcaaatctcagttctggcagatagcaagcaaatctggctgctgaaaagacatccttaaggtcactacctattggtagggtcttcagcatcagagttgctgatgccttttcagcttttctatattgctgaaaattgccccttttcccgcaagttatttaaaatggcagtgctcaaaggcacagcaggggaagttggtgattgattatgggcccagagctcccaaagaacactggttttttgacatcgtcatccagaagttcctgcactttgatagtgctctgaaaggcctcatgttggcgtgagctactttgctaagtcattaacattcactgatgatagttctgaagacagagactccatacaagatcgtcacatcatcctagccacaaaacctgagatgtcagcatcccaagggagcttaaagcaggcaatgaactctgatgatcagacaatatgttatctagtgatgacctgaggggcatggaaggaaaaacagtcaggaaagaccattatgtattaggagacaaggagacttggtagctatttccgcaataagctcctgaccaagttaaaggtcaacattgaatcgcagggtgaatccagtattccctgtagatgaacttaaatatgaggtagaaacctttggtttcttggttgttttctttgctaataaccatacagaacacatattggttggttagaataatcgacaatgaatttgagaactacagccagtctactgggatagaaaccatgtttgtttgcagaaatgtgatatttttgaaaaattataatgtcagcaggatgtcctacttgggcaactgttctaaattagagatccataaaaatctctaaaaacggaaccatttgtatcctgggttagtacttggtcttccctcatttcccatctagtccacatagacataaatgccagatgttgttccagcatagcccaaggtgtcaacctacatactgcacacagagactcagagtgaggctttgctactgaaaatcaagtttgaaaccagacatcataattgatgatacagagtgccctttagaaatttgataaaagcttaatgtagcaaagactgtataagacaacaacraaaggtgaatgctacaaccaaaattgtggggccagccttttgtgagtagtttttgtgagcaaaacacctggtatagattgaatgtgggaaaagcttttaaaagttttttttaaacctattaaagcaactgttaaatttaatttaaatgttttagatctgcataaaatggtcatatttccaaatggatggaagaactgaggattgatagtyctctaggagtttctagttttctaaccatgtctctttcccctccttcaatcaattgctcctcyccttccttctcctgtcgctaaagctcctttcagtcgctagtaagttgaattctttaagcccagtatagttttcatcctgtttccattagaagcccagaggttcccacagtgtttcacttggttgctctgcctagaagagactgaagtatagacatcaactgccattgattcttgttgagctgggctgaaagattgactgaaagggaagtgagtgatgcttggttcccaaaagacaatagagagagtaaaagaagcaagctttcttggtggagagaaggactgtttcaaggaagtgataacattggatccaaatggactttctagccctaaatttgatgtgtcagtttcatccatttttgagtcattgaaaccgagataaagatgtgaagtttctagacccaattgttattaactttaggacctgggtttccctacctgaagcatggagggatgatacaatgatctccaagtttcctttcaacttgaaaattttatgaaaaagaatcacatatggccccccggctggttatattgctactgttatgttttctttaaaccaagtctcaaatccattcaatatgaggtagattagtaatgggaaccagaaactcgggagaggccaccctcatatacagggaatttactgtcttgcgctttgtgtttgtgtttatttttacagactccttggtgacggtcgattctagggaagtaacattgatataaatccaagtggagggagaagttttctccttcatgtccccttcccaaacaacctagcttagttcatcagcttctgttgacattatttataaatgctaatgaactcataagtgctaattaataactccatgtgctgctatttactagcaaatataggaatccaggtgcagtatagacctgtccccaaatacagtacatttcttcatctctgagccaagtagcatgtctgggatgactctgttccaatactgccgaagtcagtgccatacacacttaaaaaatacacccaggagctacacttaaactctcacaacagcatcatcttcttattacccacttagataagaaaccagggtcaagtccagctgtattagtcagrgttctccagagaaacagaaccaataggatatatatatatagctctatagaatgagatttgttatgaggctgagaagtcccgcaatctgctgtctgcaagctggaggcacaagaaagctggtggtgcagttccattccaaacccaaaagcctgaaaacygggggagccaatgatgtaagtcctggttcaagtctgaaggcctaaacaccaggagttccaatgtccaagctcaggagaatgtggatgtcacagctcawgcagaacaagggaattcaccattctgyctttttgttcgatctgatcacccaacagattgaatgatgtgcccacctgtgttggtaaggtggtgagggagtgagggagatttttgttttgttttgttttgtttttttcagacagggtctggctctgttgcccaggctggagtgcartagtgcagtcwcagctcactgcagccctgaacccctgggctcaaagaatcgtcccaccacagcttcccaagtagttgggactaccaacgtctgccactacgctcaagcaaatttattttattttctgtagacatggggtctttgtatattgctcaggctcgtcttaaacttctggcctcaagcaatcttccccccttggcctcctaaaatgctgggattataggcatgagccaccaccctcaacctgggagcacttctttactcagcctaccaatttaaatgctatgctcttccagaaacacacagataagcccagagataatgttttcccagccatctgggcatcccttaggccaatcaagttgacacatttggttaaccatcacaccagcaaatggcaagattaggttggactcccgatcttgagaatggratgctccaagtcagtgaactcaccccagcctgatctggagcatatcaaggcattgtctccttgctacagagtgggacaggaatcccataggggcagtatggaatgctctgcaaggttggactaaagaaggtctgtggggctttaaggggcactggatgccagtgcctttgctctcttatgggtgtagctgcgtctgtctcctccaatggctggtaatctctggaaagccaggagctcagtctgtcaggagccaagcctccctacacatgtgccatattgatattgctgatggatgtgtggacttgtggtcttctttgggagaccttgaactttcttcagcaaacaaggagatgaggccagaccttggttctagtgatcatattacctggagtttatcaaacacgtatgatgtaccacttactatgtaccaacttagcatcaaattcccaaaacagtgctattttgtagttattatttatcactgttccatttgagcattttgtaagctgagacagaaggataatgtaacttggccaaggtcatacagctggtgagtagcaaagctggggtttgaactgcctggtcaccctgaatgaagcccctgtctagcccaccgccttgggtgcagctcccagtgtgactgcagactccagcaatggaggcctktccctgcacaggtggctctgtgctgtcggcagccctgctccctgggcgtcttccttcctctctctttccaggacctgttttctctccagattgaggaattggatccaattccctttcccagctgcaatttgcctctgagcccccagaacccctcctgaattggaatcgccctttcccccagcagcgctctccagccctctcctttcctctcagggcccagctccatcccttaaaagcactgtctgggctacattttaaaagtcactgttaaataaacttaggacccaccccctcagagagagagccgtggttacaggggagcagagctgaaggcaaacacttgtatccttgtattagacccaggctggggagcagcacaagctatttcttttggatgcgcctcctaggagtggaggaacttttctttgtaaagaaagagaggatctttataaacctyggacttttttcaaggaggctttatgggtggcaaggataaagctatagaggcaggaaaaagagttgctaactatatgccagtacagcatactttttaagggtggggtgtgggaggaggtggggagcttcccctcagccgctctttccctggatgcaatgaactcatggtcctttgacacctctgccaccgctccatgggacagcctgaccccctccatctctgctcctcacactgggtggtgctggagggagagggacctgtggctgtgtctgccagtcccaaaygccagcagctgcacagtcctgctataattgctaatatctgtttcttctcctttccaggccttggaaagtgttccaggaatggactttctgcagtatgatgacctgcaaaagcagcccttccatttacatttcaaactccaagtcagccgtgtcaaagtttgaaccagractgtggaggataatgggtcagatgcaattagcagcccagagaaccacacgttgcagtctgatttatttttttgcccatcagattccaagaatcctagtgcttaaaagcaactaaacaatcgctctattgtactgaaataaagcccggttaattcagaaatcaattgcaccaccaggtggggcacactctggccccaaacagatggggttgaaaactccyctcaaaatgcagtcttgttaaattaaaaacttgatccaggagtggaacaaatagggagccatgaatggaatggagtcaggtccactcaggcggattctttcttctcccactccttttcctttaaaaaagaaaaattccccatttcactttcatcagtgttagcatctatgcagaaacgcagccatccaccctttgcagttgaatgtgttactttaattagtctgaaaattaaagggcaactccgggccaatgtgaatgattatgaaaatacatgtgcatcccatgcaatcttctcatttaattaatagtcttgtaaactatatggctcactttaagtcagtcaagaggtataacaactccattttaaatatccacttaatacttaacaggatgtgaggaacacactatagcatacggtcccttctcaagtttcactgtctgaaatttttcaaagctgacccaagtcaacctgaaaaatgtttaacaccctgggcttgaacacaagaaactctgtgatgaacagacattcaattacattttttaaaagtgagaagcatttttgtaaaatagcgactctggaaactaattggcagccgcaaaacttgtgagcaaaggccaaatcttgtggggaacttttactacagtaacacgactcaaagaaaatgtgaataaaaggcatctttgtttcccagtcaaattagctgattaagaaataaaacatcttaacatgtttttaaatgtagaattaattatttatatgagaaaaattaatgcctggttatgtgaattctactctgtgtgtgaattgaatggggcagaaagagtaatccgtgtggatccatgtcttaggtcattaagcaaaactaaatattaagagctccggttatggaaaaaaaatcacattcaggtcacatgttgtgctccccattttgattttcaaagtccagattagttatggtctacattgaaaatgtgattcagaacaaggaaactgctttgtattggctgagtactgacagttgagtggaagaagaaaacacacagctatacaaagagcacagccaactcctgggagggaacacaggccttttgctccaaaggaacctgggaaagattcacagaaagaatttgaacaggccattctttatttcctaatggttgagtttggaactcatgaaaacaagacaacctaagttatgtgtcagactcagaaaagaagtgggcaggtgacctttgacatctcaggcccccatgtctcaacccaagcccttcgttcctgacctcttaacattccaatatcctgaagccaggctctccccaaaccagggctgcaaattatctctgccatgtggataaacattcactgggtcagtgtttttcaaggtgtggtcctgggaccacctgcatcagaattgcttgctgagctttcaaaaatataggtttctgggccccaggaattactgggtcagatagcagtggggcccaggagtgtgcattttcaacaaatctcctaggattctgtgaggatgtgaaagtttgagaatcactgcccccgtgtctacttagagatcacgagagtaactttcactaagtttctttaatgggtttcctttattgaaaggcatttacaaaaatgtctattaatccctcattaaataaaaaaaggtcctccagccattttcttcatttctcatggtatctcttaacagagggagtatagaaatgctttgtcctttaaaataagttcagtgagtacttgaaaagtcatttggcaagagatgagggatgagacaaagggggaagattaatgacgaacagaatcagagtccttgctaaaataaaaatggattcacacccaacttcttctgaagggtaagacatatggcagctcgtgtgggaagcgagcgtgtttagtagagagaggtcctgctgcagagctgtgtgacgcagggtacagcttcctcagccaaaaacagaacatcacatgctatgggaagacgaatcatccctcctatgtgatgagaggctgactttctaaagaaatttgagcaaacggttgcctgaatggctttaacaagtttctcagagtcaagatgatcaggtttgggcatttagaccttagttttgctctgatttttgggtttggcctgacagcacagcattttctgtgactgtctgtggaagctgctgatggtctaaatttccgcatttataaaatggaagaactgaaaggaggaaagtgctggccactagaaattgtgggtcagagcttcagctacaaactatgggtgtactgttctatattctcttttgagatttttttttttcagttttaccaggaaaaagccaagacatacctgctaagtttttttttctttgaatagaaaagaagggcaatccatttgcacttcgtcatctgttatgtaccagcgttaaagtagcaagtgcccaatgatagacctcaggattctgtttctaggtttcattaaaagctataaacgggtatacaaaggccatttacaaatgtgcctgtgattatgcttatagtagcagtgatgagagttcagtttttgtccatggaaaattgctgcttaataagaactttccccaatccatgtctcctttgagataaaaatttccacactaaatttcatcgccctactagaatttcctttggaatgtttgtgttaaattcctttctccctgattgaagtatacaacacaaaatctagcttaaagacttgaatacactgaaaggcacagatttatagagtaacttgggaggagactggagagggggaaagcagaggagatttggggaaatgaattaaaacctcccaataattaagaaatgatttacttggcacattaagtatttggaatgcttgtatgggagggtagggtatgacttcctcatatgccatgggcaacttcagagactcagttttgctgcaagaagttttggctttgttgttgttgttatttcctgatttgctgtgtgctgttgtgaacttaattaacacactagtgattctgcaccctcagggaaaaatggtaaattttgtaaagtgtaactacagaaacaaaagggaagtcctttccgtcctgatcgtagctgtttttattccctctcttgtattatgcattcgaaaaacgtgaaagccacatgaagcttcagagagtccaaccctcagactcataaggcacaataccccaggattcctctagatcactgttctatcttatagactatcctaactgcttttgtgtgagaaaaagcagggttcataggtagcaaaagttagccctttagatgacaacggtgcattttatgtgctttttaaaaatcatattgctctcatttggaagtagcttgaacaattccattttgaatcaagctctataaatttgatcaatatcattattttcatgaggcaagtttaaaccaataaagttgtcttgctttgtccctcttccctcccacccaccctcttaaaaaaaaacaaaaaaaaaaaaactaaggagagtcacaactttgacgtgaaacttgagtgtgaagtgcgggtagggaaaagtttatgaaagatgacatttatagatgggtacatatatatttaatttcttgtatgtgagtgtgtatgtatatatatttctacttctgttcatggagaatacaacatcataattaaggacattttactttatccaatgaagagttttttcagttccctttaattggtaatttaattacagagctaatcaggaacatagtgggtgttgggactacagtaattgtctttaactggaaagtcttaccacttacaaagcaagaaagtttttaaattatggaacacttaaataatggattaataagttagtaagtacaactccatgaaggtagatcattcacatgcttgtcaattgacaaaatttttaatgcgagtctgatctattccactaagtaattatcactctgcttttccagcatactgcgggggtctatgctgaggccccagggaatttatgtgctaaactccggggctggaattcctggaccagagctggggcagaaggtggagcagctgaaagttgtttgggaggaaatacagtccaatacttagagcaaagaggatttctgttattagactctgccgctcacttattgggtcctggtgaaagctaaatgagctagatgcatataaagtacttatatgcatcagctagcccagccttctctctgcctcagtttctctccacctatgcccatttcagcagacacctataccccaggacaacagagaagcatttggaggtggttgaagatggactccggcaggggtggctttgacacatgccgggtggccctttgggccttgagtcctctggatgagagggctgaagctacgtgagaaaatccgtcccctgcaaatgggggacctgtgagatgagggccctctggggaatgagcttaacctgggagcagtggggaaactaataatccaaccagaacatagcctctgtaatttgggaagagttgtgattttaggaggacaatcatttgttctttcatcaaacatttcgcagtattcatgtgaagggctactatatccaagatgcacattaaaaacacaaaaacattgaatgtaaaattgtctctgagtagaaaatacaaggaattacctagagggccgatttccacaagtgcctggaaaaaagctagataagaacccaatcttctgggcctctttctgggaagatctcatctgaaaaaatgggatcccagaaaggccagcagtttgtaatggaaaatgctcaaggtaatcaggttcaaaggatacatttggtaaactaaaatttctcacgtcacggtgactgcagggggatggtgtgagggagacagaaagagaagaagagagataactggactaagtgaaatccacagaaaatccctaaacttgatttcagccagtagcttcactcaaacccattctcccccaaaacttggaccataattaccatctgtgagctgaatggacttgagatttgctggtttctttctgctgcatagcatggccaagaaaggcttcagtgggcctggctgggaagatgcacatacacaaagctaaggctggatcacagaccagctgttagcaacccggctccccccgccaaaatagctacttgaaaacagacagaagcttgaaagaaatgaatttttaaaagttccacccttaaagattattttttcattaaattattgaatttacatttcatcagaacttttatttattaatacatttacaaatatctatccagggtttgtgatgagtaagggtcatgtaattttaatcccgactgtcctctatgagtttctagttaaattggaaagctgctatgtgcacaaattctattacatgaaagaggataataaattccacgtgtgagcaacctgtgatatgaggcttttgagaagtcgggagagagaaagctctctttcagctggagtgatctgggaaagcttcatggaaggggaaggtgggattcaagttgggacttggagcaatctgatagagagcattgagggtagggcatttcagacaggggaaagagcttacatttgccagacacctacttttagccaaaattatgctaagtactttatatgtatctagctcatttagctttcaccaggacccaataagggag

SEQ ID NO: 95159 - DNA, 40135 bp, Homo sapiens
tgtggtggcgggcacctgtagtcccagctactcgggaggctgaggcaggagaatggcatgaacccgggaggcggagcttgcagtgagccaagatcgcgccactgcagtctggcctgggtgacagagcaagactcagtctcaaaaaaataaaaaataaataaataaaaaataaaacatagagtgggactcagcaattctacttttaggtatatacccaagagaattggaaacatatttcttttttttttttgagacagagtcttacttggttgcccaggctgaagtgcagtggcttgatcttggctcactgcaacctctgcctcccgggtgcaagcaattctcctgcctcggcctcctgagtagctggtactacaggcatgcaccaccactcccgattaatttttgtgtttttagtagagatggggtttcaccatgtaggccaggctggtcttgaactcctgacctcaagtgatcgcccgcctcggcctcccaaagttttgggattacaggtgtgagccaccgtgcccagcgggtggaaacatatttccacacaaaagcttgcacatgaatgttcacggtagcattattcatcatagccaacaagtgggaacaattcaaatgttcaacttgaggcaagataggtagtcaaggaagtgaccatgtcctcgggatgcggcaaccgtggtgaccgtacagtcaacacaataagccccagcattcgcactgtagttgagctcattcaagcaaagctatctacagtagggaatttcccctgtaaagaggatgtgcattttggccgggcgcagtggtgcagcctgtaatcccagcattttgggaggccaaagcaggaggattgcttgagcccaggagctcgagaccagcctcggcaacatggcaaaaccctgtctctacaaaaaaaaattagctgggcatggtggcgcgtgcctatagttggaaggctgaggcgggcggatcacctgagcctgggaggtcgaggctgcagtgaaccgagatcacgtcccggcactttaccctgggtgacagagcaagactctgtctcaaaaaaaaaaaaaaaaaaaaaaaaagtgcctggtacagccccttcagcccctacccccaaggctgtaaattttattttgatatttcttcctgaagccaagatctctgacttatatacaagggcctttaggccaagtgtgaggagcaagcagaaagcacctgttaatgataagactgggtagctctggtttaatttattacagagtcagctacatcagattggaggcaagtaggattcccacaggagagcaggatataagcaaatgagcctttctataactgttacataaggactgagatgatcattatcccccacagagggatgtattatagacctgaaggttttggcaaatctccagagaatgataatctatattgtaaaatgtaaagaggataccacaagcatctccaaccaaccaaattattacacttctaggaaaaattttcttagaagtgtatttattgatagcccttacatacaaacagaaatatgctaccaccccacacaggatacatgatatatattcacaataacaatctatacaaaacttccttggggtagcttcagcctctctttcccatattctgaacctggtaaataaaggaagcatgctagtgagcagctgattagaaactatggagctaatcaattgcatgcaatcgctcttctttgagtcccacgtgagggtaaagggtgaggaagcaaggctgtggtgctatctagtggctgtctaggaagtagcaaaggcggttttgtttaaaaaaggatttctgttttatcactccatatgtggagcctgatttcagagaacagcatcaaaaagtgttttccgatataaacataggtgtccaagaacaagaactggccacagctgtagctattttactaactagtctttcctcctgttaacaacatacagctttgttaacactgtctagcatttttgctgggggtaaagggctgggaactaaagtttttaatatttgatctctttaagtgtactttgaaatattctcttggttttctaggatgcccctcagcagcaatgaggaaacgtccatattgttaggctgcttctcctacctgtggtatatctggcttcgcttcctggggttcctgataccccttagatgtcccttaacctctccagtctctctccttatcaaggagagtcctgtggacccacactgctgtgtgtggcctttcatccccggccctgatttacagagaggctggacaggttagggagtgacatctactggaccacacagggcagtaacaacacagagggcagattctgtcagaggtactggagcaaacggactatccgtcacgctcagtgacgggacaggctggtgggcagcacctccttgcgggcatctgatacaaccacaggcaggcgatggcagtacatggagtggctcgctaggaactgcatctcaaaaggcttcactggactgtgcccctgaggtcagttcctgcccctggcactgggctgacacctatgtgtggcagtccttcccctggtcaaatgtggcattgcctcctaggccacaagcaggggttcttgtggacttaggcgttggccaccttactaactggagttctgttctgtggtagttatcctcaccctgcagaaatacccatatagtcatggagtggggtgagatgacgggaacaggaagtggaaatgcttgttgcctcttcccattcccagatcagctctcccagcccctagtcatggaggccactcctgcattccagttttctactaaacgtctccatttgcttgtctcatcacttcagtttcaaagcattcaagggtgaaatgtcatgttgaccaccaagtgggttatttccctacgtcaatgacactgctattgtcttgtcacccagactcagaacctggagtaatttcattgattcagcatccgcacacactctattcatcaagaaagataaatttctgaaaacaggagcaccaactgaattagcattatctgggttccaatccccttgtatgtgctttctgggtgtcttaatttattatgtaaaactccttgccattcggggctggagtcctcatcttctctgtgtgctttatgatagttccagtggtggatttatctggtcttgaaagtagacacccctcgtcctctacaacatactcttaactcactaccaagagtttcagaaatattttcatttttacatcctgggaaaacctcagccattacagtaacaccatgttcctttaaaaaaaaaaaaagaagtttgctgcaaatcaattttaaaaagaagtttgtgtttgttaactagaaatttagatgccagtgataggaggcggatctgtggaggaaagaaaacgattggaattagcccctcaacctgagcagtcgctctgtagtcatcaaaggactctgggaatggtgcaaaacaaccctagggggcagggttatctgggagaactcgggctgctgaaaattaaaggtagcataaagcaggctctctaactcaagagcttaaaacccactagggaagaaatggcataaacacaggtaccaaggtttacactttaggcagcagccaaattctaaggtgaaaaccagttgactatttgcattgtatttctaggtcatgttgtatgggaaaagaccagtcttcgaatattagaatcacattctgctcaccctaagagaggatactggaacagaacttgatcaagggaatagagggtttggggtcccatctcactctccttctcatatgtgatcagataagcaaaattactggaatatcttcctctttgcttctcttttctgttcaaaacacatgtgaatttctcaatgtctatgcatacattagacaaccttcctcagtaataccaaactacatgagaaatgggggtccctacagagtattaagggggcacatgggctaagcacggtggctcatgcctgtaatcccagcactttgggaggccaaggcaggtggatcacctgaggtcaggagttcgagaccagcctgcccaacacggcaaaaccccatctctactaaaaatacaaaaaattagccagacgtggtggcaggcgcctgtaatcacagctactcaggaggctgaggcagcagaatcgcttgcacaggggaggtggagggtgcagtgagccaagatcacaccactgcactccagcctgggtgacagagtgagactctgtctcaaaaacaaaaacaaaaacaacagcaacaacaaaaaaaaacaggggcacatggagaaagacaagaaatctaaggaggcaagagcttgaagcttcagggcgaatgtctgaacttcgtgttgaagaatggataccatttagagatgaagagatgtgggaaggcagtctaggaagggagcatgagcaaaggcacaggagcagggatgtgcagagctcataatttaggaaaaaggactggtccagggtcactgggtttaagactgtgtgatgggaaaaggtggtgagacggcagggcgcagtggctcatgcctgtaatcctagcactttggggggccaaggcaggcagatcacctgaggtcaggagttcaagaccagcctggtcaacatagtgaatcccatctctactaaaaatacaaaaattagctaggcgtagtggcgcatgtcccagctacttgggaggctgaggcaggagaatcgcctgaacctgggaagcagcggttgcagtgagccaagatcgcccgccactgccctccagcctgaaaaacagagcgagactccatctcaaaaaaaaaaaaaaaaaaaaaaaaaatggtggtgagaataagattagaacaaaattcggtttcagtctctgctcagatcctgtttcatggatgtctgactccactcaaggaggctttggggatacagaatctaagcactaacggtcctcggaggtcttctggggataaggttccctgtccatttccctaggaatcacctctatggtatccttctgtgtgcaaaggaacccacaggggaggagtaaagatggagccttcgattcaagaaagtaactgcaggcaagtaactaaggctcagtttcctcaggtgcaaaatgtgggtaattgacttgcctaatacataggatcgctgagaaggcccaacggctaggattacaagcgttggaattacaagagtcccacctctgctctgtcctttactagctgtgtggaccttatacactggtaagtccttaatttcacggagcttcagtttctcttcagtaacatatttgtaatagtatctacctcctaaggttgatctgatgattaaccagaataatgaatataaaatgcttagcaaaaacgtggcacggagtgaagtactcagcaaatattggttataatggttgaggaaatgacatgcactatatacatgaggtttcattgtctgaaaacatgcacgatttgttaccaaaagacttatcctgggccggcgcagtggctcacgcctgtaaccccagcacttggggaggccaaggcaggaggattgcttgagacctgggcaacatagtgagatactctctctacaaaaaatcagcccagcatggtgatgtgtgcctgtaccccagctactccggaggctgaggtgggaggatcccttgagcccaggagcagtgaggttgcagtaagcagagatcgcgccacagcactccagcctgcgcgacagagcaagaccctttctgaaataaataaataaataaataaataaataaataaakcgattttaaaaagaaaagaaagacttattctggaggattggctacatagtgcaaataaacagaacaaaaatctagggccgctgtagcgggcaaattcgttcaccaactccaaccagaccccgcctccaagcaggcaagccccgccctccccaggctgcacccttgtccccgccccgatgcgcctgcgcagggccggccgccggcggccgaggcgatgagggtgttggygcggcgctgttggggtcctccgctggctcatggcgccaggcgtgggaggccgagtccccagtggcgagcactggcccgactcggctgggaggactgccgggactccagagtccgcgagaagcctccctggcgggtgctcttcttcggcacggaccagttcgcccgcgaggcgctgcgggcgctgcacgccgccaggtacccgggccagggatccggggacccggccgctgaaggcctccaggccgcgcccgggcggccggccccgagggttttggacttctggttgcggaaagcatgggcggcagagcggtgtgggcccagatctcggcgtcttctggctcccagaaggtgcgccattcccgccggtcagcctttgggcgcctagtacctgcggtctgcgcccctcactccccgccgcctctgtgggttctccaggcgccctgccacccacgctgtgccgagctggggctgggcgctctgcctgcatcccccgggccagtcccacggcctccctrcccgttttgagtgtggggaatccgtggctcagagaggttaygcgattgcccaaggtcatcagccgaggtggttcggactaaaaccaggtcccacttcaaagttccctgctttgcagttcctcctgacccccatccttcggcacacccgtgtctcgctcttttgctccccctgtgctccttgtatacaaggacatagtccaaaaacgacctgttttcaaaagaataaatttataaatcagaactgttaggtatacatttagtattcataatatttaacaagttttgtttactgggaaagaaaattatttgaaatccaaccagtcctgagagtccatggtatgtggtggcaataccgtatatacttctctgcctctttttcccaattratgttttttatttccccattctgtttttttctgacgcagtcctccttccactttttttggtcatctccatctccttttccctacagatacttcacagcagcccctcatgtattgaatccttcgtcaatcccctgtgtggttttccttcctccacacacccctctgtgcacacacccggaaggaaaccccatgttccctttgcacacccttcatgggctgctgttgtcacatgcgtctctcactgcatttatacatttataccaacactttttttgtttgtttctgaggcgaggtctcgcgctgtcccccaggctggagtgcagtggccggctcatagctcactgcagcctcgacctcaaagatcaagcaatcatcccatctcagcttccagagtagctaggactacgggcgtgcaccaccacgcctgatttttaaattttttgtagaggcgggttttcaccatgttgcccaggcttatctcaaactcctgggatcaagtgatcctctcaccttggcctcccaaagtgctgagattacaggcctgagccatcattcctggcctatcctgatacttctgatgatgcttcacttggcagctccattactcctgtgctttctttatagtgccccaggacatactcctcataactcctcaacgtgtacatacaatacctgtttaataaatgtacccccctgggtactagaatgctatgcagcaggtagaaaggatgaggtagtgctacaggtactgccatggaatgatagccatgttatgtatttttgtttgttttttaaaaagtagtgtttgaatggcatcatggttatggtaaaaaagttccatggattcaaaggatatacagtgaaaagttacttccttccacctctgtttagcagttcccagttcctttatccagagacagccactgttttcagttccttctagaaatgttcagtgaatatacaaatatacgtatatttaacccatttttcaaaaagacacataatagcatatatagcattgttaaaaggaaaaaaaatgcaaagcagtatgtaatatcccagttgtgtaaagtatccatactgtatatgtttctgtatgcacaggaaatccctagaatgatactgttcaaacagtagccactagccacgtgtcactctttacattttaaataattaaaattaaataaaaaatgaaaactgaggctgggcacggtgttcacgcctgtaatcccagcactttgggaggtggaggcggacggatcacttgaggtcaggagttggagaccagcctggccaacatggggaaaccctgcctccactaaaaaacacaaaaattagctgggtgtggtggtgcatgcctgtaatcccagctattcgggagactgaggcaggataatcgcttgaacctagggggcagaggttgcagtgagctgagatcgctccactgcactccagcctgggtgacagagtgagactccagctcaaaaaaaaaaaaagaaaaagaaaaaatgaaaactcagtctctcacactagttttaatcatttagccctaaatgcttcatgagattaatcataaacatacttagcgatatgtgaagtagttttagctttgagtcattgccttaacactgtcacatttttcttcctatctaatttagggaaaacaaagaagaagagttaatcgacaaactggaggtggtcacaatgccttccccatcaccaaaaggactgccagtgaagcaatatgctgtgcagtctcagcttcccgtatatgagtggccggatgtgggatctggagaatatgatgttggagtagtggcttcgtttggccgacttttgaatgaggctcttattcttaaatttccctagtaagttttatttgtaaggaaatacagtatagaaaccttggtctttataaatggaccttgtatataaaatgtgataatttgaactctatgctttctgtaatattttctttttttatttttaccattttatttttctgtacatgtttgcttaaagtcaatgaatttctctgccaggttcaggtaactgaagggcctttagaagtagtttatattgtttaaacccaaggaatgctgcaaacacagtctggaacacaataggaaataacatctttctaaagacaggcttataaatttgaatccagtaacttaagatgttccctttctctggtaacagagttgattcataccaggctgctaggcctccagtcacagktatagacaagaaaagagggtatagaccaccaaaagcaagaccaatccactctgtgttatggtacacgtttcacaattcaaatcacctgtattcgaaggaaaatttacaaaacttttgtaagctgtgtttgttgtaagaaaagggatcactgccattggtaagccagcagctgtaagagcctgtgtcatgttcaagacgcattgaaaaagaccatttgctatgaggccacagagagcattaaatccaacatatgctgatccctcttcaggtagattcctttctgcttgtggaagctggttaatttttctggttatgatatcaaagattgttaagttttccttgatagtattagatttatgattttccatcttgagccttatgctcttctcccagcagctggttggtgcctccccaggtcgtcttcagccatgcccgggctcactgaagcctttgctcaactcgcctgggcacagccatatttggctgacacatgactcggcctgatattttcttttcaagtactaaagaacattttatttgtggcatgagttgtcaaaatgtatttaactccttatcaccctctataggctttcatccaccttcatttaaattccatatatatgctgacaaygcccaaattggtccctctagctcagctcggtccccaaactctagtcccctaatacctactgcctccacagctcttcctggatgtctgatagccactttacattcaagatacccaaagcatctcctaaaatctttatctcaataaatggctactccatcattctagctgcttgcaccaaaatcctggagtcatgcttgatttcttacrtcccatatccaatccatcagtaaatcctattggctctgccttcaaaatctgtgtagaatctgtctgtatctcatcacttccgctgctgccactctcgcctacattactacagaagcctcctaactggtccctacttctgtccttggccctctcagtcttttaccaatccagcagccaaaatgtatttatttatttatttatttatttatttctattttattgtttaatttagagacagtcttgctgtcacccaggctggagtacagtgttgctrtcataactcactgcagccccagactcaagggatcttcctgcctcagccttctgagtagctgagactataggaatgtgccaacacacccagctaactcttttttttttttttttttttttagagacagggatctcgctatgtggcccaacctggtcccaaactcctggctgcatgtgatcttcctgccttggcctcccaaagttttgggattacaggcatgagccactgtaccctgcctcaaagtgatccttttaaaacaagtcagatcatgtcactctgctcaaaatcctctggtaattttctgtcttactcaataaaagttaggccaggcctaactggcctcccagctgtgccttgaatttgccgagcatttaccttcttcaagatctttgtacttaatgttccctctgcctggaatgcttttctcccatatatatgcgtagttatttccttcttcatgttcttgttcaagtgttttcttgttggtaaagctttctctgatcactactaaaattgtaatatgtccccctcatagtcctctctgctttattttctccatagccctcagcatcatctggcaaaccttgtacatattttgttttttcttgcttatctcccactttttgtacataaactctctgagggcaggattttttttttctgtctggttcactgctgcttgtatgcctaacacttagaacagtgtctgcacatggagtgcgctcagtgaatgttggattgggctgaggatctcctgagcttgggaggttgaggctgcagtgagccatccagcctgggcaacagagcgagaccctgtctcaaaaaaaaattaaaaaaaaaagaaaaagcttattttaggcagtctgtatgtaaaccaagtgaagtgaggatagttatgtgactaaactataaaattagaattgttcatgagatgcataatagggtttgagtggttctcttatagtcataaatgcattttaaaattttatttaaaaactcccagacatcatgggctgttgtagattttgcgacggagtttcgctcttgttgcccaggctggagtgcaatggcgtgatctcggttcactgcacctctgcctcccaggttcaagcgattctcctgtctcagccttccgagtagctgggattacaggcatgcgccaccacacctggctaattttgtctttttagtrgagatggsgtttctccatgttggtccggctggtctcaaactcccgatctcaagtgatccgcccgcctcggcctctcaaagtgctgggattacaggcatgagccaccacacccrgacagaacatctttagaacagcaaatagttgtcctagctctgtttttaattaaatgtcattggtttcttatggtaagagagtgaatttacatgtaacttttttcctttcaggtgatacgagacttagatttaactgtcagtttttccaaatttctgggaaagtttcctaatgaaaagtagcataatagcttaggtagtggtaacgaagtggtaaagcccactgacatactaatttctacattttctaactcagtggcatattgaatgttcatcccagttgcctcccgagatggcgtggcccagcccctgtaatccatacagtgcttcacggagacacagttactggagtaacaattatgcaaattagacctaaaaggtagcacatattttcctttcttgagatttttgtgatttttaaatgttgrtgtcagcctgtttggggggcagtggatgaatgggtggtgctcactaatttctgtgactccagagtgcttcttctgcttttatatcctttctgttttctcctggtttctaacataaaccatatgtcttttggtatttatgcggggtctctttaaagtccatatgtgaattttaatttgttaattgaaataggttatattattaatactcggatttctataaaatacmttgtataaatgagagatggatttttgtatgttaattgttttgaatcttggttttgctggccttggtttctaaactatggccaaaaaatttttggaacctgaaataagaatatattgtatatcaatatgcaatataattgtcctaaaacattcattttttcctgtcatacctatagtttagaacaatttagaaacaatktagaacaattttttagaaacaattatttagaattacttgaggagtttattcagtctctgcctgttaccacctaatttccccttagaaaagaataattcacaagttcgcaagaacaacgtggtatctgggatttgctttaacttacttcagaaaacaagagagagagtagatgagacaagagtggcaaaactttggtagttctaaaatctgagccaggcatggtggctcacgcctgtaatcctaaactttgggaggccgaggtgggaggatcacttgagtctgggagttcaagaccagcctgggcaacatataaaaaataaaaaaattagccaggtgtggtgatacacacctgtagtcccagctactcaggaggctgaggtgagaggatctcttcagcctaggaggttgaggcggcagtgaggcaagatcgcaccactgcattccagcctgggcgacggagcaagaacctgtctcaaaaaaaaaaaaaaaaaaatctgaatgatgtgtatatgatgattcattagactgttcactccgtttttgtgaatgtttgcaatttttcacaataaacattttactaaagctcctaggttagaaatagaattaacaaaaacaaaaagcaaaaaaaaattaaataaagcatattgctcatgaaaacctatgaccagtgtttacagagcttgatataaaatgtcagacttgtgggaatgcaaatatacttgcatttacttttttttttttttcttgagacggggtctcactctgtcaccccggctggaatgtagtggggtgatctcagctcactgcaacctctgcttcccaggttcaagcgattctcctgctgcagcctcccgaatagctaggactacaggcacacgctaccatgcccggctaattttttgtatttttagtagagatagggtttcaccatgttggccaggatctcttgacctcgtgatccacccaccttggcctcccaaagtgctgtgattacaggcatgagccactacgcctggccctacttataatcacctatggtgataatctaggcaaaactcttatcctttgaggaagggactatagaaataaataattatgaacttcctaactgtacttccatggaaaataaattctttgccttatgcttttcatatacaaatagagattttttcatgctattactaatgatataatttttctgtaattgtaattaaattcctgatatgcaactgtatcgtttctttgctttagggaaaaataaatttagactctaaacacaggccatattttgttctcccgtctttcaaactgacatatcttccttgctaatgtctaacagccaaattaatagccagtgataaactatctttatttattttttttaagagataggggctagctgtgttgcccaggctggtctcaaactccagggatcaagcaatcctgctgcctcagcctcctgagcaactaggactataggcatgcagaccactgtacccagcttgtatctttttgtgtgtagacaaacattgattcaggaaatggtaatcattgtcattatttgcttttgattttttgctaggtttgatgtaggcccaattctcaaacaagaaactgttcctgtgccacccaagagcactgcaaaggaattggaagcagtgttgtcaagactgggtgccaacatggtataattccccaatatcctactgctttttactcatttagtgggtttcctaagtggttataaaaagaagaacaattttgtgacttctaattttcttaaaaacaaaaaagagtaatttctatctttggcttcctaaaaattagcctggcatttgtgatctcatgtaaatctttgagaatttacaaagagtaagtactgaataaaggctttcaagtgaaacaggtgatcttacatgacctactacatgccatagtgaggtcttagactattcttctcaatttcactctccgcactctggtatgtataccttgcatccctgtcagaatgaactaacagcaattttctaagcgactcttagctttccttccatttctttgcctggcttcagtcatttgcactagaattctgctgaccattctacctatagatgatccttcttttttctgtggctttgtatatataattcattgaaactgcatgagtagagtctgggtaaatgtttaatgactaaacttatgttttccatatgaacgggttaattttatacagaggaatatttttttcccacctgtakagatggtatttcctattctaggcacttacctcacaaatgatcttayaatagtgactgccgtttattgaacattggcttgtgttctacaactgttctagatactgtatggactttttctttttaccctctcaactttgaggtagttgttgctgttgattgtttcacagatgatgacattgaaggccagagacaagctaaataacttttccacaatgagacagctggtaggtggtagaactaggacttgaacccagagctgggtgactccatagtacattgtcctgtgaggtttcactgccttggcccccatggggtgagagtgtgtatagccaagcccgggctatcctgatgccaaagcttccacagcattctctagaagtgaatcaatgacctgtactctacagaaagcagaatctctactgaggtttccccaagtagacacctatcctcacagcttaagccaatgtactaccttaccctgccacayagatcttttaaagttataggttcagccttgaagagccaatagtaaagattttttttttaatttgaaaaaagaaaaagaaaaaaagttataggttatttcatggtgctgaattgtaatgtgtttctgcttttgttcttcccttcattttgaatatatcacactcttttttttttttttgtagctcatttcagttttgaaaaatttgcctgaaagtctgagcaatggaaggcagcagccaatggagggggcgacttacggtgagtgaaggctgcagagactctcatctttctaaaggttctgcttgtcacgatagcatctgaacattctgacttcttagctgtacttttcccttaattttgattgagtgcccacttttgtgtgcttttccaaagaatggtagaaagcattctttctccctcttagcatatagcctcatgaaggattgagcatttttttccaacttcttgattttgaaaatattaaatagaaagactggtataataaacaccagtttaccccagagtcaacaattattaatgtttgtccatattttctttctctttatgtatttattacgtgtattttaaattctgcttattcatttggaagtatgaatcatgatctttcatctctaagtagtttagtatgcctttcctaagaaaaatgaacaatttcctgatagcatccaatgttcagttcatatttaagtgttcctaattgtctaaaaatttattttatagttttatttttcaaactaggatttaattgtaattagttgttatgtctctttagtctctaaaaaaaattcctctttttttcctctctctatgtcattgactttttgaagagaccaggccagttgtttgatttgttttcttccagtgttgtttaacttgttccctatctcttatatttcctataattagttctaaaggtttggctggattcaggcttaaagtttttggaaagagtgtgtttcagtgacatttgttttcttcttttttgttttttttagtagagttaggagtataaacatttgtttcagtttgtttttaattttagggattactttttatttttctttatgattaaatgttattttttgaatatgtaaaacatatagctgattcaaaagttaatatacctagagaagtctcacttttgtcccctacagtcttaaggtaccacttgagtaagccaagatatcagactgtactaaagcaagtgaagctaagtttgatcacttggttgagatggtgaccaccagatctttccagtgttaagatgtgttttcccttttgcaattagcaggtaatctgtggggtaattaatactctggcactgtgcagatatcctgttccctaacaacctttcacatgatggttttagtacagattgatattccttgcccaaatgaattatttcactatggattacaaaatggcaattttctaattccttttacatttaatagctggtattgttctggaaagaagagtttttcctcattaattggaggtgaattttagttcatcctaaaatggggacaggggcttaattctttctctttaattagaataagaagttgatgccattaattgccttcaattttggtgtcagatgcgttctttttagtatcatttgacgcgtagattttcattgattgtgttttacagtcataattctttatatttgcccagtgggagccccttaaatttggctcctacattctgttaacactcttcacttcccactagtttggagtgcttccttgcttccaccacagtatgtcccaggctcgcctatgtgtcctctggctcacactgaaatcaaccagtgtgatttccagggagcttttgttcattttagtggggttgataattagagatcatctggtacaacaatgtatggcaagataaggtatcagtggactaaactagaagttatatttttaaaaaatattcaagctcatattgtttatgattcaaatttatcattaaagggttttccttatattttctcacactatctttttttaaatattaacctatttatttgctattcataacatcatttcagcattacaataccaatattactactaagagtaaaaatactaagtaagatttaagatttctttacagttttcctttttgatccttagaatatatcctaaggatatacagtcagattactgccttcaaaacttcctggtaatgattattttttccatgtggttttgttacctagtttcatacatagttaagtttcagttgtttttttttttattttagggattgctttattttcttttatgattaaattttattttttgaatgcataaaatatttacatggttcaaaagttaaaacagcttaaaaaggtacactcatagaagtcctacttccatctctatcttatctaacccgtattcctccctctataggtaacatttttattagtttctgatttagtcttccagtgtttccttttgccaaaataagcaaacacctacatagtgttattttttatttttccttcacaaaaggtggcataaaatacatatttttctgtgcctttgttttttcacttaatagtgtatcatggagactacttcctattagtaagaagagattttcctccttctttcttttttttttaagatagggtctctgttacccaggctgaagtgcaatagtgtgatcatggcttactgcagtctcaacctcccaggctcaagcagtcctcccacctcagcctcccaagtagctgggactacaggtacattccaccatgcctggctaattttttaatttgttgtagagacaagttctaactatgttgctcaggttggtcttgaactcctagactcaagccgtcctcctgccttggcctcccaaaggcatgcctggccttctttttgttttttatggtggcatagttctcagctatgtgaatatatcataattaacccaacagatgtcttattgatgggcatttgggttgtttccaatcttttgctatttcaaataatagtaagattaggaagataacaggcacatggttattcagaatagtatagtaaaactacttggagtagttttaatgtaccttattcctgtcagtaatgttgaagatcttttcatatatttaagaactatttgcatttcttttttctgggtggtagtatatcttttgcccatgttcctatcaacattttggtctttttcttctcagttttttgagtacttatatttcataatagagaaattagtcctctctgagataacttgcaaattcagtttgtcatttgttttttgatttaacttatggcatttctttttgtcttttttttttttttaatttattttgcctaggcatggtagctcatgcatctaatcctagcactttgggaggatgaggcrggtggatcacttaaggttaggagttcgagaccagcctggcaaacatggcaaaaccctgtctctactaaaaatacaaaaaattagccaggcatggtagtgcacgcttgtagtcccagctactcgggaggctgaggcacaagaatctcttgagcctgggaggtggaggttgcagtgagctgagatcacgccactgcactccagcctgggtgacagggcaagaccctatctcaaaaaaaaaaaaaaaagtttgaatagtctcatttcatagttagaagggcattttctactcccaggatgtaaagaagttcacccatgttttattttaatatttatatgattatttatttattatttttacttgatatatggaaaattttgaacatawagaaaagttgagaggttagaatgaattctctggtatctcttattcagtatcaatagctgtcaattcatggacactgaccctgatgttcatttttgctcttggttttatcttgtagcccctaagatttctgctggtaccagttgtataaaatgggaggaacaaacttcagaacaaatattcagactttacygtgccattggaaatatagtaagttgggaagtcaggttgcagttctacctagttggttttctatgtgtgtaatttgctttctaaatatttttatttaggaataatcccaaataaaaatatcccaaataaaaggttgatcttaggaacaaaacctagaaaacctgaaatttattcttaaaaattctttaagctgtttaaagtgtttatasagaccttagaattcacaaagcacttttaaatatatgtatattgcagtttcacataaccaagttttactatcctacttcataggtgaggggaaagaaatgagatgactaacaggaatgtccagtcactaaataatgaacttaaatcttctcactcctaatcctgtgcttcttccagtatgtctttctgcctttagccaattttttacaatcaaattgttaaatcattgatttctacatatggtacaccaagtgtagtaatataacagtttgttaaaatgtctgagttaaattctcagttcattgataaatttgtggggttttttcctttcatttcaatagctacttgtgttatttgaacactgagcttaccgtatgtgtgtttgtgtgtgtgtgttgttttattttttgagacggggtctagctctgtcacccaggcctggagtacagtggagaaaccttggctcactgcaacctctgcctcccaggctcaagtgagcctcctgtgacagcccctgagtagctgcaaccacaggcacacaccaccacacctggctaatttttgtatttttttgtagagacgaggttttgccatgttgcccaggctggtcttgaactgctgagctcaagtgatccgctcttctcagcctcccaaagtgctgggattacaggcacgagccactgtgcctggccaagtgtgtggtttttaatggaccatctctgttattaatgttgggtaaaatggggaaccaccattggatatctatagcatgctaaattcttcagtaaggaggatcacagactcatgttatagttattatcatcccactttaaagttgaagaaattgaggcttaaagtagataatgaattgttattaagtgttactcgatgtcgtgttgctagttaatgaaagtcagagtcaggttttgaacgagatctatcttacttcaaatcctattattttcctgctgccacagaatggcatcaggaaacaaggaccatagggccagacagtgctgggttccatcttgactctgctacttcctaacgtcgtagactcaggaaagttatttaacctccgagctttagtttgttcmttggaatatcagggctggtataatrtatttacagcatcttgtacagtatctggcacagaataggtactcattaaatgatagctgctattattcattcattcattaaacaaaatatttattgaaggcctattatgtgtcaagcagtgtactaggtactatagaaacaggtgttgtgggaggacagacaacaagtaagcaaaaaaaaaaaaaaaaaatcaggccaggcatggtggctcacacgtgtaatcccagcactttgggaggctgaggcagatgcatcacctgaggtcaggagtttgagaccagcctggccaacatagtgaaaccctgtctctactaaaaacacacaaaaaaattagctgggcgtggtggcatgcgcctgtaatcccagctactagaaaggctgaggcaagaaaattgcttgaacctaggagacagaggttgcagtgagccaagatcacaccactgcactccagcctgggcgacagagcaagactctgtctcaaaagaaaaaaaaaaaaaaagaccgggcatggtggctcacgcctgttatctcagcactttgggaggccgaggcgggcggatcacctgaggtcaggagttcgagaccagcctgaccaacatggagaaaccccgtctctactaaaaatacaaaaaaattagccagacctagtggcgcatgcctgtaatcctagctacttgggaggctgaggcaggagaattgcttgaacccaggaggtggaggttatgrtgagccgagattgcacattgcacaccagcctgggcaacaagagcgaaactccatctcaaaaaaaaaaaaaaaaaaatcaaatagtgtgataaattccttgatgaaaataaaaataggatcatgtgatagaataactggaggttattttagatcggtgatggggaaagcctctttctgacacttaagctgaaatctgaaagacaataaggagccagccatgcctagaacagagaagagcattccaggcagaggaacagctagtacaaaacccaaggtgggctaacccaaagaatcacaagaaaaggaaactccagactgatatccctgaatatagatgcacaagtcctccacagagttagcaaactgaatccagcaacatataaaaaaggattatacatgatgactaagtgggattgttttttgggttttgttttttgttttttgttttttttttttgagatggtgtctcgccctgtcgcctaggctggagcgcaactgtgcagtttcagctcactgcaacctccgccttctgggctctagcaattctacctcagcctcctgagtagctgggattacaggcatgcagsaccatgctcagctcatttttttgtatttttagtagagatggggtttcaccatgttggccaggctgatctcaaactcctgaacttgagtgatccgcccacctcagcctcccaacatgctggcattacaggtgtgagccatcacaccctgccccaagtgggatttatcccaggaatgcaaggttggttcaacatatgaaaatcagtcaatgtaacatatcatattagtagaataaaggacaaaagctacatcactgtctcaatagatgcagaaaaagcatttgacaaaatccaacacatgtaaaaaaacctcaataaactagaaatagaagagcatttcctcaacttgataaaggacatctatgaagaccctgtaactaacatcatacttaatgaaagaagccaagtgcagtggtggacacttgtagtcccaggtattttggaggctgagcgggaggattgcttgaggccaggagttcgagaccagcctggacaatatagccagactttgtctcttaaaaaaaaaagaagaagaaagaaagaaaataaaagaaagacaaagcctttcccttaagatcacaaagaagataaagatgtctgcgctctcaaagttaaatgtcttctattcaactttgttctgttggggcagttagacaagaaaaaagaaacaaaaggcaaccaaacaaaagtttggaaaggaagaagtaaagctgtctctatttgtggatgatatgatctagcatatagaaaatcatgaagaagttccaaaaaaaactattagagctaataaacagtaaagaagacccaagtaaatggaaagaccccagtattcattgattggataaacttagtattgttaagatgtctctactccccaagttgatgtacagattcaacacaattcctaaaaaaaaaatcccaattggcttctttgtacaaattgacaagctgctcctaaaatgtatacagaattgcaaggggcccagaatagccaaaactaacaaaattggaggactcatagttttcagtttcaaaacttgctgtaaaactacagtaaccaagatagtgtggtactggctatagctcattagaatcgaattaagggtctagaaataagccaggcatgatggcttatgcctgtaktcccagcactttgggaggctgaggcaggtggatcacttgaggtcaggagtttgagaccagcctggccaacatggtgaaacctcatctctactaaaaatatttacaaaaattagccagatatggtggtgcacgcttgtagtcccagctactcaggaggctaaggcacgagaatcacttgaacctgggaggtggaggttgcagtgacctgagatcacaccactgcactccagcctgggtgacagagtgagactctgtctcaaatttttttaaaagtctagaaataaacccatacatttatggtcaattgatttttttttctaaaggtagttcccaaaagatagttctttttwttattattattattattatactttaagttctagggtacatgtgcacaatgtgcaggtttgttacatatgtatacatgtgccatgttggtgtgctgtacccattaactcatcatttacatgaggtatatctcctaatgctatccctctcccctcccacccaccttttttttttttttttttttttttttgacaagagtgccaagacaatccaatggagaaagaatagtattctcaataaatggagctgggataactggatgtccacaatcaaaagaatgaatttggaccctatgtcacatcatatgtaaaagttaaagaagctaaatgaatagctaaaactagaaaactcttagaagaaaatataggtgtaaatattcatgacattgaattaggcagtggtttcttagctatgatgccatgaagcataagcaatcagactaaaaatagagaaattggacttcatcaaaattaaaaatagttgtgcttcaaaggacactatcaacaaagtaaaaaagacaggtaggccaggcatggtggctcatgcctataatcccagcactttgggaggctgagacaggaggactgcttgaacccaagaatttgagaccagactgggcaatgtagtgagtccccatcattacaaaaagtaaaaaattagctgggcatcatggtgcacacctgtggtcctagctacttgggaggctggaatgggaggatgcacttgagccagggaggtcgaggctgcagtgagctgtgattgcactactgtgtttcatcctgggtgacaaagtgagaccctgtctcaaaaaaaaaaaaaaaaaaaaaaaaaaaaagacagcttacagaatgggagggaatatttgcaaatcatataactgataagggcctaatatccagagtaaagaattcttacaatgactcagcagtaaaacgacaaataacccaattaaaaatggccaaaaattctgagtaaacatttcttttttgtttgtttttgagatggagtcttgctcttgttgcccaggctggagtgcaatggtgcgaccttggctcattgcaacctctgcctcctggattcaagcgattctcctgcctcagcctccctagtagctgggattataggcaagcgccaccacgcccggctaatttttgtacttttagtagagacggggtttcaccatgttgacctggctggtctcgaactcctatcctcaggtgatccacctgcctcagcctccctaagtgctgggattacaggcatgagccactgccctggccctgagtagacatttgtttcaagcagatacataatatgaatggccagtaagcatataaaagatcagcaacttcatctgtctttagggatatgcaaatcagaaccacaatgagataccacttcacacccattaggatggctataattcaaaaaacagacaaaaactagtgttggcaaggatgtggagaaatttggaaacttcatacattcatggtaccatgtttacctcttaaaaatggtgcaacctgtgtggaaaacagtttggcagttcctcaaaaagtgaaacacagaagtatcttatgacccagcatttcctttcctaggtttatactcaagagaattggaaacattgtgctcacacaaaaatgtgtacccgaatcttcatagcagcattattcagaatggccaaaaagtgaaaacaacccaaatatccaactgagggatgcgttaaaaaaatgtggtatatagccatacggtggaatattattaatactcagccataaccataatcacatgcttatgacatggatgaacctgaaaaatatgctaagtgaaaaaaccctgtcacaacagactacatatgttattattccatttatatgaaatgtccaaaataggcaaatccataggctggaggagagaggataatgggaattttctgataatggatgtgcgttttttctgggagagagaggtaatgaaaatgttctaaaaattaggcaagaaaaaaacgagtgacattggttgaatgaccctgagtctactaaaaaccactgacttggaagcttcaaaagggtgaattttctggtatgtgaattacatctcaataaagctgtcaaaaaacaaaacaaaacaaaaaaacaacccaagatggaaaagagttggacatgtttgagggacagaaatgaggctggtgtggctggagcatagctggcaagatggagagtagctaaggtgaggggagaagcaagattgagtaggattgacatcagagggccacggcaggggagtaatgggattaggtatgtacattcttaaaaggttgccctggctgctgctagagagtggagtggaggtcagttagggaattggttgggtgtggtggctcacacctgtaataccagcactttgggaggccaagaagagtgaatcgcttgagccctggagttccagaccagtctgggcaacatggtgaaaccctgtctctacaaaatatacaaaaattagctaggtattgtgggatgcacctgtagtcccagctactcgggaggctgaggtaggaggatcacttgaccctgggaggttgaggctgcagtgagctgtgattccaccactgcactccagcctggatgacagagcaagatccggtctttaaaaaaaaaaattaaaaaaataaaaagaagctgctgcgactgtagccagatgacagatgatggcagtttggaacaatgataatggtggataaaaagaagtggacatccagactatgcttggagatagagtcagcggaatttgctgatggaatctgggaaattagagatagataaattaggatcattcatagatttttggcttgagaaactgggtgaatagtggaaccatttaattgagatgaggatgtctggggaggaacatttgggaagagaaatcaatagttttggccatgttaagtttgacatatattaagttagaagacgttcatatggagatatcaagtagacaacttcctgagatgcaatttaggccagtagcttgaaatctcttggcacctataacttactacatgatgattcttaccctctgcggtttatcttccctgtacatggagaaaagctttgtgctataaaagactgagccagaaggtggggtttggttcctagagttgccctttactaatgagaggaaggcccttgtctttgagcttctgctttttttacctctaaagtgggattaatgaccatgtacacaactggcaagatcaaaggaaatgaactaggtgaatgtaaattcatgcaaacatactattttggcagtaatgatggcagacaccaaaatgattatattcttaccatccctttcctttctacaatgctctgatgataaggtgagctttacctcccgaagaacaagactatattctgagtatgtacctagcatgtttattactctcagtaaatagaaatcttttttagtcagtaagcatgtttcaaaaatattttgagttatttaaaagaaaaaaattgcacatatgaaaatcgtttcagaacttttattgaagcgggcaaaagaaaagtgagctagcaagttatagaagaggctatgacatagatacagttatgaacttgttcttcaaattcatttacttatttgatttaatgttcaaattattacaacaacctaactcttctgaaagttaaataccctctttaaggggtgtcataaaaagagcactgcactgagaatcagaaaacagaagccagtcctggctttgctactaactagctgggtccaaccttgggaaaatagctgcatttctctgagcctcactctcttcatgtatgaaatagaggattgaactacagtctggaaataaatgcattcaattcagaaattttagagaacttatttcctggtgtgtgttaaattttattaacatttaaatcaggctgtaggatctcaggtatgttggaaatgtgttacatgataaaggtggtatttcatactggagggaagggtaagatggattatctagtaaatagtattgggataactggccaaccattggtgggggaagccctcaaatcctatcttttaaaatcatagtaagtgctatattataacaatgcatatgtagttaacaatactgtatggtatacttacaatttgttaattgagcacatttttcttatgtgttttttaccataataaaaaaatcaaaatatagatggatcaaggatttaaatataaaaagtaaaatcacaaggactataaaaaagcacaactgaataatttgacaatatttaataatcttaaagtgtggggtaggcctttttaagtatgatatgaaccaccaaagtaatgagagaaaagacttagaaatataattatgaaaataaaaaacttatgcatggaaaaaatggctgtccccaagattaaaagtcaacaaactgaggaaaatattcacaacacatgtaagagttaaaaggctaatttcctaaatatagaaaatatttttgcaaattaatgagataaccatcccagttttaaaaaatataaccaaagggcataaataggcaggttacagataaataaattaaaagtgcacataaatatatggacagcttctcagcttcgctaataataaacagcaagagrttatcatatttttttctcacttatccaggcagtttagcaataaaatgttgatgctgtttaacccacgcattccactttaaaaacaaaaaaccccaaaactattatccagaaatgtgtaagccctcaaagatatatcgacaaggttattaccctagtttatagtgttataaatagcaataaattgaaaataacaaatatctatcataaaggtagttgcataaattacatattcataaaatgggttactgtgcagcagatagagtgaaattgataagtatgtactgatgaaacatcaatgctttatggtcacataacaaaagtccttgtaaaacagtattgatgcaggactttttgctccttaactcagctaaaatctgggttcttgtctcacaaccaggaaaaattaggcacgtggacacattgaaaggtgaggagagtggaatttattaaaagaaagctctcagcaaaaaaagagggggtcctgccaacaggctcccacctcacagattgaataccaggccaccacacaggarctgaagaggccaggctcttcccctgcataaggcagaaattcctggtggctccacccccattcttccagtgctcatgcgggcccttagtctgagccacgccaccttgatttatttcctttactgtgcatgtgttaagggacagaacttttcaccatggacatgttgagtcaagcccactgtgcataatgacctgggtggcatttggctgtctcctgtctctatcactgtgttctagatttttataataatatttgtagaaaaaaatacagggaaatgcacatcaaacttaacagtcgttacctatagggatgggaataaatacagaatatcactttctaaaattttttaacataatgtaatgcttgcattttttataaggataataaatttttaattggaaatattagtatattagatataaacattgattttaaagtaacatttaagatcttataaatcggccgggcgcggtggctcacgcctgtaatcccagcactttgggaggctaaggcgggcggatcatgaggtcaggagatagagaccatcgtggctaacatggtgaaaccccgtctctacttaaaatacaaaaaattagccgggcatggttgcaggcgcctgtagtcccagctactcgggaggctgaagcaggagaatggcgtgaacccgggaggcggagcttgcagtgagccaagatcrcrccactgcactccagcctggtgacacaacgagactccgtctcaaaaaaaaaaaaaaaaagatcttataaatcctggaaacactgatgtagagagtcatgtttatggtctgttccatcaaacttagtgactgagttcccaattcctctaattgaaagaaaagtccagattaacacaaaatagtagttgaaaagggtttgggagttgagtgtattcctttatcataccttctttaattttacttgcagattccgttgcagacgctctggatggcgaataccattaaacttctggatttggtagaagttaacagttcagtccttgctggtactaacttttgaatagctaacatggaagctgttttcactgtagtgtatctggaaatacgtctgttttatcatatgtcacaattactaaaaataacttttagtttgtttcagttcagtaattataatactttacattcacttattgtcttattctttgcaacactcattctcatatattttctcatttaatcattacaagaacaggccaggcgcggtggctcacgcctgtaattccagcactttgggaggccaaggtgggtggatcagctgaggtcaggagttcgagactagcctgactgacatggtgaagccccgtctctactaaatacaaaaatttagctgggcatggtggcacatgcctgtaatcccagctacttgggaggctgaggcaggagagtcacttgaacctgggagrcagaggtttcagtgagccaagattgcgccgctgcactccagcctgggcaatgagtgaaactccatttcaaaaaaaaaaaaaaaaaatcattacaggaccctggggagtaggcaaagcagtgttcctatcccattttaagctctgtgatttcctgccttaaggttttcagagagtgcagaatgactcgattagtttcattctggtgaatattataatgaaaatatctgggcaaatcagtgaaaatctaggccagagtgtattcatacttcatgccacaagtccattctgaggcccatcagcatcctgccaatacggtggacagaaggaatgtgagccacagaggaagctggtttaatttagaggtagttggagttccccaggaacctaggaattaggatttgtttgggcagggatgaaagggccagcctaaatcctaaacatcctatgtatttccccctgttggctagttatttcaccaaagcgctaacacaaaacttgtagattcrgcattttaggtggtcactgggtaaaggaattayagctttgtatgtgcatgggaagctttcctttgggtttctgatgtacagagagcactgtggtttccttgtaagttttggtttacaaagtcaacatcagcaaatgtgttctctccggtatcagtactgcctcccaagatgttttttgatttttaagaagtactatgaagttgcataattgcttttttctcttgtatatcttttcttttttccattcttcagatccaaaattaacrggacaggctcttattccaggatcagtaatataccacaaacagtcacaaatactattggtttattgcaaggtatgtttttcattagtttcaagttatcatagttgttttactatgttatagtctgtatcatttattatttttagttggaacttcacttaactgcctgtccatagattgggtcaggagatcatttaattttcttaagaaatagtgaagtctctagcataattttttgaaagtgatgaagttttgccaaggcattattattactcaaagaaagaagattcagtaacttgagtgctttcttaaaagaacacgtgtattttcagtagcccaatttaattaacagctcttgtgcttggtaacataaaagatagtcatatcaaaatatctgactgaactactacaggacacacatatcctacttgcttttactgcttaacagtagtaaagaggagatttctgaactttttaaaataactttggaatcattattgttttataagatcatggtgtgttctgagaagtgttctacattccttccatttcctaggtattttgcatcatatggtgttcatgtgagatatttcatacttaagagtgtttagccgggcaaggtggctcacacatgttatcccagcactttgggaggctgaggcgggtggatcacctgaggtcgggaattcgagaccagactgaccaacatagagaaaccccgtctttactaacagtacaaaaattagtcgagcgtggtggcagacgcctgtaatcccagctacttgggaggcttaggcaggagaatcgcttgagcccgggaagcggaggttgtggtgagccgagatcgtgccatcacactccagcctgggcaataagagcgaaactccatctcaaaaaaaaaaagaaaatgtttaaaatgtgtgatagattgatctgacctacagactgtgaatacaaaactccatcaacctctctttgtctctcgccagcttattctggaacagtgttggatgcatatgtcttgctgtccttttctgggtctatatatatgtatttcccttttttttttttttttttttttgagatggagttgcccaggctggagtgtagtggtgtgatctcagctcactgcaacctccacctcctgggttcaagcgattctcctgcctccgtcttccaagtagctgggattacaggcacccgccaccacgcctggctaatttttgtatttttgtaaggacggggtttcgccatgttggtcaggctggtcacgaattcctgacctcaggtgatccacccgcctcggcctcccaaagtgctgggattacaggcgtgagccaccacgcctggcctatatgtgtatttcatgttacataccttttattctgctccctttgtatttaaatatttatacagatctatacatttgttatcgctccttggtaataagcttttaatttcagtgtcaaaaaccgcaatgacttttgcaccaacctaatagagtcaaggaattctacatgttacttagtgtagtgctgtttgcagctaggcatttagtaaagatttgttggtttgtttgtttccatgataaaaattttataaactaatatttacttggctttttagttttgccacccctgcctattcactatttgtattttgccctttaggatggttggattggtgttcgatcagtgatgctcaagaaatcactaacagctactgacttctacaatggatatttgcacccctggtaccaraaaaattcccaagctcaaccaagccartgcagatttcagactctcagacttccaacaaagaagmagcagaaaaaaactgttgctatgcaacaatgcattgagtagttaggaagaagatggataaaaacctattacatatttgtaatttattaaaaaccttatttacaaggaattatctggacttttttttttttttttttttttgagacagagtctcactctgtcacccaggctggaatccagtggcactatctcagctcactgcaacctccgcctcccaggttcaagcaattctcctgcctcagcctcctgagtagctgggattacaggcacacgccaccacacgcagctaatttttgtatttttagtagagatggggtttcaccatgttgktcaggctggtctcgaactcctgaccttgtgatctgcccacctcagcctcccaaagtgctatgattacagacgtgagccaccgtgcctggcctggaattatctggactttcaaagaagatggcattattataagaagagaagattattgccgaaaagatggattgcctcactttccactttttatgtaacagtagttaaaaaacagcttyttttttacttgaattacaaaaaagtttaaataaaacttgtatttatgatacgaaactcaaggagattatctttccttaagaacaagggcaaccctaactggtgtatgtatgtacctacatacatactgagaagaggttttttgtttttatttttatttttttgagacggagtcttgttctgtggcccaggctggagtgcagtggcgtgatgtcagctcactgcaagctccacctcccgggttcacaccattctcctgcctcagcctcccaagtagctgggactacaggcgtcygccaccatgcctggctaatttttttttttgtatttttagtagagatggggtttcactgtgttagccaggatggtcttgatctcctgacctcgtgatccacccgccttggcctcccaaagtgctgggattacagctgtgagccaccgtgcctggccgagaagaggtttttttaaaaacagtgcatctatttaattttttaaaaatcgtgtcaccactgacattttaggagtattgaatctgcattttttatttcctataagtagtaaatccagctctttacatttcactaccagctagatttaaccaagtagtaaacgtaggtaatatttaataatctctgccacattgatctgtactataaattaacattttacatccagattttatttttttttattaatttttttagagatggggtcttgctctctcacacagtctggagtccagtggcgtgaaacactgcttactgcatcttcaacctcctgggcttaagtgatcctccagcctcagcctcccaaagtggggccaccacgcctggctaattttcttttttagtttttaaaaaaaattttgtagagataggggtctcactatgttgcttaggctggtcttgaactcctgggcccaagcaatcctcctgccttggcctctcaaagtgctgggattacaagcatgaaccactgcacccggcccaggttttcttgaagtaggaacgtgctaacatttttcaacttacttgtgcaataaaggttattgagcatctggtgtgtgcaaactcatcttctctgtctccaggagagtcagaaggaggaggagaaggaggcacagtggccgcagaatccacacattggcttttcctgcctagattctgacagtgaaagtctttctctattctttaagtcatttgttaattcaacatttatggatagggtgatttggtcatctaagttaggatgcttttatgagtgaaagaagcacttataattactccagggcaacagacataaaccaggactctcccaggcaaactgggttgtgtggtcatctgatgtattgagcacttactgtgtaactagaacttcaaactggttaccagagattcagagatcaaatatttgacatcttcaacctaccagggagacaaatgtgtaagcgaatataatagttataaatgccatagtagaggcataagggaagcattgtgtccctcacgggtgtcaatggaggcttcccagaggaagtcaatggaattagcttccaaaggatgagtttactatgcagactaaggcctggaaggacattctagcatgtgcagaggcacagagacttaaaagaacactatagggtgtttggtaatgtttaggtgggagcatgattgttcttttattattctttaagccataaatttgtcatacattcccttgtatgtatgagctagttatagagctggctgggaaaaagctaacaatggattatggaagagaaacaaatggcatgttgaataccgggggaaagcccagcgttttgatgaaaagaattgatgagtggaatctggtgatagaaatgagactgcaaaagcaagctgaggcctgatcatggaggactttgaaaaccatgagagttagggcctttgtctcatatgcagtagcctgtgagtagagtggcgtgatcagagttagattttggaaatttaactttggtggtggtgtggaagataggttgggggtaaaacctgggcaggaagatccgttggaaggttagaaatgtgatcttcagggacatggatggagctggaagccattatcttcagcaaactaatccagggacagaaaatcaaacactgcatgttcttacttataagtgggtgctgaacaatgagaacacatggacacatggcgggggaacaacacacaggagcatcttgggagtggggatggggatggggggagggagagcatcaggaagaataagggatgctgggcttagtacctaggtaatgggatgatctgtgcagcaaaccaccacggcacacatttacctgtgtaaaaaacctgcacatcctacacatgtaccctgaatttaaaagttgaggataaaagagaaaaggaatgtgaagatctgagttacgtcagtggttaggataaaggggagatgactgaaaagatttttgtgggtgagggaatttgagttattgggtattatatccttatggagagttttagctccaccactgatgagctctttgatctctgacaagtcagtatcactgaactttatttcctcaagtgtgaaattaggctgatgatgaaaacaaaacactaccaaaataattttgagaatcaacaagagactgtgaaagtgccttgtttttccaattgtatgtattgaacacttaatcccctccaggcactctgctcatgttagggaattgggagagaacggaaatcagtgtcgtctaggagctcatgagtacgatttctgcaggggatctaaggaagtgcccactcagacactgccaccaggactggggaaaccttactgagggcacagcttcccgtcagagttgtgacccaggaaaggttggattcctcttgcaacacctaagcaatattctgccccttccatcccctcaaacagggtaacaacctcgacaaggggaatcttgaatagttgaaggaatcgcaaaggagatcccttaaaccttcacaattgatgaaatcagtaatctgtgtgtgtgaagttaggctcttggttgcaaataatagacttgaaacactttaaagaaatggggattttaggccaggcatggtggctcacgtctgtaatcccagcactttaggaggccaaggcaggcagatcacctgaggtcgggagttcgagaccagcctgaccaacatggagaaaccccgtctctactaaaaatacaaaattagccagatgtggtggcgcatgcctgtaatctcagctacttgacaggctgaggcaggagaatcacttgaatcgggaggtggaggttgtggtgagccaagatcgcaccattgcactccagcctgggcaacaggagcaaaactctgtctcaaaaaaaaaaaaaaaaagaaaaaagaaaaaaagaaaagaaagaaagaaatggggattttattgtaggaatatgagtaggaaggactagaaagccattcggagcaagtcaactcggaggtttcctttggttaccgtcactccctgacccccgttccccatagtttctctgatgacatgtgtgctctctacttagcagttttgatctcttactacctactagttaatggcctcaggtctgccaccccacattctgggtggagcctgtctgactgtctagccaattatcattgcccttgccagatagaaccttttgtgccagaccatgtctagtccttagccagactgtgaatcaaggcccaccccagtccagtgattccactctgcagaaaaagcagcataaggggctgtgaaattggactggcacagttggtatacctaggactgtatgaaatacctttcatacatctgaaatcttgaggtaagagtgcaaagcccatcctacagtgtgcagttccccatcaagggagcctcaagctcatcctggaactggaggataaacaccaggtatggaaatgccatcttcaagttggcagcctatttcttcaagaaagtaaatgatgcacatcccagacaggcctcaggaaaccatatgacccactcttttttcaggcccctgtagaaaccacaatccagtgtgactgagtagcgtttctcatctgaaccagaatcacctggaatagattcctggactctactgccgacattgaatcagaatctctggatatgggactctgcagtttaccacactcatcaaataatttttctgctacagcggtaatagttttaactagcataagagatgcatgttaatctgagctacgtgttggcccagagtccagagtcctcccaggaaggtagaacacagtctactttatgctttagttgaaaggatgtatttgcaaatacgttgcctccttatgcaagatgcttctattttggttcttgtcattgctgaaaaacatatgctttgcatcagactcaaaaacaaattttcttgctagttactagttgagtgactcaggacaagttgctgaaagttttaaaactcatttctcagtttaaaaacatgtgtaatacctgccttgcagaataggaatacatctgggaagtgcctggcatatagtacaccctcaataaatggtagctattgttgtcatctgtggttaatcttatgtctatgactgggccatcaggtgcccagacatttggtcaaacattattctgggtgtgtttgtgaagctccttctggatgagattaacatttgaatcaggccaggcatggtggctcatgtctataatcccagcactttgggaggccgagggaggcagctcacttgagtctaggagttcaagaccagcttgggcaacatggcaaaaccctgtctctacaaaaaatacaaaagttagctaagcgtggtgacgcatgcctgtggtcccagctacttgggaggctaaggtaggaggattgtttgagcccaggaggtcgaggctgcagtgcactgagattgtgccactgcattccagcctgaatgacagagtgagaccctgtctcaaaaacaaaacaaaacaaaaagccccacacatttgaatcaatggattcagtaaagcagatggcccccctaatgtggatgagcctcatccagtcagttgaagacctgaatagaacaaaaaggccgagtaagaaggatttcttccrgcctgactgcctttgagctgggatattggtttttaccctgcctttagatttgaactgaaaatcagttcatcataggtctcgagcctgctggctttttggctggaactataccatcagctctcctgggtctccagcttgccaactacagattttggaatttaaactccataatcacatgagccaattccatataataaatctctctctatatatgtatacacccgatggttctgttcccctggagaacgctgactgatacatcaccacagtcaaatgctactataatcccttctttgggcctacaacattttctcctctgaatggtagcaacagcttgtggaagaagatacctttatttattttgatttcttattgacacataataattgtatatatttatggagtacattgtgatgctttgacacatataataatgtgaggggatcagatcaacgtaattagatatccatcatctcaaacatttatcatttcttgtgttggaaacattcaatattctctcttgtagctatttgaaaatatacattattgttaactatggtcatcctacagtgctatgaaacactagaacttgttcctcttatctagctgtaattttgcatcctttaataaatctctccctatcccttcctttcctctaccctttcaggtctctaataacctctattctgctttctacttctatgagatcagcttcatttaaggttccatatacgaatgagaacacgcagtgtttaactttctgttcctggtttatttcacttatttgtcaagctcgccaactgcatatttggggatttagcctccataatcacatgagccaattccttataataaatctttctctctacacatacattctgatggttctgtttctctggaggaccctgagaaatataatgtcctacagttccattcatgttgccttgaatggcaggatttcattctttttatggttgaatagtattccattgtgtatatatacctcattttctttgtccattcttcagttgttagacatctaggttgattctatatcctggctattgaggctactgctgcaataaacatgagcgtgtagatgtctcttcgatatattgatttctctttctttggatgactacctggtagtgggattgatgaatcatatggtagctctatttgtagtttttagaggaacttttacgctattggaaatgtctttagaccaataggagcaaaagaattttcaagtagggaaggatctatataactcaaaatttctttttagagatgatgaaacaggggcctagcaacagctaggtagtgacaatactaggattagaacccaaagactacaggagattttgttttaaagaaggattttattcttcatttggtttgggggacaaaagaaacatttctgagcataaaattgagttctcgagaatagctacccaaaggatgtttgttgctttatactttgtatttaagtcagttcaacctattttcaccatttttcttcatatttatcaaacaatttcaaggtgaaaatatatgactttgaggggcagagtcttagagtcaacaaacctcacatgagcctagccctgccactgactgtaagcctaggctggttactgagcctctccatgtatggccctatccatgaaattaaaattgtacctactttgcaaagattgtcatgaggaatagaaataatatacttggttaggcgtggtggctcacacctataatcccagcacttcgggaggtctacgagggaggatcacttgaggtcaggagttcgagactagtctggccaacatggcaaaactctatctctactaaaaatacaaaaattagctgggcatggtggtgcacgcctgtaatcccagctactcgggaggctgaggcaggagaatcg

SEQ ID NO: 95160 - DNA, 69202 bp, Homo sapiens
  misc_feature (1)...(69202): n = A,T,C or G
gtctaaaaaaaaaaaaaaaagaaagaaagaaaagaaaatgagactttattttctataaagggttacagcttgtaaggtgaccgtgctgataggctgggaagtgtagcctctcgtaaagaccagagtcaggtactttgaaggatgaaggggtgggacaggagctttatgctgaatagattggctaaacatacatatgcaacaggttataggaggaggtatgaatattcatgaaggtggtcctgaagcacgaatattgaagaaacatgtatgttacatatgacccatgttcaccttgcagtggagacttaacacttaaatgtattacaatttgacctatatgtcaaaaggtcttttcaggacacaaaggcactcaaatgtacagcctctgtaaactagacagaactcgtccgtggttgatagtcttcttatcagcagaaggttactgaaataagtctcttgtccaatcaaagctatagttatggcttgtggaacaaggggtcagttggccagtgtctggtgaggggtaagctagaaattttaatattgattatcttaaggctagtgcttgtttagctgctagagaaagaaaaaccttgtggcagttaaacatggtttattctttaagtgtaggggtgtgtgacttaactcttgcctagcatggctttaggtcttatttataatttggtatcatattgccacaaagagtccgttccatcagtctttaaacacattattttttattattttttgttgttgttccatcagtcttatgctctctattttcacattaatgctggtcagttgttgtgtctcaaccgcaaaagggagggggtataaggaggcatatgtgacctcccatcccgtcatgacctggaactcagtttttaaggtttttctggtgtccccttggccaagaaggggtctgctcagtcaattgtgaggcttaggatttcatttttagttcacacttctgaactgtggattgacaggtagaggggaaggttttcccagtaaagatggcctacaatacccattctccaggcagagttgggaggctacatgtgtatgatctggctgtggaggattccccattagatacctgcactgatccagtcagtctccctctccacacttagctttgtaccatctagagaaacctgactttgctcagggataactggctgggtgaccctgggtggtttgaatccagccaaattctacagctcattttctaaaacctcttccagaatagaagattttatacatagataacaacaaggatgtgtatgaccccttgccaaaggcaggaaatcagccttcagccctgggaatgagcttaatccatggcaagtactcagcaaatgcttcctgtagttagtggtgactattctctgagaagggagagctggcccttggccaaatgaggctgggaaggctgcatctagaaggtaggacaaaaagacaaggctaaatttgcattttcatttgaccgatagtatcataaaactcttagccctacctatttcagcttggcactgccacttggctctgccttttaatctcccctgccaccttccagcgtattttggtttgcttttttttttttgagacaaggttttgctctgttgtccaggctggagtgcatcggtgccatcacagttcactgcatctctgaccttccaagcttaagagatcctcccagcctccttagtagctaggactacaggcacatgccaccgtacctggctaatttttaaaattttttctagagatggggtctcactgttttgcccaggctggtctcgaactcttaaactcaagcgatcctcccacctcagcctcccaaagcattgggattacagcataagccaccatgtccagccccaccctggagttttatagttcaccagaatgatactctttcttctctccatttctattttttttcttgttagatttctcttgcagagaggggtccataatagtggggtctctttgcagaaaaatttagaaacagctgataagagcattagagggaaccaaatccaactcatcaaatttacctaatttgatgaatgtggaaactcaggcctaaagaagtcattttgcagtatgttactagtggtcaaaccaggctggataggcccacttccactggacctttcttatgaagcatctgaggcaaaatgccaacattcagtcttcttctatatcaatagctttcaccttggtagaagtcagctgataagcctcaggtttcaaatacgctgaattaaaattattctattttttattacccacctaccaggatggctaaaattaaaaacattggctgggggtgggggtggtgctggaaaaaaaaaattaggctgggtgctgtggctcacgcctgggaggctgcagcaggaggatcacttgagcccaggagtttgagaccatttgagcctagaagtttgagaccagcatggccaacatggtgaaaccccatctctactaaaaataaaaaaattagccaggtgtggtggtgcacacctataatcccagctacttgggaggctgaggtaggagaatcatttgaactgcggaggtagaagttgcagtgagctgagatcgcgccaatgcactccagcctgggcaacagagcaagactctttctcaaaaaataaaataaaataaaataaaataaaataaaataaaataaaataaaataaaaagactgaaaatactagggatatagagcaactagaactttcaaacattgccgtggaatgtaaattgaccaaaacactttgtaaaactgcttagcacacctactaaagctaatcatacacctgtgtaacctagcaattcccttcataggtatttattccaagataattaagagcatttatccccaaaagacaggtacacaaatattcagagcagctttatttgtaatagctaaaaactagaaacaacacaaatatccatcgataggagaatggataaataatttgtggtatactcatatagtcaactactacagagcaaaaccaaaaactaaaagaatgaattactgattcactcagcaacatggataaatctcatacacattatgttgatgaaagaaaccaaggcccggtgcggtggctcacatctgtaatcccagcactttgggaggctgaagcgggtggatcatgaggtcaggagttcaagactagcctggccaagatggtgaaaccccgtatctactaaaatacaaaaattaggggccaggcacggtggctcatgcctgtaatcccagcactttgggaggctgaggcaggcagatcacgaggtcaggagttagagaccatcctgaccaacatggtgaaaccccgtctctactaaaaatacaaaaattagctgggcgtgatggcggacagctgtaatcccagctacttgggaggctgaggcaggagaatcgcttgaattgggaggccgaggttgcagtgagccgagactgcaccactgcactccatcctgggtgacagagcaagactctgtctcaaaaaaaaaaaaaagaaaaaagaaaaagaaaccagacactgtaggttccatttatataaaattcaagaacagaacagacaaaaaagactctatggtgatatatcaggatagtaattactgagaggcaaagatattttaacatgaaataacctctgggatactggaaatattccagatcttgatctaggtgataattacatggatatatacatatagaaaaattcagcttaaactgaatatttaagatttacccatgttctatatgtaaactacatctcaatgtttttaaaaagtgccccatattgcatctgcattgtagtaaacacaatacaataaaatacctttatcataaaaaatattttatcgttaaaattcaagactgtcaacgtcactgctttcatcaactcattcttggcagattgcattggtctcccattgctttgcctactaccaattcctcctcctctctgacaggtctttcttgctgagcacatttgattttactaatctccaggttaacaaacttccttggctcccatgtgtctgtgggatacagtataggcacctcagtgaagcaaacaaagactttcctaatgcaccctctgcctttccagattcagggcgacctctctcctctatgcctttaatccctagcagcagaacctccttccacaaccctctctcttttttaaattttaagacagggcctcacactgtcacccaagctggagtgcagtggcgcgatctcgcctcctgggcttaagcaattctcccaccctagcctcccgagtagctcggaccccaggggcgcgccaaccacgccctgctaactgttgtattttttgtagagacagtgtattgccatttttcccaggctggtctcaaactcctgggctccagcgatcctcccgcctcgtcctcccaaagtgctgggattacacgcgtgagacgctgcacctggtccacatcttttcacctgtgaacgaagcaagcgccctgtgcttccacggcctacctggttcttactcagtcaaattcctactcgcatttcaccatcccgttctcaagggttggctctcaaatgtctgacaatggttcccacggccctcagttcctatcatcataaactctttgtgagctcagcacattcattatatgaaaactctctatattttattctgtccactcttgagctaaatgtttccagagagctagcagaatttgttttcagcgttagatccctctgctaaacaaacgggtgctaatagaatcactttgctaaataaatgggagctaacaggattgaatatgagttccatttttgtcccagagttctagttttcatataaatatttcttcccattaaattcttctctgcagaagaacttggggatgaaacccgatacagacaagacagcttaagtaagacataaatgagtgttgtctctagtttgagtttcctatttttttgagacagtctcctgcactgtccaatagaatagccaccaaaaatatggatatttaagtttaaattagaagtgaataaagttggccgggcgcggtgtctcacgcctataatctcagcactttgggaggccaaggcgggcggatcacctgaggtcgggagttcgagaccagcctgaccaacatggagaaacctcgtctctactaaaaatacaaaattagccggtggcgcatgcctgtaatcccagctactcgggaggctgaggcaggagaatcacttgaacccgggagacagaggttgcggtgagccgagatcgcgccattgcactccagcctgggcaacaagagagaaactccgtctcaaaacaaaacaacaacaacaacaacaaaaaaacagaagtgagtaaaattgaaaattcggttattcagttcaagtactcaaaagcctcatgtggctagtggctaccgtattaaagagcgcaatgtgcaatatttccatcatcacctacagttttattgggcagcgctgccctggtctttattttcccttgttggaacgctcttccacgctgctcccacaccatgtcccctatcaccattattatcctcatttcatctgtaattacttgcatcttttaataggctgggagttctaagacagaagggactgtgtctcacttctgttgttccagtgtttagctttgaaacccaggcacacagtaggtactcagtaaacagaatgcgagggaccgtccagagacaccagtcccaaacccttttccaggctgatcggtcccccataagtctccagccttttttattttaaagcttattttaaagcatgtccctgaagacgagtggggagagcagaccacccgctgattccaattccctaggcggccgcggcgagctgcggcgtctctgtgccccggcctgcccctatcccgcctgcgccccgcccccgcccggctcgcgccaaggcccgctgttggcgccgccgccatcccggcgcgtcactgcgcaggcgcggcccgsgagcgtggggtatctcgaggtgccgggttgcaggcgctcaggagcgctagggtttgaggcctgctttctgctcgcgccagcagagcactacctgaggcagcgaggcgcagcgagcctagcctccccgcgccctgggcagtgtggccatggagaatcaggtgttgacgccgcatgtctactgggctcagcgacaccgcgagctatatctgcgcgtggagctgagtgacgtacaggtaaaggccgggtcgggcggcgggaagcgcgcgggatcgcggctccgggtacccgccaggacccctgccccctttgtccgcgtgcgcgccggagagcctgcagtgcgccaacaaggtcggcgacgcggtgcgcttacggcgtgctggcgcttttcgaggctcatctgcagatctcgggccgggggcacaaccccccgagggctgcaggaaccttcgggtccccagagagctcggcctgggcctctcaggctaccccgggcctcttctttgttcgcagtcggcggccttcatggagcccaggcccggccctggctgcctggccgtcggggttcgagttggctggggcccttcgagatgtgggatgagcttgttgggtcaggggtgcggttgtgacagcggcttgctgggccgtagctgaatgcctgccgctggcctgagaggtccagccaggcccctcggacgttactgaggctgggcgctgccggaggtgggggagggggaggggtggggggccacacccacctcgcaaccgttcagtgatggaaatcattctcattacttttaattttaaaattcacaagagctggaggaagtgatttccccctctgttctgaaggttgtgagctcaggtttgctgagttgcacagagaacttaaaaagttcttaagttacattaagcatttctgtttgagctccttggcccttaatgtaagcaagctgaaggcacgtagtagtggagactccaggacctgtgtatcctcatgtctctgtccaaactaaagattctgggctttgagaaactggaattttcattctggaaggttctttctttctttctttcttttttttcttttcttttttttgagacggtgtttcgctcttgtcgcccaggctggagtgcaatggcgcgatctcggctcaccgcaacctctgcctcccgggttcaagggattctcctgcctcagcctcccgagtagctgggattatagacgcgtgccaccatgcccggctaatttttgtatttttagtagcgacagggtttcaccatgttggccaggctggtctcgaacttctgacctcaggtgatccacccgtctcggcctcccaaagtgctgggattacaggcatgagccaccgcgcccagcctctggaaggttctttctacagtcattcttattggaaacttctccttaacatctatggcactttgtcatctctttcactccatttaactctctctgcctctgaacaggcatctgcttggatcacccgtggatccggtaaaatgtaggtgctttctgagtgtcgacttgaatttattgaatttaatataatctttgcttctggaatataaacagttttcctgttgaaagatgaagacagtagtggccagaatgcctttaaataggctatgacattgcatggtgtgtcgtttaatgtgttcatccagactgaggctatacttttgggtcagagtatgagtaaatgttctgtgctgtctccctctactgctccacggtggtttaatagaataggaaaaaacaaacaaaatcttttgtagrtggggatcaaagtccccgtctagagagggttcttccagcagtcaataaaaaagtacggaacaggccaggtgctgtggctcacgcctgtaatgccaacactttgggaggccgaggcgggaggatcacctgaggtcaggagttcgacaccagcctgaccaacatggagaaaccccatctctactaaaaatacaaaattagccgggcatggtggtgcatgcgtgtaattcactatgttggctactcgggaggctgaggcaggagaattgcttgaacccgggaggcggaggttgcggtgagctgagatggtgccattgcactccagcctgggcaacaagagtgaaactctgtctcaaaaaaaaaaaaaaaaaagtaaccatctaaaaatttttggggaaaaataaatcatttttcccccttattgagtttttgttttctctggggtttcacatctgtagttttgaggcacccatatttcaactaccattagtttaaaagcatgatgttaccctcataaaagagtgtttacatgtgttagcaatcctctaacacatgtaaggtagtacagatttacaaagrtgagtcagacccagcttttcaagggcatgctatctagaaggaggcgtatcatatacaaacaaaaagttttgtgtaggagtatgtttattggtagaattggagttggatgttgaaccaggtatctggtgttaaaggaatttgttacctttctttcatttagttagtgatgacttccagaaatgagaattatttttgtcaaactaagactgggagaatgttccagaaagagaaaggcatagacttttagacacttgtaatctctgacttaagccgtgtcartgcccaaaggccaccaataacacacccgtagttaaacaagttgggtttattactcattgcattgagagagsatactccatggggaaccctggggtgtttcattaggagggtgttagaactgattataggatttgggtgttggtgattaggggaggggagggttaaggaggttgggtttcacttcagataagatcctgtaagaaaatatgggagtttcgtggttgggtatctgaataaatcttacctgtagggcagggagactagtataagaacaaaactgtaattgctacaggagtagcagtcactcaatttggccaragggtgtttggtatttcgtgagtggcatagccactatgtatttgtctgtgcttataacaaaattgtgaaatggcctttgtctcattttatgaggatttcagagtaaccttgtctgaggttggtattctgtgagattgtttatgtcccataggagaataacatggcctggctgtgagtgctatgcctgcttctggagtgtcacgggttgccttttttttttctttctcaactgattgctctatgcagggcctgttgaaaccagtggttttacatgtgcagatttgttatttaaaaaaaaaaaaaaagaaagaaaagcagccgggtgtggtggctcatgcctgtaatcccagcactatgggaggccgagacgggcggatcatgaggtcaggagatcgagaccatcctggctaacacggtgaaacctcgtctctactaaaaatacaaaaaaattagccaggcgtggtggcgggcgcctatagtcccagctaccaggaggctgaggcaggagaatggcgtgaacccgggaggtggagcttgcagtgagccgagactgcgccactgcactccagcctgggggacagagcgagactccgtctcaaaaaaaaaaaaaagaaaagaaaccagtggttctggctctggatgaagcacttcatttatttgttcagtaaaaatcgtttatggagtacctactcttgtctatcattaagctaggtgtggggttcttggacagcactttaacactctctgctttctatagcatgacccacagcttatgtgtaagtgtgagttttaaagtgttaagttccagtttggaggcattggctctgtctccctccatcctgacacagggaactgtccagtcatcacatctctattctgtcttkgatgctgcagggctagtgactatgagagaacacggctgatgtgaggagaaatggtggacaataaagacttcagcagtggcatcgtctgtgcttgaggtgaacggtagcaaagaggccagctaaagcagggttactttcaagattgaatttactttcacgatgaacataatgaacgtgtttgtcccgagaaacatagttgttaaagcattggtttatttacaaggtgcttgtttgttttgggtgttgtgagcagagaacagagcgtagctgtgtttgagagctgtttgaaagatattgttcctgtccktacctaacagagtctggtggaaagagtgctaactgaacacatgagattgggtccttgttcttattacacttatgctctagtgaccatgattcacttaacctttatgaacctgacgctcttcatccagacagatatgaacagtagtgcctaactcataggaccattttgagatttgaattggaaaatggatttgaaagtgctttgcaaattctagtgtgcagttcaagtgagtgattatgatgattgcgatattaaaccttagatgagagggatggtcacagagcaatggaagaatagagcctattagcagacctattcatatatgaaaagttaaggtatgacaagaggcgctcttacaaattaatgaggagaraatgacccattcaggaaattgtactgggacaattggtaatccaaatggcaaaaagaaaataagatcctgccttatgccatacacaaaaatcagtttcaggtgcattaatgacctaaacgcataaagaaaaactactaaaaagaaatataggagactatctttataatattggaaagggggagaatgtgttaagcaagatgcacaaaacacaaaccctaaagacaaagattggcacatttaagacaaacttgaagaagacatttgcagtgcatatcattgagagatgactaatatcacgactatttaaagaacacctacagaccaataggcaaaagacgtattacctaatagaaaaaggggcagataatataaacatttcagagtaaaaggaaacaagaatgaccaataagtctgaaaagatgcttgactgcaattatgaccaggcacatgtacaggcataccttgttttattgtgctttgctttattgtgctttgcagataatgcggttttgacaaattgaaggttgtggcaacaaagtctgttggcgtcatttttccaacagcatgtgttcatttagtgtctctgtgttgtattttgttaattcttggaatagttcagattttttcattattattatatctgttctggtgatctgtgatcagtgatctttgatgttaactttttttttttttttgaggcagggtctcactctgttgcccaggttggagtgcagcagtgtgatcatagctcaccgtagccttgaactcctgggtttgagcagtcctcctggctcagcctaccaagtaggactacaggtacctgcctagctaattttcaattttttaatttttttagaggtggggtctcattatgttggccaggctggtcttgaactcctggacttaagcaatcctcttgccttggcctcccagatccctgaggttacaggcttgaaccactgtgcctagccttgatgttactatygtgattgtttattatttatttatttatttttgagacagggtctcactctgtcacccaggctggagtgcagtggtgtgatcttggcccaccgcaacctccgcctcccagcctcaagtgatccttccacctctgcttcccaagtagctgggactgcaggcatgtgccactgtgcccagctagtttttgtattttttgtagagacgaggttggtctcgaactcctaagctcaagtggcctgcccacctcggcctcccaaagtgctgggattacaggtttgagccactgtgcccagccaccattgtgattgttttrtggcaaaatgaaatgcacctatataagatggtgaacttaatcgataaatgtatgtgttctgactgctctcactggccattcctccatctctctccctctccttgggcctctcctctgagacacaacaatattgaaattaagccagttaataaccctacaatggggtcgggtgtgatggctcatgcctgtaatcccagcactttgggaggctgtggtgggtgtgtcacttgaggtcaggagaccagcctggccaacatggtgaaaccccgtctctactaaaaatatacaaaaattagctaggtgtggtggcgggtgcctgtaatcctaactactcaggaggctgaggcaggagaatcacttcaacctgggaggctgaagttgggtgagctgagatcacgccaccgcactccagtggcagagtgagactctgtctcaaaaacaaaacaaacaaacaagccctacagtggcttctaagtgttaaagtgaagagttgcacatgtctcactttaaatcaaaagctagaaatcattaagcttagtgaggaaggcatgtcaaaactgagacaggctgaaagctaggcctcttgcaccaagcagccaagttgtgaatgcaaagaaacaatttttgaaggaaattaaaagtgctattccagtgaacacccaaatgataagaaagcaaaatatccatattgctgatatgaagaaagtttgagtggtctggatagaatataaatcagccacgacattctcttaagccaaagcctaatccagaacaaggccccaactctttcaattctatgaaggctgagaggtgaggaagctgcagaagagaaatttgaagctagcagaagttgattcatgaggcttaaggaaaggctccataacataaaagtgcaaggtgaagctacaagtgctgattgtagaagctgcagcaagttatccagaagatctaactaagatccttgatgaaggtggctgcactgaacaacagattttcaatgtaacagccttctactggaagaagatgccgtggaggacttttatagttagagagaagtcaatgcctggcctcaaagcttcaaaggacagtctgactcttttgttaggggctaatgcagctggtggcttgaagttgaagccagtgcccctttaccattctgaaaatcctagggcccttaagaattatgttaaatcggccgggcatggtggctcatgtctgtaatcccggcactttgggaggccgaggcaggtggatcacctgaggtcaggagttcaagatcaggctgaccaacatggcgaaaccccgtctctactaaaaaataaaaaaaattagctgggcatggtggcgggcgcctttaatcccagctacttgggaggctgaggcaggagaatcgcttggatctgggaggcagaggttgcagtgagctgagatcgcaccactgcactccagcctgggcaatagagagagactctgtctcaaaaaaaaaaaaaaaaaaaaaaaagaattatgctaaatctactctgcctatgctctgtaagtggaacaacgactcctggatgatagcacatttgtttacagaatggtttactgaatattttaagcccactgttgaggccaacttctcagaaaaaaaaaaaaaaaaaatatatatatatatatatatatatatgtatattcctttcaaaatattactgctcattgacagtgcacctagtcccacccaagagtgctgatggaaatgtcaaggagattaatgttgttttcatgcccgctaacataacattccttttgcagcccatggatcaaggaataattttgactttcaggtcttatttagaaaatactttctgtaaggttaaaactgtcgtargtagtgattctgtgatggatctgggcaaagtcaattgaaaaccttctggaaaggattcaccattctagataccattaagatcatttgtgattcataggaagaggtcaaaatataaaaatgaacaggagtttcgaagaagtggaattcaaccctcatggatgattttgaggggttcaagacttcagtggaggtagtaactgcaggtgtggtagaaatagcaagagaactagacttagaagtggagcctgaaggtgtgactgaatgcagcaatctcatgataaaacttgaagggatgaggagttgcttcttatggatgagcaaagaaagtgatttattgagatggaatctatttctgatgaagatgctctgaacattgttgaaatgacaatgaagggtttatactgtttcataaacttagttaataaagcagtggcaggggttgagagtatactctgattttaaaagaaattattctctgggtaaaacagtatcaaacagcattgcatgctgcaaagaaatctttagtgaaggaaagactcaatcaatgagacaaacttcattgttgtcctcctttaagaaattgccacagccactccagccttcagcagtcaccacctggatcagtccacagccatcaacattgaggcaggacccgccaccagcaaaaagattacaactccctgaaagctcacatgatcattagcattttttagcaatgaaatattttaaagttaaggtatgtacactgttttttagaataatactgcatacttaatagactatagtataatataaacataacatttatatgtactgggaaaccagaaactttgtgtgactcactttattgtgatattagctttattgtggtggtctggaacagaacctacaatagctccaaggtatgcctgtaaattaaaatgataggatactgtttctcacattagagtaggaaaattgaaaaagcctgacatgaccaagtgtttytgagaatgttcagtgacaggacttttttttttttttttttttttttgagatggagtctcaccgtgtcgccccaggctggattgcaatggctcaatcttggctcactgcaatctccgcctcctgggctcaagtgattctcccgcctcagcctcccgagtagctgggactacaggcgcccgccatcatgccctgctaatttatgtatttttagtagagatggggtttcaccatgttggccatgctggtctcgaactcctgacctcaagtaatctgcctgccttggcctcccaaagcgctaggattacagacgtgagccaccgtgcccagccggactttttttatacagttggtggaagtactaattggtacaattgatttggagaacagttttacactatcttgtcaagctgaagttgtatgtctttatgagttggaagttttgctttttagagaagctcttacacatgcaggtggaggtagaatgttcattgcagcaaaaaattgaaaacagcctcaatttttgtcagctggaagaatggataaattgtggtatatttatacaatggcacactgtacaacagctacaatgaatgaaacagaaccatctttatagaattaaagcttagaaatataatatcaaaaagcaagttgaagaatgatataggcagtatgaaattatttttgtgacatgtcaaatcatactgtatattgtgaatgcccaacgtgttttaatgaataaataaatacagtggaaacgaccaactccaatcctggagtagtggttacctgcgaagttggggcatgtttgagggagagggcattgggattgagaaattgtataatgtatctgtttctgttttatttctttttttaaaaattgaggcaaataaagcaaaatgctaatggatgttagatatagtggtgtttgctatatttttctgtttgattttgcttgaaatatttaataatagaaatcaataagtctaagctgtttattaccacagtacaaaaactacttataaagcagtaagttaaataatctggtaactgttgaccactcacaatggtccaggcacagtgctaagtactagatattcagtaatgagcaacacatataaaggcactaccttcagattgagggagacagacaatagatatgttaataaataattacctagataaagtgctatgagggaaataaagagggtgatgaaatagagaataattggtagaggctattttaaatagagtggtcagggaaggcttccttgaagaggtgatattctagccgggtgaaacttgaaagttaaaacaaatggtgcagaaagctggggcaagaacattccaacaagtccacagacttagaggcaggcaaaggcttagtggggttccaggagcagaaaggatattagtatgtttggagtgtagtgaggaataagttagagggagatgaggatagaagggtttgcaagatgtaggtcatgtagagccttgttgccatggtaaggagcttgggttttattgtaagagcaatgggaaactattaaagagttttaagcagagaagtgactttgtaggatttgtgtttcaaaaaagattattctggctgctatgtggattataaaggggcaaaagtgaactmtagaaaaccatttagggaggctgttatagtagtatgggtaagagatgaggtggctcagtttagggttgtggaggtggaaagccatggacacatttgagatatatctgaagagaaccttgaggccttgatggactcgttggagaggaagggaaaagaattaatgactagtcttaagattttgacttaagcacagagtagatgacaactgaaatgattaagactggagaagagatttaggggccaaaatcaagagtccccttttggacatactagtttgagagtcttgttataaacaatttccatgtgaaaatgtgaactagtgatataactatacaaatacagagttcagggcagtagtctgggtgaaaatagaattttatagtatcttagacttaattgattgtaaaatgcaccactattttatttttttccctcatgatgaggggaaaaatgctgctgattatactgtgatacaagctttcttattactttgagtatttttaatttattgaaagagctctctgagagtttatttaaactgttaatgctgttcagccaaagatcaccaaaacacaccttgtagttaaataagttgggtttattgcttgttccagtgagggaaaacacacatcgtagggaaacatgtggtatctcagtaagatggtgttaaaaaagaccttgttatataggatttgggctttgattatgtgatggcgggggtgtctaaggaagtggggtccgctatagattggatgttgacagaaagcagggacagttctatgatttggtattttgtggttggcatagtgacctgtcattagacaaatttatgcaatggtcttgttttgtttaattttaccatggtctcatagtaacctcaagttggttggtattctttgaaattgtctgtgtccccaaaagggggaattagaagatgatacaaacttttacatacacccaattgagtattatacagctataacaagaaagagtaaggtctttrtgagctgataaggatttatttaggtgaaaaaaaaagcaagatgtataagaatgtatattgtatgctaatttttgtatagaaagaagggaaaataagaatatctgttttggccgggtgcggtggctcacgcctgtaatcccagcactttgggaggccgaggtgggcagaccacgaggtcaatagatcgagaccatcctggccaacatggtgaaacggtgtctctactaaaaatacaaaaattagctgggcgtggtggtatgttcctgtagtcccagctacttgggaggctgaggcaggagaatcgcttgaacctgggaggcagaggttgcagtgagctgagatcatgccactgcactccagcctggcgacagagtgagactccatctcaaaaaaaaaaaaaaaaaaaagaaaagaatatctgttttgtatgtttgtttgagacagggtctcactctgtcacccaggctggagtgcagtggtgtgatcctggctcactgcagtctccacctctcaggcccaagtgaacctcctacctcagtctcccaagtagctaggactacaggcacatgccatcacgccaggctaatttttgtattttttgtagagacagggtttcaccatgttgcccaggctggttttgaactcctgagctcaagcgatctacccaccttggtctcccaaagtgctgggattacaggcatcagtcactgtgcctggatgaaaataagaatatctaaatatatttgcaaatttttgcaaaacacgcatatacagagaatagataaaccagaaatgaatgaaatgtttaccggtatgtggggaataggaatgtggtaaaggaggatgggtttgggagcaagacttctgaggaaatcattttataaagtttgaattttgaacaatgggaatgttttacatattcaaagataaaattgtcttaaaaaaaacaggccgggcttggtggctcatgcctgtaatctcagcactttgggaggctgaggcgggcagatgacgaggtcaagagatcgagaccatcctggccaacatggggaaaccctgtctctactaaaaatacagaaattagctgggtgcgatggcatgtgcctgtaatcccagctactcaggaggctgaggcaggagaatcgcttgaacccaggaggcagaggttgcagtaaaccgagatcgtgccactgcactccagcctggcgacaaagtgggactctgtctctctaaaaaaaaaaaaaaaagaaagaaaagaaaaaagcaaattaaataaacagaaccaaaaggacctaactgtrtatcaaattgatgacaaaatcttacagataaattaatcaatacacataatatttgaacacagtactctggtactttagtagatcatgtcctttttaaaaatcaaccttccccccttttagtggaatatattctaaggacaaaaagaactgcaattaaatgttacacttacaagggttatttctcccttttctttttttttaaattgaatacaaattttcttttttcttattttccacagggaaacttctgcaagtaattagtaggtttattgttggtaaaaaatattgatattctaattctgaaacttttttgggataaarcaaatatataaatgtactaatgttattaggaagcttttcactgtaaaagatataaatcttaaataacaaggtagggagaagccttgtaagagcttgaattggaaacttcactatgacatcgttttttaaattcctagctagcccactgaaagatgaacattgactatacctcagtgtacttagatcatggcttctacattaccatttccaaccaaagaaactatgcctccttgaaaaaatggccaattattccaaatctgtgccagaaaaagaacagtatcytcaaaagctacacggtcatgtcagaatcatacaggacttgatttgaagggatttctactggccaagtttgtgacaatttgaacatcaacaagagtaataatggtaatggaatttggctgagtggatcacaaaagaaaatctgtgagtcggcggggcgtggtggatcacacctgtaatctcagcactttgggaggccgaggtgggcagatcacaaggtcaggagatcaagaccatcctggctaacatggtgaaacctcgtctctactaaaaatacaaaaaaattacccgggcctggtggtgggcgcctgtagtcccagctactcgggaggccgaggcaggagaatggcgtgaacccgggaggcggagcttgcagtgagccgagattacgccactgcactccagcctgggtgacagagcgggactccatctcaaaaaaaagaaaaaaataaaaagaaaatccgtgagcccatagtgaaagtaaaaaagaaatatagaccagagagggtacaggctggtggtgtttgcgaaggcatcatgagggatctagagctgttcagtctctttactgtgacagttggtagatgaacctatacaggtgatcaaattggatagaacttaacacacagacgcacatgcacatacctgcaagcgaatgcaagtaaaactgggaaatctgaataacataggtgggttgtgtcaatggcagtatcctgattttgattttatactatagttttgtaraatgctaccattgggggaaactaggaaaagtgtacaagggatctctcagtactatttcttttttaaaaatttttatttttgtgggtacacagtaggtgtgtatatttatttcttagagcttcatgtgaatccatatctcaataaaaatttcaattaaaaaaagggagaggagaaaaagggaaaactcctttttacagaagaatgccaactagaaaatgaaaaaggaatgattgaattagaaaattataatgttgccgggtgcggtggctcacgcctgtaatcccagcactttgggagtccgaggccagcagatcaccagaggtcgggagtttgagaccaacctgactaacatggagaaaccctgtctctactaaaaatacaaaattagccgggcgtggttgcacgtgtctgtaatcccagctgctcgggaggctgaggcaggagaattgcttgaacccgggaggcggaggttgcggtgagccgagatggcaccattgcactccagcctgggcaacaagggaaattctgtctaaaaaaaaaaaaaaagaaagaaagaaaattataattttgtgacctccagtgtaaaattgcatcaggtaaggattaacaatggttgacygtaccattggatgaaagagtgttgtgagggaatggcagattacattattaggtaacttgctaattacaaaaggaaacactacagtggaaagttctggcagtcaccttctcaatttaatgatcaaatttattgtcaccctcttaacataaggatgccataagtaaccatatcacctatgaaatatttttgttaaaaatggttaatatgaaggaatggccagacaaatccagaatatgatacattttacaagacaattggcatgggctaataaataaaagtgtaagtctgtattaaataaaaataggcatggcaatcaagaggaatgcatgaacctggattggatcctggatttttttttttttttttgagacggagtctcgctctgtcgcccaggctggagtgtctcagctcattggaagctccgcctcccgggttcacgccattctcctgcctcagcctcctgagtagctgggactacrggcgcctgccaccaggcccggctaatttttttttttttttgtatttttagtagagacagggtttcaccgtgttagccaggatggcctctatctcctgaccttgtgatccgcccgcctcggcctcccaaagtgctgggattacaggcgtgagccaccygyggccgattctggattttttttaaagtgtaaatgtagtggcttcaggataactgcatcaagagtgccatcaaaattcgcaatttatttcttctttccctgaatctgggcaggccctctggcagcttagtgaatagaatgctggagaatgatgctgtgaccagttccaggcttactctttgtaagagaactgccagcttccgcttcttctctcttagaccacttgctcttgagacattccctctcggaactgagcagtcctgttgcgggagacccaagccacatggagtggccaaatatagttattctggtcttagctgaactaccaaatgacaaccagcaacaattatgagctaagtgagcgacccgtcttgaatgttccagcccaatatactatagccccagccaacatcacatggaatagaactatatagctgagccccagtcaacctgtagaatcatgtaggataataaaatagttgttttaagttttagagtggttgcgtgcattacagtaaataacaaaaacaattgaacatctttgagacaattgttcatgtagattttttattagataatatggaattattgttcttaggtattagaaagctttggtaattatacaagataatataatttcttaggagaggaaatatgtggaggttaagtatgatgtctgcagctcattttgaaataattcagcaaaaaactatgcatataaaaggcaaatattgggagctttcattatattttgtagaatggaggctacccccaccctaaaaaaaccaaatatgacatttagcaatcaattggtagaaggtatatgagttttcattatattatactattttttctttttttacttgagacagggtcttgctctgtcacccaggctggagtccaggctggtcccaaactactggcatcaagtgatctgcctgctttggccttccaaagtgctgggattgcaggtgtgagccaccatgcctggcctagtttttcaatttttttgtagatttaaatgttttcaaaataaaacattggggtgaaaaggatcacattaaaaatacacagagttttggggttccccggcagccaccagtgtgctcagtgatttgctcgaaggattcatgggacttagtatataattgtactcatgactaaggtttgttacagctggagaatacaggacaggatcagtaaaggaaaaaaagcacaagtggagtctggagaaatccacgtataagcctctttatcattcttcctcctgtgagggggtatatttgagcacactccaccagcgacgaaaaatgcaatgacttatgtataacttttctgcccagggaagcccgttagtgattgagttcccaggattttttttttttttgagacggagtctcactctgtcaccgaggctggagtgcagtggcctgatctcggctcactgcaacctccgcctcctgggttcaagcaattctcctgcctcagcctcttgagtagctgggattacaggcgcacgccatcatgcctggctaatttttgtatttttagtagagacagggtttcaccatattggtcaggctggtctcgaactcctgacctcatgatccacccaccttggcctcccaaagtgctgggattacaggcatgagccaccgcgcccggccaagtacccatgatttttattggggcttgttacttaggtaacctctgcctaacatgtaccaaaatttcaggctcctagaaggaaagttgatattcaccataaatcacattgtttgtaggcacagtttaggaacattggaccacccttattagttaggtgatggaggaaagccgagtttctagatagatgccagccaaaggctgatcttggaagcaggcccttttaaagactgcagcctcaggcttgctatattaactcttctgcacacatactaatcacataaatttgaagataaatactaatgatttgaatgagaaaggaaactcttgtmtaaagggttagatagcaggtagtttattgtgaactctttgtagttctgccagagattctgaaaatgggatgaattgatttcagttcacttaacagttattgaggcattaggtatatggaaatgaataagacacagtccctgccatcaaagaagtcaggtcaagaggggcagttaaatgatcaacaatgattgtggaacagtgtgataagtattatagtaaaggtgaatacaaagtaggaaggaaactgttgattctgatgttagggtgaggaggagagaacaggaattaacatttgacctgaactttgaaagagaagtagtgttcaacaggcatggaaacttagatgggcactttagtcagaggaaaaaaagcaactggaatgtgaattcttactagttgccagggtctgtgtgtgctattataacttaatccttacagcagacctgtgatgtaagtgattttattgttatttttaaaattatggctgggcatggtggctcatgcctgtaatcccagcagtttggtaggctgaggtggaggattacttgagcccaggagttcrggaccagcctgggcaacatagtgagacttgtctctgcaaaaaatttaaaaaagatattagccaggcatggtgatgtggacctgtagtcccagatacttgagaggctaaggtgggaggatccttgagcctgggagatggaggctgcagtgagccgagattgcaccacttcactccagccctgggtgacagagggagattctgtctcaaaaaaaaaaaaaaaaaaagatgattaagatgatttgaaaattttcgtattcccttttccctcttcactcctttttttgagacagggtcttagtctgtcatccaggctggaatgcagtggtgcaataaaagctcactgcagcttcgacctcctgggctcaagttgtcctcccagcttagcctcccaagtagctgggaccgcaggcatgtgccaccacacttggctaatttttttatttttgtagagacggtctrtgttgttcaggctggtcttgaactcctgggctcaagtgatcttcctgcgtaggcctcccgaagtgttgggattataggcatgagctaccttgcccagccactctctttctctttttattttttaaaagaattagagacagggtctgactacttgctatgtatgttcccctagctgcatttgaacccctgggttcaagtgatcctcccacttcagcctccccggtagctgggactataggtgcatggcaccgggcctggctgttcactcctcctttcataagcaaaggcacagtttcttttcttgtaagagatgggctaggttgtgtagattgagctttctaataaaaacaactaaaagtgttgaataaaaatgtcttaaaaacatcgaaaagttaacamggtagaaatgaaattgggaactcagataagctgaacgtggaaactgcttttgccttgcgaacatttgctcaactaagtgaacttgaactttggttttgacagcccaacagggcgcaggcaatagaagtaaggtcaaacccagcctggtgcggtggctcacagctgtagtcccagcactttgggaggccgaggtgggcggatcacaatgtcaggagtttgagaccagcctgaccaatatggtgtaatcccatctctgctgggaaaaaaaaaaaaaaaaaaaaaaaaattagctgggtgtggtggcgcacacctgtaatcccagctgctcgggaggctgaagcagaagaatcgcttgagcctgggaggtggaggttgcagtgaattgagatggcgccactgtactccagcctgggtgacaaagcgagattccatctcaaaaaaaaaaaaaaaaaaaaagatcaaagcccaagacccaccaaaggtgtaacatgtaataggaaatcttctccataaaccgtatttcagagaggactatacacttagggttaggatgaactagaaataagcccattccatctgcctgtctccagttgccttaacacttagctaagtattaatagaagaaaaggtccttgagaagttaaaactgtaagttggctctcaaaggttatgtagcccaaattcacacaatttaggagaaccaaaactctaaacttgagaaccctcaagccatgcatttagtttaaagtggcctcaactggtaggacccctaggtccctggcagaagcaaatgcagatcgatcctctgtagtagctatgctgatatcacacaaaatagacttttaggcacaagtgtatttttagagatagaaagggcagttcataatgataaggtttcagtttaccaggaagatacaacaatattaagttatatgcatctaggctggacacagtagctcatgcctgtaatcccagcactttgggaggccgaggcaggcagatcacctgaggtcaggagttcaagactagcctggccaacatggtgaaacctcgtctctgcaaaaatacaaaaattagccgggcatgatggcagtcgcctgtaataccagctactcaggaggctgaggcaggagaatcgcctgaacctgggaggcagaggttacagtgagccgagactgagccattgcactccagcctgggtgaatttttcaaaaaaaagaaagaaaatattaaacaagttcatatcagataaaatggataaattccaagaaataaagacagtttctataaaagagatagaaaacctggatagcccaataaccattaaatacatggattcagtagtcaaaaatcttcccacagggaaacttgcaggtctaaatggcttcacctggaagttctaccaagcatttaaataaataattgcagttaataattatttgttaatctgttgctacataacaaatcacccaatatgtagtggcttaaagcaacaatagtcgtttattgtctctcacagtttctgtgggttaggacttcaggaggggctctgttgggttgttctggcttggaatctcatgaggttgtggtcagatgacagctgtagttggggaacacagaaagctaagcccacagaagaaaaacaaacaccrtgacactgggaaggagctgcctcttgcttgttaaccttgagctggaagtaggagttgggttgtttctcatccactggaaaaagtgttaagtagtttcactttacattatgatgctaaattgaaggtatgtagcaacttctgggaatcaatgagcagtctggagaattttgacctctccygagtcttgtttcctttgggggttaagagagtctggagcctctaagttagagacacaggcacagcgtgtttcattttcattcaccacctgcaatcctctgcccttccctctacctgttggaattaatttatcattcaggttgcagtacaggtctcacctttggtgaagcttttccccaccactctattcctgttgtgctctctctctctcctaactctgctaacacttactgccttttaccacccttttcgtcttgaccatatgtttcttaataactatttgatatcttctcacagaaagtgcctcatctgtcccactggatcctctgttctacagctcaggggttgagtcctggagatctctgtattcccgtgtcatatctcacatagcaccttgcatgactggccattttcagaatggactaattcagtacttgattgtttgcacagttagagcaggttagggtccttcttgcaggagtctgcagtcttagataggtacagacagacatagagaaagcctacagagatgtgaataaatgactaaatatatttctgggggaggcacagagtaggagtttgagtccttatgggagagggatgaggggaagaagccccttgtttaatctcattttttctcttcattaaaatgccttcttgcatccttggtctcttttcacagaaccctgccatcagcatcactgaaaacgtgctgcatttcaaaggtcagtatcccagcaaatgctcccatctctatacacagttaaggaggtgtggtggtggtttcccttttttaaaaaaatgtatttgtcttacttgttttttgctgatgttcacgcctctgatcctcatgaggtaagctaaattgttttgaaatatatgattagaaaagtcaaagaattggtttaaaatcctgtttcccccatggagaggcagtagatacagtgaaggaaaaaaaaaaaaagaatcctgggttagaaatcaggagacgtgtcttctagctctaattctgccgctatcttggacaagttattgacttctctggacctgtacaatgaagatgctgggttttaatctgtgtttctcaaactcgaggacccgtggacaccaaataatgtttccacaggactctcaagggctcatggacccgagattgagaaacgtgaagaattaaatatggtcactttaagtgatatttggctccactgcagctgtgaatacagacacacatacagctactgattgcatggcagtacttgattatgaagtggccatctagatgatccagaatatgctgctttttttaaaaaaaaattattatggaaacataaaatagaaaatttatttatttatttattttgagattgagtcttgctctgtcacccaggctggaatgcagtggcatgatttcggctcactgcaacctccgcctcctgggttcaagtgattctcgtgcctcagtctcccgagtagctgggattacaggcatccgccaccacgtccagctaatttttgtatttttagtagagacagggtttcactatgttgtccaggctggtcttgaactcctgacctcaagtgatctgcccacctcggcctctcgaagtgctgggattataggcgtgagccaccgtgcctgttttttgttttttgtttttgtttttgttttttttaaatatttttcttttttttttaaatttattatttttttattatactttaagttttagggtacatgtgcccgttgtgcaggttagttacatatgtatacatgtgccatgctggtgcgctgcacccactaactcgtcatctagcattaggtatatctcccgatgctatccctccccactccccccaccccacaacagtccccagagtgtgatattccccttcctgtgtccatgtgatctcattgttcaattcccacctatgagtgagaatatgcggtgtttggttttttgttcttgcgatagtttactgagaatgatgatttccaatttcatccatgtccctacaaaggacatgaactcatcattttttatggctgcatagtattccatggtgtatatgtgccacattttcttaataaaaatatggaacgcttcacgaatttgcgtgtcatccttgcacasgggccatactaatcttctctgtatcattccaattttagtatatgtgctgccgaagtgagcacatatttttctttttaaacatttaaaaaaataataattatttattacatcccttctcactattcctaagaaattttcttgatgagactttgtggctccctgatactagattagcagaccagtttgagaaacactacactctagatgatgtctcaggccttttcagctctgacagtctctgattctgtgaatctgcctctatctgccttctcctcagtccctcagcagatttactgctctactggagagggtgggatttccattcactgtcacccagtggggtaggattctctctgctctctgttccagttcctgggattattggagcataaagagtttctgctttatgtgaaattccatctactgtaatatacttgcatgaaagtacagcctggcttttgtatctgcttttcaagatgagagtagtcaccactcagctcaggttttttgggaattatatacatttacatgaaaattaaagtgataaaagcatatcttgccacttagaccttatatactgtcctaccktaaggaatttatcgtcacagagaataattgctacctgtagcgaatattaggcaggttattagtctacatatgatcagataaggaaagagagtcccagaagggaaccaaatggtaaatgaatcagagaggagagtggaagggtggttcagcagcagctgctgggtccagcagtcactggcatctaggcatggtgccagctagaattggggaaaggagccatgtcaaggcatagggatggggcattggccaactcaggtacttccctcctagttccacctgtccttcataagctgcgaaagattgtatttctttttccttgttccatttgggatgtgctaaaggaggagtcagcttctgccttcattctctctccctggttgggaggttttagattcagagctgtccaagacaacccagcatttccatgtaccctgcagtcaagatgatacacccmccaatttttgtctgctctagatttagagccaaagtaattgtgaaagttaaatttatatccgtgtggctcctttggcattgctttctctattctttttcctgcctgttatttgtgtggggtatcatcagggtcacagtggaagattgggtaaatacgccaaaactgacatcagaggacatatggagataaacttgtgtcaaagatttggcctatctagctgttgaggagctctgcgcacaagcccccacacattttaacaggacccattaagatttgtggactacgatgcttcttggccttttggctacaatcaagtatgatattcgtgccaggtacagtggctcatgtctgtaatcccagcactttgggaggctgaggcgggtggatcacaaggtcaggagatcgagaccatcctggttaacacggtgaaaccccgtctctactaaaaataaaaaaaattatctgggcatggtggcgggagcctgtagtcccagctactcgggaggctgaggcaggagaatggcatgaacccgggaggcggagcttgcagtgagccgagatcatgccactgcactccagcctgggcaacagagcaagactctgtctcaaaaaaaaaaaagtgtaatattcgcatacttgggaaagaactgcaccaagctggcttttggatggccttgctctgctcaagtttgcagtaacccacatttctttctttatagctcaaggacatggtgccaaaggagacaatgtctatraatttcacctggagttcttagaccttgtgaaaccagaggtatgttctttcctttctcacttcccttcccattttaggaaatgaataccagtagtttagtgaaatggggagcagggtttgtggagagaagaagataaaaaccaaaggggaataatagagttcttttatttggaacagagcccaggttttagctgcagaggaatgggaaagtcagagaccccaagttgagtcagggccctgccrtttattagcrgtgtgatcttgaacaagtctcttmacttcttcgagttctggtgttctcatgtgttaaatgaaggtctggactaagtgatccttccagctctgatattctctggttttagtgatggcagaggaatatggcacccattgagaacagagttacatagagtggttgaagcccccaccaggggttactttcatgtgactttgccacagttgcaggtgagaaaaatagaaatcagaaagggtgaaggcagctggccttcagaaagaatgctgcagatatcatcaaaacttcccttcccttagagcctgaggaagcttctctcataagcagggagagaatccaatagatggggtattttggcttctggaattacacttagctctggtggcttgagcttcttgatttccgtgcgcagrtgctcagttgttttgagaaagcatgaataataaccagtggtacagtgggcagagaacctgtcatggagcttcctttggagaaaagggacaggacatgtagacaaacaatgagctggaatggcctataagaatttgagtttagttgggaagactccccaaattgacccctgtgaaaaaatctgtaactgwtccaatacagttctgatcttgatgcaggtgtttctaaaaccggggtctgctgagccaggacagtcattttcatgggaggaaaatttataagctgagggtaattggatgcagtacccttgagagggtgattggacatagtaccttgcatgatgtggctgtggcaggaggttcatgctagttccctccagcctaaccaggaactatttgcctttcttatcctgatatcctcctgtatcattcactgggggaatcagagaaggacattatgtccttaccagttctccatgccagccgttggtctagatcaacctttttggcaccagggaccaattttgtggaaggcactttttccacagatggtggaatggggatggtttcagggtgattcaaatgcattacatttgttgtgcactttatttctgttattattacattgtaatatataatgaatacaactcaccataatgtagaatcagtgagagccctgagcttgttttcttgcaactagacagtcccatctgggggtgatgggagacagtgacagatcatcaggcattatagtctcataaagagtgagcaacctagattccttgcatgcacaattcacaatagagttcacgctcctatgtgaatcttgtgccaatgctgatctgacaggaggcagggcttaggcagtaatgcaagtgatggagagcgagtctggagagcgagtctaaatataggtgaagtttcactcacttgcccaccactcagctcctcctgtgtggcccgattcccaacaggccatggaccagtatcagtccatggcccaggagttggagacccctggtctagatgttccctttgcatcaggacttgcaggaccagagaaagaaggagaataaatatatcctgcagcttctatgtacggcgcccctggcatggtgctgcttcagggaacagaagagggcattctcacattttcactttctctcctagcctgtttacaaactgacccagaggcaggtaaacattacagtacagaagaaagtgagtcagtggtgggagagactcacaaagcaggaaaagcgaccactgtttttggctcctgactttgatcgttggctggatgaatctgatgcggaaatggagctcagagctaaggttagtaaggatcctaggatctagccattgaggacaaatcatggggaacccacgttattcaggccacttcagatacctctcggtctgaaagaatagctacaaagttacaaattcatttaaagacctggtgatgtgattttcaagaagtattggctatgtattttatagactttccttcggttgaaatctgtctgatgtttctcttacaactagactaaggtgatagatgttgaggagaagaccactgaagtaaagtgcaattcttatcacatcatatcaagagtacatacggccgggcacggtggctcacacctgtaatcccagcactttgggaggccaaggtgcgtggatcacgaggtcaggagattgagaccatcctggctagcacagtgaaaccctgtctctactaaaaatacaaaaaattagccgggcrtggtggtgcatgcctgtagtcggagctgctcaggaggctgaggcaggagaatggcgtgaactcgggaggcggggcttgccgtgagccgagatcacgccactgcactccagcctgggcaacagagcgagagtctcaaaaaaaaaaaaaaaaagtacatactgtcaacgtgacacatcactgttgatattaaccatgggttagctggcttgaggtgacgcttatcaggtttctctaccataaggttattttcctcttggctctccttggaaggaagtcactatgtgtagcctacatttaaggagcagggagttatgcttcctgtcctttagatggagggagtatctacataatttatttggaattcttctgcataggagaataattatgcatgtctattgtctcccatttatttattcaatcatttatatcatgtgagtacatgggtatttattttatactttgagttataatctaatattatttattttgttgctcaaattcttccagctttggcactaactggcctttggttatgtcctcatcctgcccatctttcatttggcttttgtatctttttgagaaagcgccatcattatgggactgttttttttttttttttgagcacttccttactttctggcagtataagctgctccaggcttatcttgcatgtatgtttcctgctccagccctggaacagccatttcttcaagcatctctgttcttattgtggaatagcattggaaaccaagatctgggtgccgggtatgctcattgctaccaggttgccattgcctttaagttctcttcactgacagaacaagaaaatatatgtttggatagtaacccatgcatacacatacacctgtaaatatttctgtatggatccatctgtatctctgttaagctaaacgtgagttcatagtgatgttggaaacatgatcttagcttctggaaaaattatactaaaattctagaagtcttgaaaaataaaatagcagtctacctcctgccttaaacttctgttttatttctctgactgcgacagatcttctggatgtcctttccagctttaagattccaaggtcacttgtcagtttggaagccagctcactgggttaattttgtgaacaatggatgggcacctgtgatgctaatgctgcttagtaagcaggagtcaggcgtttggccctatgacctagaatattctcccaatgatgcactgaccccaactggaggagttggctttgagggagtcagattactcagccagcatatggacttttgcaagcatctgggaattctaacttgtgttcttggaaaacttttgtctaaattctaggaagaagagcgcctaaataaactccgactggaaagcgaaggctctcctgaaagtaagttgtgctgctgccatggtagttaccagttaacttgtgctagtgttggaagtatggataattgtgatgtggcaggagagctaatgatttcatcccggtgagctgtgtgggtgagtttatgaaaaagcttttaggtccagtgcttaaggtctgcactacccacgtcagaatccttacctttaatgtgtcctttgtgttttggttgttatttcatgagtacaccaaggctagtgtagcagaatgaaagaactcctggactggcctcatggcagatggcaaccaaatcctgcagagacttgtggaaatgattgcatggatccaaggctacactccttcagcctggtgtttttctcccagctgaaatctcaaaggctgtatgatacataagtgtggttgtcagcctgaaagatggagagtattctgtgtagtcctgctattcattaacctttaacaaatcaatttctgtttccgtctaaccactttaagcaggaagctctgtaagtgtattatcttctgggtgatgtagttagattaaattcagcagctatctgttaaagtcatgctgtgtggcaagcattgtgctgggcccttgactaagagccagagggatccatcgtagcgcctatactcaaaagggcttacattcttagtgagggaactgcaggtgtatgtaaaactacctctgaaaagcagaatgaaataagtccttcttacttgttctaagttgaaatttttcaaattttagtggtacttatctagcatgccataaataagggaggggaaagttttggagcagtagttttcaaactgtgttccatggtgccccagggggttcccagagatgctttggaggagtagatcacacaaacaggtctacctcagtcagagcagctctcttttgagtgttatgtgttggcattccgaataaggtttcttttgagaaggaattttaaaaaatatttgaatagcgactaccttaggggaatattctttcaggaaagccgaggaggggagaggttcagtggaggcaaagaataacaacataaaaaagccactttgagatttaaattaatgttttggtgtcttaaagggataaacttcaaaaatagataaaaattctaatatatggattttttgggtgttaggtaaagctttaactgttttacctaaattcataaagttttctgaacaaggaagttctttatggtggggaagtgtaatagatttttgtagttttgaagaaataacttttaattagctaaatgttgctagaagtctgacattttttggagtcttaggataaggctgtgttgtttttttttttttgagatggggtcttgctatgctgtccaggctgatcttaagatactgggctcaagtgatccttctacctcagcctcccaagtagctgggattacaggcatatgccactgtgcctggcttaggctgcttttgattgaccacattattaaatgtgattatttgaggaccaaccagatgtctttgcagaatatctgtagcctaggaataaatatgtagcagcaaaatctgaacaccatagatctcctcttaagaactgtccttttctttaccctactcctttgactcaacaatgactctgtcaaagcctcttgtttcttcctttactctgtaattggctgtatcttcatgaatcttaggctgcagataaaattaatgtcccttattttcctgcatgttggtttgaaattgtcctgctttggttatgtcctcagtctgcccatctttcaaagcccagatcaggccaagtatgatggctcatgcctctaatcccagcactttgggagactgaggcgggaggatcttttaggccaggagttcgagatcagactgggcaacgtagcaagactgtgtttctacaaaacataatggaatataaaattagcaaggtgtggtggcacagacctgtagaactaactacttgggcggtgaggtgggaggatgggttgactccaggaggtcagggctgcagagagctatggtcccaccactgcattctaacctgggaacagagtgagaccctatctcaaaaaaaaaaaaaaaaagcccggattagataccagctttatccatgtagactagcttgatgcctacttctccagcctaatgtcgttttttcaccttgaaagtttcacaagacattacttgttactccccacctggtattacagtttttagattgtaagctctgagggcagccttgaactacctttgtatcccagtagttcttctcacagtaccttgcacattgtaggtattcagttaatgcttggttgagtgaatatataaccaaatatcagggttgtttttttcatttactgtatctgtctctttgagctagtttgacctcagtgaccttaaagaaattccagaaaagaagaaactatggattatattaagatgactggagggccaggcacggtggctcatgcctgtaatcccagcactttgggaggccaaggtgggcagatcacctgaggttaggagtttaagaccaccctggccaacatgatgaaaccctgtctctgctaaaatacaaaaattagccgggcgtggtggcggaagcctgtaatctcagctactcgggaggctgaggcaggagaattgcttgaacctgggaggtggagcgtgcagtgagccgagattgtgccactgcactccagcctgggtgacagagcaagactctgtctcaaaaaaaaaagaaaaaaaaaattgagccggagctgaggaaatctttatttcctttttgtaatgcctcttcagatggccactcatttttttgccaggtgttatggaaaaaatacaacactacaacactcaactgctttttcctattttcttactcaacaacaatcaacacagaagacttctgtgaccaagtgggtgggttttttcccccacataccaagcaagcaatgagttctgcagcagacaccagctgggtgccctctggttcaattctgacactgtttacctagagatagcatcaggttcccacagatggagggctcagtccccaagacacacccctgcccccagcctgtcccgagtctgaacctccagaacttgtgaccaataggctgtaaattacggttcccacaacccgctcctgtggtttgattgatttgctagcgtggctccacagaactcagggaaacacatttgttcatttattataagggatattatgaaggatacagatgaagagattaggaggaagtatggaggaagtggcgcggagcttccatgccctccccaggtgtgccaccctccaggaacctccgtgtgttcagctgtctggaagctgactaaaccctgtccccttgggccttttatggagacttcatcggataggcatgactgaagcgtgttgaactgtgttgaaatgtgattggacaaaaagggtctgacctaaacccagcaaggcctgtctgtccagattcttctcagcctstctgtgcagtgttccctcctccagagtatgaggcaagaccctctctggaatgagggtcttaggacccacaatcagattagagtcgtgccttgggcagctgaaaggaaggcagggaaggtcatagagggagattctgttgtctgaggcctaaagtgtcccaacattataacaaaaaactgtaacaagggctgtgggagttataagccagaaaccgttgccgaaaacctatatatacatatacacatatcataatatcacaccaggggtaatatttttttcttgggtttgttatgtctgtatacctattcttcaaggctgggaaaggaagtcctgctgaaaatacatgctggagagcaatgttccttgtatgtttctctgtgggagtaggagcccaggctggtgaggacctggaccaggtatttgtgtgggagcttaggagcattcaggaaggaaaaagsgttgaagtcatccagatatgcctcatacacctgtctcctgctgggactattgcttttaatagcttactgctttgctttgctttacagctcttacaaacttaaggaaaggatacctgtttatgtataatcttgtgcaattcttgggattctcctggatctttgtcaacctgactgtgcgattctgtatcttgggaaaaggcaagtaagacatttttggattaattttccctttctcagtagtttggcccagtattcaccaaagggagcactctctgcctttgatgttaataataacccctgcatttgtgcagcaccctctacttttcgttgtgctttcatagctcttatttcccatggccttgtgaaataagctgactggtattctttccatataacaggtaataaaatataggcctagagatggtcaaaaatggttcacatccatagctagccagagccacatcttgggctagaatccttttgtaaaaatgttcactaacaactaaataaattgatgtgatacttccagtgccaaagttatgcaaggccaaaagggttctcacccttttggagcctaaatacgttctaaaatgaactattctaaaacagaataaaaagagcatcataaagatattagttcttcttaaattaatttatgtgtttagcaggattctggctttgaccagtggcattccattggtaaatgccaatgggaaatttttgagaatttgatctaaagtattctgaaactttatttgatgaataaataggtaataaaatttaggagaagaaagattaatgggagaggatttttctacctgataatgaaagtatggaccaggtgtagtagctcatacctgtaatcccagcactttaacaggctgaagtggaaggatctcttgcgcccaggaggttgaagctgcagtaagccgtgatcatgacactgtactctagactgggtgatggagcaagaccttgactcttaaaaaaatttagaaaggtggctgtgcgtggtggctcacgcctgtaatcccagtactttgggaggtctaggtgggcagatcacgaggtcaagagatcgagaccatcctggtcaacatggtgaaacccccatctctactaaaattacaaaaattagctgggcatggtggtgcgtgcctgtagtcccagctactcgggaggctgaggcaggagaatcacttgaacccaggaggcgggggttgcagtgagccaagatcgtgccactgcactgcagcctggtgacagagtaagactccatctcaaaaaaaaaaaagagaaaggcatataaggtgtacgtgttaactttctggtaactggtagagcttactattcatgaccccattggcctgcacccttcctgcttagttaagtaagaaacttgaatctgactggatgtttgttattcctttcttasagttattttcacgaaaggagtaatctagtttgagaaatagttctgttggaatttaccaactgattcacccttaatgtatatttttgcctatagagtccttttatgacacattccatactgtggctgacatgatgtatttctgccagatgctggcagttgtggaaactatcaatgcagcaattggagtcactacrtcaccggtgctgccttctctgatccaggtattgaatagttaagctgaagggtgggtaatggaaggtcccattatttgtctagtgggtatgtgtattagtccattttcatgctgctcataaagacatacctgagactgggcagtttacaaaakaaagaggtttaattggacttacagttccatgtggctgggaaggtctcacgatcatggtggagggcgaaaggcacttcttacgtggtggcggcaagagagaatgaggaagaagcaaaagcagaaactcctgataaacccatcagatctcgtgagacttattcactatcctgagaatagcatgggaaagaccggccgcactgattcatttacctccccctaggtccctgccacaacacgtgggaatcctgggagatacaattaaagttgaaatttgaatggggacacagccaaaccatatcattctagccgtggcccctccaaatctcataccctcacatttcaaaaccaatcatgccttctcaacagtcccccaaagtcttatttcagcattaaccccaaagtccacagtccaaagtctcatctgagacaaggcaagtcccttctgcctttgagcctgtaaaatcaaagcacactagttacttcctagatacaaggggagtactggcattgggtaaatacagccgttccaaatgggagaaattggccaaaataaaggggttacagtgcccatgcaagtctgaaatccagtggggcggtcaaactttaaagctccaaaatgatctcctttgactccaggtctcacatccaggtcacgctgatgcaaaaggtgggttcccatggtcttaggcagctccactcctgtgactttgcagggagcagcctccctcccggctgctttcaccggctggcattgagtgtctgcagcttttccaggtgcatggtgcaagctgtcagtggatctaccactttggggtctggaggatggcggcctcttctcacagctccactaggcagtgccccagtagggattctgtgtgggggctccaaccccatgtttcccttcctcactgccctagcagaggttctccatgagggccccatccctgcagcaaacttttgcctgggcatccaggcatttccatacatcttctgaaatctgggcggaggtttccaaacctcaattcttgacttctctgcacccacaggctcaccaccacgtggaagctgccaaggcttggggcttgcaccctctgaagccacagcctgagctgtacattggcccctctcagccaaggctggagcagctgggacacagggcaccaaatccctaggttgcacacagcacagggaccctgggcctccgcgcctgtgatgggagggactgccatgaaggcctctgacatggtctggttacattttccccatggtcttggggattacattggggattacgttaggctccttgctacttgtgcaaatttctgcagccagcttgaggttctcctcaaaaaatgggtttttcttttctactgaatcatcaggctgcaaattttccaaacttttatgctgtttctcttttaaaacggaatgcttttaacagcacccaagtcacctcttgaatgcttttctgcttagaaatttctcctgccagataccctaaatcatctctctcaagttcagagttctacagatctctagggcaggggcaaaatgctgccagtctctttgctaaaatataacaagagtcacctttgctccagttcacctttgcttccaagaggttcttcatctccatctgagactacctcagcctggactttattgttcatatcactatcagcatttttgtcgaagccattcaacaaatctctacgaggttccaaacttacctacattttcctatcttcttctgagccctccaaactgttccaacctctgtctgttacccagttccaaggtcacttccacattttcgggtatcttttcagcaacatccaactttactggtaccaatttactgtattagtccgttttcccactgctgataaagacatacctgaaaccaggccgtttacaaaagaaagaggtttaattggatttacagttccatgtggcgggggaaggtctcacaattgtggtgcagggcraaaggcacttcttacatggcggtggcaagagagaatgaggaagaaacaaaagcggaaacccctgataagcccgccagatcttgtgagacttatttactaacatgggaatagcacgggaagaccagcccccatgattcagttacctccccctgggtcccttccacaacatgtgggaattctaggagatacaattcaagctgacatttgaatggggacacagccaaaccatatctgtatgttacattttgctaagaagtctcaattagtaaaaacacctatttgtacaggaatagcattattttacytgaacaagaaagaacatttaaaaccccagggttatttaccaaagtagacttttactatttcaggtctttttcattttttataatatccttatgaaatcacaaagttataaagagctttaagactagggaaatttgactcttaggcaggagctgaaaaacctaccttcagtctcyttagttagaaatgtatgtggtctcctcccaccttgtgtagatgaaggcagtacttmttaaaaacttgtattaatgaaaagtacaataatcaaactttaaaatttacagccaggcatggtggctcattcctgtaatccccatactttgggaagctgaggtaggaggattgcttgaggccagcagttggagaccacccttggcagcatagtgagaccccatttctaaaaaaataaaaatttgccaggcatggtgatgtgcacctatattcccactacttgggaggctgagacggaaggattccttgagtgcaggagttcgatgttgcagtgagctgggattgtgccactgccctccaacctgggcagcagagcgagacccctgtctctaaaaaaaataaaaaataaaaatttaatggatagtttgtgttgtagattagacatagctgaagagaaaattagtgaactgttttgagatacaggaaggaatagagagcacaaaaagtaaatatacagacgtaattttcttgaattataagactcaatattataatattgttagttctcatatttccctgtagattcaatacatttccaatcacaatctaaaaaattttggaatgtgaggagaaaattctgaagctttttgaaaaaacagagggccatccaggatagtagcatcattttcgataactaaaatgtgcaagcaacccaagtgttcatctacagatgaatggataagaatgactgttacatacatacaatgggatattatgtagccttaaaaatgaaagaaattctctcgtatgctacaatgtggatgaaccttaaggaaactatgctaagtgaaataagccagtcacagaaagtcaaatactagatgattctgcttacatggggtacttaaaatagtcaaaaccatagagacagaaagtaggatggtgtttgccaggggctggctgaatggggagttattgtttaatgggtcatagtttctttcttttttttttttttgagagtctcgccctgtcgcccaagctggagtgcagtggcacaatctaggctcactgcagcccctgcctcctgggttcacgcaattctcctacctcagcctcccgagtagctaggaatacaggtgcccatcaccacgcccagctaatttttgtagttttagtagagatggggtttcccatgttggccaggctggtctcgaactcctgaccccaggtgatctacccgcctcggccttccaaagtgctgggattacagacgtgagccaccgtgcccggcaatgggtcatagtttctattttacaagatgaaaagagttgtggagatggatggtgattatggttgcacaacataatgaaggtatttgataccactcaactaaacacttaaaaaatgattaagatggtaaagtttatgttatgtgtattttttttttttcagatggtgtttcactgtcacccaggctggagtgcagtggtgtgaccttggctcactgcaacctcggcctcccacgttcaagcgattctcctacctcagcctcccgagtagctgggactacaggcatctgccaccacgcctggctaatttttgtatttttaatagagatggggtttcaccatgttgtccagtctggtcttgaactcctgacctcaaatgatctgccagcctcggcctcccaaagtgctgggattacaggcatgagccaccgcacccagccattatgtgtattttaccacaatttttaaaatgggaaaaagaaaaaagcaaaaggtcgagaatattctttaaagacgagctcaaattggggacttaccctataaaaaatcaagtcagtataaagatttagtagctaataccacgttgtatnnnnnnnnnnnnnnnnnnnnnnnnnnnnnnnnnnnnnnnnnnnnnnnnnnnnnnnnnnnnnnnnnnnnnnnnnnnnnnnnnnnnnnnnnnnnnnnnnnnnnnnnnnnnnnnnnnnnnnnnnnnnnnnnnnnnnnnnnnnnnnnnnnnnnnnnnnnnnnnnnnnnnnnnnnnnnnnnnnnnnnnnnnnnnnnnnnnnnnnnnnnnnnnnnnnnnnnnnnnnnnnnnnnnnnnnnnnnnnnnnnnnnnnnnnnnnnnnnnnnnnnnnnnnnnnnnnnnnnnnnnnnnnnnnnnnnnnnnnnnnnnnnnnnnnnnnnnnnnnnnnnnnnnnnnnnnnnnnnnnnnnnnnnnnnnnnnnnnnnnnnnnnnnnnnnnnnnnnnnnnnnnnnnnnnnnnnnnnnnnnnnnnnnnnnnnnnnnnnnnnnnnnnnnnnnnnnnnnnnnnnnnnnnnnnnnnnnnnnnnnnnnnnnnnnnnnnnnnnnnnnnnnnnnnnnnnnnnnnnnnnnnnnnnnnnnnnnnnnnnnnnnnnnnnnnnnnnnnnnnnnnnnnnnnnnnnnnnnnnnnnnnnnnnnnnnnnnnnnnnnnnnnnnnnnnnnnnnnnnnnnnnnnnnnnnnnnnnnnnnnnnnnnnnnnnnnnnnnnnnnnnnnnnnnnnnnnnnnnnnnnnnnnnnnnnnnnnnnnnnnnnnnnnnnnnnnnnnnnnnnnnnnnnnnnnnnnnnnnnnnnnnnnnnnnnnnnnnnnnnnnnnnnnnnnnnnnnnnnnnnnnnnnnnnnnnnnnnnnnnnnnnnnnnnnnnnnnnnnnnnnnnnnnnnnnnnnnnnnnnnnnnnnnnnnnnnnnnnnnnnnnnnnnnnnnnnnnnnnnnnnnnnnnnnnnnnnnnnnnnnnnnnnnnnnnnnnnnnnnnnnnnnnnnnnnnnnnnnnnnnnnnnnnnnnnnnnnnnnnnnnnnnnnnnnnnnnnnnnnnnnnnnnnnnnnnnnnnnnnnnnnnnnnnnnnnnnnnnnnnnnnnnnnnnnnnnnnnnnnnnnnnnnnnnnnnnnnnnnnnnnnnnnnnnnnnnnnnnnnnnnnnnnnnnnnnnnnnnnnnnnnnnnnnnnnnnnnnnnnnnnnnnnnnnnnnnnnnnnnnnnnnnnnnnnnnnnnnnnnnnnnnnnnnnnnnnnnnnnnnnnnnnnnnnnnnnnnnnnnnnnnnnnnnnnnnnnnnnnnnnnnnnnnnnnnnnnnnnnnnnnnnnnnnnnnnnnnnnnnnnnnnnnnnnnnnnnnnnnnnnnnnnnnnnnnnnnnnnnnnnnnnnnnnnnnnnnnnnnnnnnnnnnnnnnnnnnnnnnnnnnnnnnnnnnnnnnnnnnnnnnnnnnnnnnnnnnnnnnnnnnnnnnnnnnnnnnnnnnnnnnnnnnnnnnnnnnnnnnnnnnnnnnnnnnnnnnnnnnnnnnnnnnnnnnnnnnnnnnnnnnnnnnnnnnnnnnnnnnnnnnnnnnnnnnnnnnnnnnnnnnnnnnnnnnnnnnnnnnnnnnnnnnnnnnnnnnnnnnnnnnnnnnnnnnnnnnnnnnnnnnnnnnnnnnnnnnnnnnnnnnnnnnnnnnnnnnnnnnnnnnnnnnnnnnnnnnnnnnnnnnnnnnnnnnnnnnnnnnnnnnnnnnnnnnnnnnnnnnnnnnnnnnnnnnnnnnnnnnnnnnnnnnnnnnnnnnnnnnnnnnnnnnnnnnnnnnnnnnnnnnnnnnnnnnnnnnnnnnnnnnnnnnnnnnnnnnnnnnnnnnnnnnnnnnnnnnnnnnnnnnnnnnnnnnnnnnnnnnnnnnnnnnnnnnnnnnnnnnnnnnnnnnnnnnnnnnnnnnnnnnnnnnnnnnnnnnnnnnnnnnnnnnnnnnnnnnnnnnnnnnnnnnnnnnnnnnnnnnnnnnnnnnnnnnnnnnnnnnnnnnnnnnnnnnnnnnnnnnnnnnnnnnnnnnnnnnnnnnnnnnnnnnnnnnnnnnnnnnnnnnnnnnnnnnnnnnnnnnnnnnnnnnnnnnnnnnnnnnnnnnnnnnnnnnnnnnnnnnnnnnnnnnnnnnnnnnnnnnnnnnnnnnnnnnnnnnnnnnnnnnnnnnnnnnnnnnnnnnnnnnnnnnnnnnnnnnnnnnnnnnnnnnnnnnnnnnnnnnnnnnnnnnnnnnnnnnnnnnnnnnnnnnnnnnnnnnnnnnnnnnnnnnnnnnnnnnnnnnnnnnnnnnnnnnnnnnnnnnnnnnnnnnnnnnnnnnnnnnnnnnnnnnnnnnnnnnnnnnnnnnnnnnnnnnnnnnnnnnnnnnnnnnnnnnnnnnnnnnnnnnnnnnnnnnnnnnnnnnnnnnnnnnnnnnnnnnnnnnnnnnnnnnnnnnnnnnnnnnnnnnnnnnnnnnnnnnnnnnnnnnnnnnnnnnnnnnnnnnnnnnnnnnnnnnnnnnnnnnnnnnnnnnnnnnnnnnnnnnnnnnnnnnnnnnnnnnnnnnnnnnnnnnnnnnnnnnnnnnnnnnnnnnnnnnnnnnnnnnnnnnnnnnnnnnnnnnnnnnnnnnnnnnnnnnnnnnnnnnnnnnnnnnnnnnnnnnnnnnnnnnnnnnnnnnnnnnnnnnnnnnnnnnnnnnnnnnnnnnnnnnnnnnnnnnnnnnnnnnnnnnnnnnnnnnnnnnnnnnnnnnnnnnnnnnnnnnnnnnnnnnnnnnnnnnnnnnnnnnnnnnnnnnnnnnnnnnnnnnnnnnnnnnnnnnnnnnnnnnnnnnnnnnnnnnnnnnnnnnnnnnnnnnnnnnnnnnnnnnnnnnnnnnnnnnnnnnnnnnnnnnnnnnnnnnnnnnnnnnnnnnnnnnnnnnnnnnnnnnnnnnnnnnnnnnnnnnnnnnnnnnnnnnnnnnnnnnnnnnnnnnnnnnnnnnnnnnnnnnnnnnnnnnnnnnnnnnnnnnnnnnnnnnnnnnnnnnnnnnnnnnnnnnnnnnnnnnnnnnnnnnnnnnnnnnnnnnnnnnnnnnnnnnnnnnnnnnnnnnnnnnnnnnnnnnnnnnnnnnnnnnnnnnnnnnnnnnnnnnnnnnnnnnnnnnnnnnnnnnnnnnnnnnnnnnnnnnnnnnnnnnnnnnnnnnnnnnnnnnnnnnnnnnnnnnnnnnnnnnnnnnnnnnnnnnnnnnnnnnnnnnnnnnnnnnnnnnnnnnnnnnnnnnnnnnnnnnnnnnnnnnnnnnnnnnnnnnnnnnnnnnnnnnnnnnnnnnnnnnnnnnnnnnnnnnnnnnnnnnnnnnnnnnnnnnnnnnnnnnnnnnnnnnnnnnnnnnnnnnnnnnnnnnnnnnnnnnnnnnnnnnnnnnnnnnnnnnnnnnnnnnnnnnnnnnnnnnnnnnnnnnnnnnnnnnnnnnnnnnnnnnnnnnnnnnnnnnnnnnnnnnnnnnnnnnnnnnnnnnnnnnnnnnnnnnnnnnnnnnnnnnnnnnnnnnnnnnnnnnnnnnnnnnnnnnnnnnnnnnnnnnnnnnnnnnnnnnnnnnnnnnnnnnnnnnnnnnnnnnnnnnnnnnnnnnnnnnnnnnnnnnnnnnnnnnnnnnnnnnnnnnnnnnnnnnnnnnnnnnnnnnnnnnnnnnnnnnnnnnnnnnnnnnnnnnnnnnnnnnnnnnnnnnnnnnnnnnnnnnnnnnnnnnnnnnnnnnnnnnnnnnnnnnnnnnnnnnnnnnnnnnnnnnnnnnnnnnnnnnnnnnnnnnnnnnnnnnnnnnnnnnnnnnnnnnnnnnnnnnnnnnnnnnnnnnnnnnnnnnnnnnnnnnnnnnnnnnnnnnnnnnnnnnnnnnnnnnnnnnnnnnnnnnnnnnnnnnnnnnnnnnnnnnnnnnnnnnnnnnnnnnnnnnnnnnnnnnnnnnnnnnnnnnnnnnnnnnnnnnnnnnnnnnnnnnnnnnnnnnnnnnnnnnnnnnnnnnnnnnnnnnnnnnnnnnnnnnnnnnnnnnnnnnnnnnnnnnnnnnnnnnnnnnnnnnnnnnnnnnnnnnnnnnnnnnnnnnnnnnnnnnnnnnnnnnnnnnnnnnnnnnnnnnnnnnnnnnnnnnnnnnnnnnnnnnnnnnnnnnnnnnnnnnnnnnnnnnnnnnnnnnnnnnnnnnnnnnnnnnnnnnnnnnnnnnnnnnnnnnnnnnnnnnnnnnnnnnnnnnnnnnnnnnnnnnnnnnnnnnnnnnnnnnnnnnnnnnnnnnnnnnnnnnnnnnnnnnnnnnnnnnnnnnnnnnnnnnnnnnnnnnnnnnnnnnnnnnnnnnnnnnnnnnnnnnnnnnnnnnnnnnnnnnnnnnnnnnnnnnnnnnnnnnnnnnnnnnnnnnnnnnnnnnnnnnnnnnnnnnnnnnnnnnnnnnnnnnnnnnnnnnnnnnnnnnnnnnnnnnnnnnnnnnnnnnnnnnnnnnnnnnnnnnnnnnnnnnnnnnnnnnnnnnnnnnnnnnnnnnnnnnnnnnnnnnnnnnnnnnnnnnnnnnnnnnnnnnnnnnnnnnnnnnnnnnnnnnnnnnnnnnnnnnnnnnnnnnnnnnnnnnnnnnnnnnnnnnnnnnnnnnnnnnnnnnnnnnnnnnnnnnnnnnnnnnnnnnnnnnnnnnnnnnnnnnnnnnnnnnnnnnnnnnnnnnnnnnnnnnnnnnnnnnnnnnnnnnnnnnnnnnnnnnnnnnnnnnnnnnnnnnnnnnnnnnnnnnnnnnnnnnnnnnnnnnnnnnnnnnnnnnnnnnnnnnnnnnnnnnnnnnnnnnnnnnnnnnnnnnnnnnnnnnnnnnnnnnnnnnnnnnnnnnnnnnnnnnnnnnnnnnnnnnnnnnnnnnnnnnnnnnnnnnnnnnnnnnnnnnnnnnnnnnnnnnnnnnnnnnnnnnnnnnnnnnnnnnnnnnnnnnnnnnnnnnnnnnnnnnnnnnnnnnnnnnnnnnnnnnnnnnnnnnnnnnnnnnnnnnnnnnnnnnnnnnnnnnnnnnnnnnnnnnnnnnnnnnnnnnnnnnnnnnnnnnnnnnnnnnnnnnnnnnnnnnnnnnnnnnnnnnnnnnnnnnnnnnnnnnnnnnnnnnnnnnnnnnnnnnnnnnnnnnnnnnnnnnnnnnnnnnnnnnnnnnnnnnnnnnnnnnnnnnnnnnnnnnnnnnnnnnnnnnnnnnnnnnnnnnnnnnnnnnnnnnnnnnnnnnnnnnnnnnnnnnnnnnnnnnnnnnnnnnnnnnnnnnnnnnnnnnnnnnnnnnnnnnnnnnnnnnnnnnnnnnnnnnnnnnnnnnnnnnnnnnnnnnnnnnnnnnnnnnnnnnnnnnnnnnnnnnnnnnnnnnnnnnnnnnnnnnnnnnnnnnnnnnnnnnnnnnnnnnnnnnnnnnnnnnnnnnnnnnnnnnnnnnnnnnnnnnnnnnnnnnnnnnnnnnnnnnnnnnnnnnnnnnnnnnnnnnnnnnnnnnnnnnnnnnnnnnnnnnnnnnnnnnnnnnnnnnnnnnnnnnnnnnnnnnnnnnnnnnnnnnnnnnnnnnnnnnnnnnnnnnnnnnnnnnnnnnnnnnnnnnnnnnnnnnnnnnnnnnnnnnnnnnnnnnnnnnnnnnnnnnnnnnnnnnnnnnnnnnnnnnnnnnnnnnnnnnnnnnnnnnnnnnnnnnnnnnnnnnnnnnnnnnnnnnnnnnnnnnnnnnnnnnnnnnnnnnnnnnnnnnnnnnnnnnnnnnnnnnnnnnnnnnnnnnnnnnnnnnnnnnnnnnnnnnnnnnnnnnnnnnnnnnnnnnnnnnnnnnnnnnnnnnnnnnnnnnnnnnnnnnnnnnnnnnnnnnnnnnnnnnnnnnnnnnnnnnnnnnnnnnnnnnnnnnnnnnnnnnnnnnnnnnnnnnnnnnnnnnnnnnnnnnnnnnnnnnnnnnnnnnnnnnnnnnnnnnnnnnnnnnnnnnnnnnnnnnnnnnnnnnnnnnnnnnnnnnnnnnnnnnnnnnnnnnnnnnnnnnnnnnnnnnnnnnnnnnnnnnnnnnnnnnnnnnnnnnnnnnnnnnnnnnnnnnnnnnnnnnnnnnnnnnnnnnnnnnnnnnnnnnnnnnnnnnnnnnnnnnnnnnnnnnnnnnnnnnnnnnnnnnnnnnnnnnnnnnnnnnnnnnnnnnnnnnnnnnnnnnnnnnnnnnnnnnnnnnnnnnnnnnnnnnnnnnnnnnnnnnnnnnnnnnnnnnnnnnnnnnnnnnnnnnnnnnnnnnnnnnnnnnnnnnnnnnnnnnnnnnnnnnnnnnnnnnnnnnnnnnnnnnnnnnnnnnnnnnnnnnnnnnnnnnnnnnnnnnnnnnnnnnnnnnnnnnnnnnnnnnnnnnnnnnnnnnnnnnnnnnnnnnnnnnnnnnnnnnnnnnnnnnnnnnnnnnnnnnnnnnnnnnnnnnnnnnnnnnnnnnnnnnnnnnnnnnnnnnnnnnnnnnnnnnnnnnnnnnnnnnnnnnnnnnnnnnnnnnnnnnnnnnnnnnnnnnnnnnnnnnnnnnnnnnnnnnnnnnnnnnnnnnnnnnnnnnnnnnnnnnnnnnnnnnnnnnnnnnnnnnnnnnnnnnnnnnnnnnnnnnnnnnnnnnnnnnnnnnnnnnnnnnnnnnnnnnnnnnnnnnnnnnnnnnnnnnnnnnnnnnnnnnnnnnnnnnnnnnnnnnnnnnnnnnnnnnnnnnnnnnnnnnnnnnnnnnnnnnnnnnnnnnnnnnnnnnnnnnnnnnnnnnnnnnnnnnnnnnnnnnnnnnnnnnnnnnnnnnnnnnnnnnnnnnnnnnnnnnnnnnnnnnnnnnnnnnnnnnnnnnnnnnnnnnnnnnnnnnnnnnnnnnnnnnnnnnnnnnnnnnnnnnnnnnnnnnnnnnnnnnnnnnnnnnnnnnnnnnnnnnnnnnnnnnnnnnnnnnnnnnnnnnnnnnnnnnnnnnnnnnnnnnnnnnnnnnnnnnnnnnnnnnnnnnnnnnnnnnnnnnnnnnnnnnnnnnnnnnnnnnnnnnnnnnnnnnnnnnnnnnnnnnnnnnnnnnnnnnnnnnnnnnnnnnnnnnnnnnnnnnnnnnnnnnnnnnnnnnnnnnnnnnnnnnnnnnnnnnnnnnnnnnnnnnnnnnnnnnnnnnnnnnnnnnnnnnnnnnnnnnnnnnnnnnnnnnnnnnnnnnnnnnnnnnnnnnnnnnnnnnnnnnnnnnnnnnnnnnnnnnnnnnnnnnnnnnnnnnnnnnnnnnnnnnnnnnnnnnnnnnnnnnnnnnnnnnnnnnnnnnnnnnnnnnnnnnnnnnnnnnnnnnnnnnnnnnnnnnnnnnnnnnnnnnnnnnnnnnnnnnnnnnnnnnnnnnnnnnnnnnnnnnnnnnnnnnnnnnnnnnnnnnnnnnnnnnnnnnnnnnnnnnnnnnnnnnnnnnnnnnnnnnnnnnnnnnnnnnnnnnnnnnnnnnnnnnnnnnnnnnnnnnnnnnnnnnnnnnnnnnnnnnnnnnnnnnnnnnnnnnnnnnnnnnnnnnnnnnnnnnnnnnnnnnnnnnnnnnnnnnnnnnnnnnnnnnnnnnnnnnnnnnnnnnnnnnnnnnnnnnnnnnnnnnnnnnnnnnnnnnnnnnnnnnnnnnnnnnnnnnnnnnnnnnnnnnnnnnnnnnnnnnnnnnnnnnnnnnnnnnnnnnnnnnnnnnnnnnnnnnnnnnnnnnnnnnnnnnnnnnnnnnnnnnnnnnnnnnnnnnnnnnnnnnnnnnnnnnnnnnnnnnnnnnnnnnnnnnnnnnnnnnnnnnnnnnnnnnnnnnnnnnnnnnnnnnnnnnnnnnnnnnnnnnnnnnnnnnnnnnnnnnnnnnnnnnnnnnnnnnnnnnnnnnnnnnnnnnnnnnnnnnnnnnnnnnnnnnnnnnnnnnnnnnnnnnnnnnnnnnnnnnnnnnnnnnnnnnnnnnnnnnnnnnnnnnnnnnnnnnnnnnnnnnnnnnnnnnnnnnnnnnnnnnnnnnnnnnnnnnnnnnnnnnnnnnnnnnnnnnnnnnnnnnnnnnnnnnnnnnnnnnnnnnnnnnnnnnnnnnnnnnnnnnnnnnnnnnnnnnnnnnnnnnnnnnnnnnnnnnnnnnnnnnnnnnnnnnnnnnnnnnnnnnnnnnnnnnnnnnnnnnnnnnnnnnnnnnnnnnnnnnnnnnnnnnnnnnnnnnnnnnnnnnnnnnnnnnnnnnnnnnnnnnnnnnnnnnnnnnnnnnnnnnnnnnnnnnnnnnnnnnnnnnnnnnnnnnnnnnnnnnnnnnnnnnnnnnnnnnnnnnnnnnnnnnnnnnnnnnnnnnnnnnnnnnnnnnnnnnnnnnnnnnnnnnnnnnnnnnnnnnnnnnnnnnnnnnnnnnnnnnnnnnnnnnnnnnnnnnnnnnnnnnnnnnnnnnnnnnnnnnnnnnnnnnnnnnnnnnnnnnnnnnnnnnnnnnnnnnnnnnnnnnnnnnnnnnnnnnnnnnnnnnnnnnnnnnnnnnnnnnnnnnnnnnnnnnnnnnnnnnnnnnnnnnnnnnnnnnnnnnnnnnnnnnnnnnnnnnnnnnnnnnnnnnnnnnnnnnnnnnnnnnnnnnnnnnnnnnnnnnnnnnnnnnnnnnnnnnnnnnnnnnnnnnnnnnnnnnnnnnnnnnnnnnnnnnnnnnnnnnnnnnnnnnnnnnnnnnnnnnnnnnnnnnnnnnnnnnnnnnnnnnnnnnnnnnnnnnnnnnnnnnnnnnnnnnnnnnnnnnnnnnnnnnnnnnnnnnnnnnnnnnnnnnnnnnnnnnnnnnnnnnnnnnnnnnnnnnnnnnnnnnnnnnnnnnnnnnnnnnnnnnnnnnnnnnnnnnnnnnnnnnnnnnnnnnnnnnnnnnnnnnnnnnnnnnnnnnnnnnnnnnnnnnnnnnnnnnnnnnnnnnnnnnnnnnnnnnnnnnnnnnnnnnnnnnnnnnnnnnnnnnnnnnnnnnnnnnnnnnnnnnnnnnnnnnnnnnnnnnnnnnnnnnnnnnnnnnnnnnnnnnnnnnnnnnnnnnnnnnnnnnnnnnnnnnnnnnnnnnnnnnnnnnnnnnnnnnnnnnnnnnnnnnnnnnnnnnnnnnnnnnnnnnnnnnnnnnnnnnnnnnnnnnnnnnnnnnnnnnnnnnnnnnnnnnnnnnnnnnnnnnnnnnnnnnnnnnnnnnnnnnnnnnnnnnnnnnnnnnnnnnnnnnnnnnnnnnnnnnnnnnnnnnnnnnnnnnnnnnnnnnnnnnnnnnnnnnnnnnnnnnnnnnnnnnnnnnnnnnnnnnnnnnnnnnnnnnnnnnnnnnnnnnnnnnnnnnnnnnnnnnnnnnnnnnnnnnnnnnnnnnnnnnnnnnnnnnnnnnnnnnnnnnnnnnnnnnnnnnnnnnnnnnnnnnnnnnnnnnnnnnnnnnnnnnnnnnnnnnnnnnnnnnnnnnnnnnnnnnnnnnnnnnnnnnnnnnnnnnnnnnnnnnnnnnnnnnnnnnnnnnnnnnnnnnnnnnnnnnnnnnnnnnnnnnnnnnnnnnnnnnnnnnnnnnnnnnnnnnnnnnnnnnnnnnnnnnnnnnnnnnnnnnnnnnnnnnnnnnnnnnnnnnnnnnnnnnnnnnnnnnnnnnnnnnnnnnnnnnnnnnnnnnnnnnnnnnnnnnnnnnnnnnnnnnnnnnnnnnnnnnnnnnnnnnnnnnnnnnnnnnnnnnnnnnnnnnnnnnnnnnnnnnnnnnnnnnnnnnnnnnnnnnnnnnnnnnnnnnnnnnnnnnnnnnnnnnnnnnnnnnnnnnnnnnnnnnnnnnnnnnnnnnnnnnnnnnnnnnnnnnnnnnnnnnnnnnnnnnnnnnnnnnnnnnnnnnnnnnnnnnnnnnnnnnnnnnnnnnnnnnnnnnnnnnnnnnnnnnnnnnnnnnnnnnnnnnnnnnnnnnnnnnnnnnnnnnnnnnnnnnnnnnnnnnnnnnnnnnnnnnnnnnnnnnnnnnnnnnnnnnnnnnnnnnnnnnnnnnnnnnnnnnnnnnnnnnnnnnnnnnnnnnnnnnnnnnnnnnnnnnnnnnnnnnnnnnnnnnnnnnnnnnnnnnnnnnnnnnnnnnnnnnnnnnnnnnnnnnnnnnnnnnnnnnnnnnnnnnnnnnnnnnnnnnnnnnnnnnnnnnnnnnnnnnnnnnnnnnnnnnnnnnnnnnnnnnnnnnnnnnnnnnnnnnnnnnnnnnnnnnnnnnnnnnnnnnnnnnnnnnnnnnnnnnnnnnnnnnnnnnnnnnnnnnnnnnnnnnnnnnnnnnnnnnnnnnnnnnnnnnnnnnnnnnnnnnnnnnnnnnnnnnnnnnnnnnnnnnnnnnnnnnnnnnnnnnnnnnnnnnnnnnnnnnnnnnnnnnnnnnnnnnnnnnnnnnnnnnnnnnnnnnnnnnnnnnnnnnnnnnnnnnnnnnnnnnnnnnnnnnnnnnnnnnnnnnnnnnnnnnnnnnnnnnnnnnnnnnnnnnnnnnnnnnnnnnnnnnnnnnnnnnnnnnnnnnnnnnnnnnnnnnnnnnnnnnnnnnnnnnnnnnnnnnnnnnnnnnnnnnnnnnnnnnnnnnnnnnnnnnnnnnnnnnnnnnnnnnnnnnnnnnnnnnnnnnnnnnnnnnnnnnnnnnnnnnnnnnnnnnnnnnnnnnnnnnnnnnnnnnnnnnnnnnnnnnnnnnnnnnnnnnnnnnnnnnnnnnnnnnnnnnnnnnnnnnnnnnnnnnnnnnnnnnnnnnnnnnnnnnnnnnnnnnnnnnnnnnnnnnnnnnnnnnnnnnnnnnnnnnnnnnnnnnnnnnnnnnnnnnnnnnnnnnnnnnnnnnnnnnnnnnnnnnnnnnnnnnnnnnnnnnnnnnnnnnnnnnnnnnnnnnnnnnnnnnnnnnnnnnnnnnnnnnnnnnnnnnnnnnnnnnnnnnnnnnnnnnnnnnnnnnnnnnnnnnnnnnnnnnnnnnnnnnnnnnnnnnnnnnnnnnnnnnnnnnnnnnnnnnnnnnnnnnnnnnnnnnnnnnnnnnnnnnnnnnnnnnnnnnnnnnnnnnnnnnnnnnnnnnnnnnnnnnnnnnnnnnnnnnnnnnnnnnnnnnnnnnnnnnnnnnnnnnnnnnnnnnnnnnnnnnnnnnnnnnnnnnnnnnnnnnnnnnnnnnnnnnnnnnnnnnnnnnnnnnnnnnnnnnnnnnnnnnnnnnnnnnnnnnnnnnnnnnnnnnnnnnnnnnnnnnnnnnnnnnnnnnnnnnnnnnnnnnnnnnnnnnnnnnnnnnnnnnnnnnnnnnnnnnnnnnnnnnnnnnnnnnnnnnnnnnnnnnnnnnnnnnnnnnnnnnnnnnnnnnnnnnnnnnnnnnnnnnnnnnnnnnnnnnnnnnnnnnnnnnnnnnnnnnnnnnnnnnnnnnnnnnnnnnnnnnnnnnnnnnnnnnnnnnnnnnnnnnnnnnnnnnnnnnnnnnnnnnnnnnnnnnnnnnnnnnnnnnnnnnnnnnnnnnnnnnnnnnnnnnnnnnnnnnnnnnnnnnnnnnnnnnnnnnnnnnnnnnnnnnnnnnnnnnnnnnnnnnnnnnnnnnnnnnnnnnnnnnnnnnnnnnnnnnnnnnnnnnnnnnnnnnnnnnnnnnnnnnnnnnnnnnnnnnnnnnnnnnnnnnnnnnnnnnnnnnnnnnnnnnnnnnnnnnnnnnnnnnnnnnnnnnnnnnnnnnnnnnnnnnnnnnnnnnnnnnnnnnnnnnnnnnnnnnnnnnnnnnnnnnnnnnnnnnnnnnnnnnnnnnnnnnnnnnnnnnnnnnnnnnnnnnnnnnnnnnnnnnnnnnnnnnnnnnnnnnnnnnnnnnnnnnnnnnnnnnnnnnnnnnnnnnnnnnnnnnnnnnnnnnnnnnnnnnnnnnnnnnnnnnnnnnnnnnnnnnnnnnnnnnnnnnnnnnnnnnnnnnnnnnnnnnnnnnnnnnnnnnnnnnnnnnnnnnnnnnnnnnnnnnnnnnnnnnnnnnnnnnnnnnnnnnnnnnnnnnnnnnnnnnnnnnnnnnnnnnnnnnnnnnnnnnnnnnnnnnnnnnnnnnnnnnnnnnnnnnnnnnnnnnnnnnnnnnnnnnnnnatcgttctggattagctgcatatgattctgcagggctatctcctctgcaattcataaatgtgtaatgttagatatcattcctagaagcagagtctctggtgcaataaaaatgttctggggtggccaggtggggtggctcacgcttgtaatcccagcactttgggtggatcacctgaggtcaggagttcgggaccagcctggccaacacagcgaaaccccatctctactgaaaatacaaaaattaggccgggaacggtggctcacgcctgtaatcccagcactttgggaggccgaggcgagcggattacctgtggtcaggagttcaagaccagcctggccaacatggtgaaaccccgtctctactaaaaatacaaaaattagccgggcatggtggcacacacctgtaatcccagctacttgggaggctgaggcaggagaattgtttgagcccgcgaggcggaggttgcagtgagctgagatcgtgctactgcactccagcctggccgacagagtgagactctgtctcaaaaacaaaaaaacaaaaattagctgggcgtggtggcacgtgcctgtagtactagctactcaggaggctgaggcaggagaatcacttgaacctgtgaggcagaggttgcagtgacccaagattgcaccacgacactccagcctgggcaacagagtgtgactccatctcaaaaaaaaaaaaaaaaaaaaaaaaaaaaagaatgttctgggcaattccccatccaggaagccacatacattggttgcctggggttggcctggatacccatataggagtgatgaggagagttcagggctatgacccacaggtcctctaagctgcttccatcagtcattcattcacagcagccccaacacagaaaaaccttctgcctgtacagaattaggccatttaaattcttccaattcttggattttagggaaggaacagacctatcacttttactgagtttatttgaaaaaactgaggcacaagtcatacatctctaacccctgcccatattcwcactgccatctcacagttttactgtcgtgaaccatatattttgggcacatcctcttctgtctgtctcaccttatagaatgtctgtgttttttcaggtagtttccttgcatttcttaaaatcttctgtacatctgtctattaagggtaaaaaaaaaaaatccaacattagaattctgtggtaaaaaagggaaataatataaaagaatggatctaaatgtttaaagagatgaaaatgagaacacagctacaatgtcaagatgaggatcccttctgagttaatgtcagttcaacattagtaaagcactccctccttcaaaaggcttgacagtaaaataaatcccctgacagaaacgaacttgcctcataaaaatgtacccagtaaacccatacatctattgccagggacttttttgcaaagacgattcaatggggaaaaaatagtctcttcaacatttggtgctgagacaactggatatccacaagcaaaagaataaagytggacccttacatcataccatatacaaaaaactaactcaaaatggatcagagacctacatgtaaaagctaaaactataaaactcttagaaaaaaacgggccaggtgcagtggtgtgcccctgtaatcctagctactcaggaggattgcttgaggccagaagtttgagaccagcctgggcaacgtagtgagatgtgtttctcaagagaaaaagagaagaagaaaaagaaaacacagcgggtaaatctttatgactttggatttggcaatgatctcttagttaagacagcacaaagcacaaacaacaaaagcaagagacaaaatttgacttcttcaaaaccaaaaactttgtgtatcaaaggacactataaagagagtgaaaagataactcacaaaatgggagaagatatttgcaaatcatgtatctgctaaggatcataatatccagaatatataaaaaacccaacaacaaaaagacaaacccaattaaaaaatggacaaagaacttgagtatatacttctccaaataatatacacaaatggccaataagcacaggaaaagatgcacattattggtcatcaaggaaatgcaaaaacaaagacataccacttcacacctactatgatagctatatgataataataataaaaggaaaacaatgagtattggtaggaacgtggagaaactagaacacttatacactgctagcagaaatgtaaaatggtgtggctgctgtgagagagtgtggcaattcctcagtaagttaaagagaattgctgtctgacccagcaatcccattcccattaaaatatatacccaagagtattgaaaacaaatgttcagaccaaaacttatacatgaatgtttgtaacagcattatccacaatagccaaaaggtaaccctaatgtccgtcaactgagggataatcaaaatgtgacatatacatatagacatatggaatattagccataaaaaggaatgaagtactgatacatactacaacatgaataaaccttgaaaacatcatgctaagtacaagaagtcaaacacaaaaggccacaaattgtatgattctgtttacatgaaatatctagaataggtaagtccatagagacagaaagaaaatcaatggttgccagggcccggaagaaggaatgtggagtgactttcctaatgggcacagggtttccttttggagtgattaaaatgttctggaactagagagtggtgatggtacattgtgaatgtactaaatgggactgaattgtgtactttaaaatggttgaaggtacattttatgtatattttaccagaataagaaaaataaacccaagatagtagtgaagattcaaacaaaaaaaattaaaaaaaataatttaagaaaagctcagctataactggtggtgaaagtggttctaatatccctctgacaaggaagcactggggtcagggatatcaggaaaatagaagaccctgattttccaacaaagaggcccctgacactttagccttggcaggatgtggttcagtctccatggaaacggggctcagagactgtgcagtcaacagaaactacttttgttgtccaagtggcctgtctcttctcatttggtttaggttgaacttactggaagaacaaatgtaaataaaggtgctcaaaggagaaaaaagtttcaataagtgatttttaaaaacaggtataaatgactttttgctgatgaaaggagaaatgttcctgaataccatgcctgaaagcatcattccttgataatcatattatcatatgttcctgaataccatgcctgaaagcatcattccttgataatcatattatcataacttcctatggaagtgtttttgtgaaatgtaatgctatggcttgagttctactgaagggatggaagaaatatagttatgaagacttttacatcttttccaaaactgttgttaaagccaatacccattatgttagtcaatgcctcaccatataaaaaatttcacactaaaattcaatgccaggaaaatatgtctctctagacaaactgacaaatttcctttctttagacaagaacaactgaccttggtaacaggaagctcagagccaaaacactcacataaagttattattttgccttgggttcctggcacaattgtcttccttcttcctccttcctctaggattcttattgctctaaattttgtaaaaaatgattttgctatatacatgttttactgtagggcatctcaaatmccttttggaaataatgacaaacattagaagtaaatgaattactaagtatcaaaggaaaagaaaatcaaataaaatgcctgcctgcctacccaaatgtctcctgtccccagtggaaagcaacataaatggtaatgttacctgcaggccgctgggtttgatccagacagtcacattctgggcataactgcgtttgtttttgggctgcagggggaatggactcttattgtcatcctcgccataagggttttctttagcatcttaaaagaaaagacattcttgaaatgacatctggtaaaacacaatcagttacatttccatttagactagaagctctttgaatcactcaatctttgatatcctatcactttgttaattaagaaaatccattaacttcagtcaggttggagaacctgttctcaatagaaagccactgatgtaggaggcccatttaagtgaaaaacagcttaatgtttttaaagaaacaagcttcacttatctgatttataaattaaggtcaaaggataaaacaaatacatatttaaaaaatatatatatatatacatacacatagacacacatatatatactgcaattctatatagtctaacccagtgctctccaactgaactttctgtatgatggaaatgttctatatctgtgctgtctaatgtggtagctactaactactaagcacttgccctgtggctagtgtgactgagaaactgaatttcaaattgtacttaattttaattaaatttaatgtggctagtagctactggattagacagcataggtctaggcattaaaataattaaaaaggaaaactatatatatagccaaattaaggcaaagggcaagacaagaaatacttttattggtgaagcataccccaatatggcttattagtttattgcttccaaaaatgtaaagccacattggttttatagctacatgaacaaacagggtttgtctctgtacctgcttcctgagtctatgaaactgccacaaacttataaagcacacatacttctaatggtgtatttgatctttattattattaccaccttctcgtgtagacagagcaggagtcattttcctacaagttcagagaacttaaatctcttgcccaaaagtttgtgttgaaaaatgtaattagaccagtctgtctaattgagccagacattctctatccctgatttggtcattaattgaaacaccttgatattggaccaacacttcctttgtcaaccctcttcagccctgactcctccataaaatactggcccaactctccagacgtatttccattaatatttgtcaatatataaaccttctgagtcaggctaaggtcctgcaagtcctttcccacacaacagttcatttccaactttcctgctatttctattactcctcactgcctagaatgctctcccttcttattcactcatttactcattcacttattcattcattatctatagtaagaccccactacgtagcaagcactgtgccaggaattgtgcctagagaagatacttttcagcctcaaggaacttacagaataaagaatatttattaagttccaactatgtgcaagatactttacatattcaacttctctctttatagcaactctagagcgaagatgttattagtcccattraagatgaggaaactaaggcacagagaggttggacttatacaaggtttcacagtgactcagttgggcctgcttcaaaagccaacactttttccaccattcaacactgctgttccttacttatccaaacttacctacctatattccaagtccagatcctatcttaccccttccatraaattgtttcaagtttttctggcagatagtggtttttgtagacccttttatcccctagcacttagtatcagtaccaaacatttcaacatctaatcagagcctattttgtactgtcattagttgtctggagcctatatgtggtaactaactggcttaggagacaggaaatattacatttatgaaagaagaaattttaaaaagatagtataaacaaaaaataaaagttataagataaatttgaagatacagaagacagaacaaaaattttaaaaatgggaaaatgggcagaaagagatagaaaattacaaacacaaatcacaaatatatgttccagaaaaggagaacagagaatacagaaagaggaaatcaaagaaataattgatcttcccagtactgaagatcatgaattgccagatggaaagggtccactgagtgcctagcaaaatcaatgaagagaccaacattctgaaattcagaataccagggatacaaagaagatcaccaaggaatatggagaaaatacagttcagggtcaaaggtctttgagtcaccatggcactaactttccgtagcaacactggactccagaagagacaacagagtaatgcttcaaaactctgagggaaaatgacttccaacttagaactcaattcccaaccaaactatcattaaatataaagaatgaaataaacatatatatattttcaaaatatacaagatttcaaaatatttacttcccatgtaccctttttttcaggaggagttatgaacaggagatccataggagagatgtaaaggggagactcaggacaacacctatgcaacaggtctggggaataaccataccatttatgaagcaggaggatgggagatgacgctaagaaaaaaaaaggaaactgagaaaatacctgaagaatgtattttacttagggaggaattagttatatagaaaacaagcaaagaaaaaaaataactgggactgagctaggggacaaaaagttgcaaaacaaaggaaatacaaattggtatagcttagttgtaaataacatttacatcatgtaacaaggactgaatactgatttaaccaaaaagaacattataactatattgggaggatagtaggaggggaaatgtgcgtcttgtgtaggtgggtgggagatggtggtgttaatagagctaaatattcatcctttaaaaagtcaaaaaatggcatctaaaatgggggaaaagggctgagtgtggtggctcacgcctgtaatcccaacaatttgggaggctaaggtggaggattgctttagcccaggagtttgagaccagccttggcaacatagtgagatcttgtctctataaaaaaatcaaaaaaattagccaggcatggtggcatgcacccgtggtcccagccacatgagaggttgaggtgggaggatcacccgagaggtcaaggctgcagtgagccaagactgtgccactgcacttcagcctgggtgacagagtgagaccctgtctcaaaaaataaataaaaaataataagacgggaggccgggcacagtggctcgtgcctgtaattccagcactttgggaggtcaaggcgggaggatcacttgaggtcaggagttttgagaccagcctggccaacatggtgaaaccccgtacctactaaaaatacaaaaatcagccaagcgtggtggtggacacctgcagttccagctactggggaggctgaggcacgagaattgcttgaatacaggaggcagaggttgtagtgagctgagatcacgccactacagtccagcctgggcaacagagcaagactccatctcaaaataaataaataaaataataataataataataaaatgggggaacccctgacagaaatagggacatacctatattatttagaaatgtaaataaggctgggcagagtggctcacgcctgtaatcccagcactttgggaggccgaggcaggaggattacttgaggtcaggagtttgagaccagcctgaccaacaacatgatgaaaccctatctctactaaaaatacaacaattagccgggcatggtggcttgtgcctgtagtcacagctattagggaggcagaggcagaagaattgcttgaacctgggaggtgaaggttgcagtgaaccaagactgctccactgcactccagcctgggcgatggagtgagactctgtctcaattaaaaaaaaaaaaagaaatataaataaataccaaaagaaacaaataagttttaaaaagtagttgtctctaggaacagaattgggagtaggagggattggtacaaacaatagtgctattttgcatgttttgctcaacaaccctctgaggtaagttttattattaattgttatttgttatcataattccaattccaagactgctgtgagagttaaatgagatggtatgctcattatgtccagcacagtgcctggcacaaagttaagttcattataatattagctattattatccacactgaaaagcagaacagatccaggaggaaaaaacaacatgaacacagggcagagtgaacagcagttcaactggaatgaagaacaattgtaacaagccaagtgttgctatgttggaagccagatcagaaaggagtctgaatgctactactatcttagattatagataggcatctttggtgaaaaccatcacaatagtctagtcagaggttggcaaactttttctgtgagggccagacaggttggagtgcagcgatgcaatcagggctcactgcagcctctgcttcctgggctcaagcgatccttccacctccgccccctgagtaactgggaccacaggtgcacaccaccatgcccagcaaatttttgtatttttggtagagatagggtttcgctatgttggccaggctggtctcaaactcctggactcaagtgatccacctgccctggcctcccaaagtactgggattacaggcatgagccaccacacctggctgaatatttatcatttctttgtgttgtgaatattcaaaatcctctcttctagctgtttgaaaatatacactaaattattgtgagcaatattcaggctaccatgctacagagcactgaactttttcctccctaacagctgtaactttgtatctgttacctctgcctattctcctctcctcactacccttcccaacctctaatgaccatgattctagattctactctgtacttctatgagctcattttttttcagcttccatatatgggtgagaacatgtggtatttattccaagtttatttttgtacacaaaaactcaaaatttgtgaaccactgccctgagcaatctccctcattctcaccattttaactatttatgataggcttacaacctaaaattttatctccaactctgccctctctcctaaacttcagacttctacagaattgtctctaggcacctccacctgtatctcacaggcacgaactcaacataaacaaaatatgttcttcccaaatttactcttctctctctattatctatttcaactaatagtactatctttcaccctgcagcccaggtcagaaacctgggatcaattttaacacttctctctccataattttcatatccaaacattattgatcctacctcctaaatatcttttacccccagctattgccacggtctggctctcatcttcacatttccaggattaacacagtaactttcagccacaggtccttgccttttcagatccacactccacagagatatctttctaaatacaaatttcttatctctcacttggattatggccatactgtacaactgcagggggcaccagcccctaaaatatagtttcctaactggtatccccctgttctcactgtagccagaaggatctgatcacattactcctcttcagtggtttcccagtatctgcaagataaattcctggttcttcacatttcagacaaggcctgctccactctagctactaccaatctccaatctaccatctgcccctcccacacccactctcacattttgtgccacacttccttttctttctgtaggtgttctgtttgcccaggatgccctttcttcccttcattagctcagcaagttcctccttttcttcaaaactcaactagggtatttctcctctgtgaagattctcctgagtcctctaggcagagctcatcatcatctcctccaggctaactctgatttgtgccagtctgtgatcattccactttccactagactttgaacaactccagctaactctttatcccttaggcctggcacagaataggttgcttggtagatgttcctgaaattgaaatgggcccaaatgagtcaaagatgactacagttggaacctgagtagctagtggcacaaatgacttaatcaaaaggaggaggaaaatcagaaggaggaatagtttgaggagaaaggggtgcgggacaataggtctgtaacaaacagctgagcttgagactgtgacagaatatccaggtgtagagatccaactaggaactggaaatatgatatgcaaattccagggagagatcaggtaagactagagttatagatttgggaaatgtgaagttattacagctgataaaataaccaagggagaagaataaccaaagagaagaaggcaaagaacatgttggaaaccatgaggcaaggagaagaaaagacaaaacgaagagagaaagaaaagtccgccaaagaaaaagtcaaatcggtaccagaagcaatgtcaggaaagctacagaaaaaaagtttcaagaaggaggaaagattacattatctaggaatgacaggaaattacttgaactatagtacaccaagaaaaaaaattatggagattagtttttcactctaagccgctgaagaatttgcatttacttaaagcaatctaaatgttgatttctcctgagctgtaaaatttaggagttcaaacatcaaactctcttcaagttttcaccgtacacatccagcatcatccgagaccatggcataccagtaagggagatcaatcagttctctgactgcacagtcagagacattgagaacagcagaatgaaaacaaagtcaggataagtaaaatctgatctggattatacctgaaataggacccaactgtgccattttccctagccatgggagaggttctgggccaggctcaaagagagacatcatgaggtttgatttcttcttgctgtcagcttgggagtagagcattccatgccattcaggactagayggagagaagacggaagatcagaagaacatcaagcctgagactgtcaagttaaataagtctagcctgtatttttctcttgagagacacaggcttcagctttgaaatcaggcacactacttttaccaaagccaaaccctaaacctgaaaatgcatactgctgtcccctaatatttccattcttctgagacatttattattattcaggtaaaattatgtggatatggaaatcaaaagcaatcttgaaagagaaaaaacaaatcacaaagggcagcaagtagctggagaggtgatgaggaggggtaaaggctgtgacctataggtcctgtcacctgcctcactgagtcactcacagcagcaccaagagaagcccttctaccacagggctcaaggccatcatcctgttatgtaaaagagactctgtccccagtttctcaaagggtcccagatgattctcatattcagaccagtacaagtagcttgggtgccaagaaatatagcagactaatatctagtaagatctgcattcctctttttggaccagctaattttaactgtagcagaaatggagccatgcttcctttaattaatcctaactcttgatctataccagccaaccccaggtagtggccagaaaatgatcagtgacctccttttttctaaaaatatgtattatagaaagggaaatagatggttttgcagattttgagacttcagaaaatgtaaaagctaacggggtttcctcacagggaaggaacacagcagaatgattatgagtaggctctggagtcagaatgcatgggtaagaatcatggctctttcattactagctgtgtgaccttgggcaagttccacaacctctcttaagcctgtctcctcatctatagatagggataatgctgatacctcccatatagtgttgttatgagggattaaatgtgctaacatatgtaaaatacctagaggagtgcctggcacataataaaatgctcaatgttattagcatctttttttttgtttcgttctatcccctcattttatagatgagaagtctgtgaatcctgcctaagatcctaaagcaagttagtagcattgctataaccagaacccaggtattctagataggattagaaagaggaaaattgagaaaggatataaaataaaggcaacgtaattaaaaggctcactccacacttattctaggggatgattaaaagagtagtttagaaggtaatagcagctaggtactgtggctcaatgcccgtaatcccagcattttgggaggccaaggtgggaggatccttgagcccaggagttcaagaccagtgtgggcaacacagtgagaccccacttctataaattaaaaaaaaaaaaaaaaaattagccaggcatggtggtgcacacctgggtcatggctacttggaaggctgagatgggaggattgcttgagcctgggaggctgaagctgcagtgagccgtgatcatgccactgtacccctgggggacagagcaagacctcgtctcaaaaaaaacaaaaaaaaaggactgtagtagcaggtgggaaaagtgtgtggcaggaaaaggaaaaaggtgacaaggacctttctatttccttcagaaaagtctgcaaaatacttcactttgtaaaatgattttccctttcattcaaccaaatgtaaacaaagtttcctaccctaattgaacaatcgctaccattccttccacttttaggctaccatggagcaggacacaaaagttrggtattttgcctgcaatctgattggctgaattttcatcttcattgtcatcagtgatgccagtacccacctcatcaccttctgtgaaaaaaagagaaaacaggtcagactgaaattacctacaaaaaccccaaaccccaatttatactcttggatgtttctagcctttaagggatagtgtagagttctaagggaatattataacaagcaggaaaaactcattccagttttccaatatctacataaaagtcagtttccacacattatatgaattccatttatataaaacatccagaataggcaaatctatatatacagaaaggatattagtggttatttggggtaggggaaatggggggaggggtctgggagttgatagttaaagggtacagggtttctttttggggttataaaaaagttctcaaattgattgtggtgatggttgcacaactctgcaaatatactaaaaaccactttaaatgggtgaagtatat

SEQ ID NO: 95161 - DNA, 24598 bp, Homo sapiens
aattcttagaagaaaacacagacacaaatcttcatgaccttggattaggcaatactttcttagacatgacaccataagcacaagcaactaaaggaaaaaaatagataaatgaggcttcttcaaaattagaaacttccgtgcttcaaatgacaccaagaagaaactggaatgataatccacagaatgggagaaaatatttgcaatcatataaaggtctcagaatacataaagaactgttacaatacaataataaaaagaaacaattaaaaaatggccgcagtatctgaatagttccaaatgttctaaaattggttctggtaaatatactaaaaaccatttcattgcatgctttaaattagtgaattgtatgggatgcaaattatacttcaataaagctgctattaaaaaataaatgctcaataaatgatagccattattgtttaaaaaattactctgaagaaaaaagatgagtaaaggaacagaataaatcttttttacttgtagaaagacttacgaacatacattatccactataaaaattggaagtaggaacaagatggcctagacagataactattaaaggattctgaaagctggaaagaaagcagactggactggccagaggcctcagcacttgaagaatggcaatgcagtgagactcttgagactacacatatgctaggctgggcagtgcaggagtctgcagcctgaaataaccaataggcatagaaaaaaagaaaaatctgttttctctcaccagaggatagggaaatgcaaagcacaacagagaccaagtggggagctctaatctcagctcttcaactgaggtaccagttggccaatcaatctgtctttagcagcaacttcaaagtcctggtgagccaacccaacctctgcttcacaaccacagcgctgatgggccaacatatttgcagcatcaacaaagaagccccagacggctttcctgactccacagtgttctactactcaggtacccttgggcagtccaattcacctgcagagggttcaaagcaatgacaggtctactcgacccctgctccacagcaggggcaacagcaattaggttgatcctcccatgtcacctgagcctggtagcttctggccctctacccagtggcataaggagacttaggacaagaagaaatggggcattatctgtagaggaaacaaatttgaactgacagggaatttctcatttgaaactacggaagccagaggaagtggcacaatatttcttagtgctgaagtaaaacaattgttaactaggaatcctatatccaacgtaactacccttcagtaatgaaggtgaaataaagatattctcagacaaaggaaaactaagaaatttgttgctagcagacctacccataaataatgtctaaaggaaggtctccaaacagaaagaaaatgataacagaagaaggctgggacattcagaaaggaaagaacataaatggtaaaaactgaggtcagtacaatagactatccatcatcccatgaacttctttaatcaaagtttatggttgaagcaaaaattttcacacaatttgatgtgctgctcaatgaagacagaggaaatatttttaaaaattatgtttaagaaatgaagaaggtaagggaaactaatggaagaagtaaggtttctataattcacttaaagtggcaaaatgataccactgcacttttgataacttatgtatgtatacagtaattcctagaacaaccaactaatgaaaacttaaaaagtgatatatgaaaaaacattataaatgaacattatgaataattaaagtggaattctaagaaatgttcgaataacctgtaggatattcttcaatgtgtgaatggttaaacaaaggtaccaccataccatggcgtacaactcagcaataaaaagaaacaaactatgtgatatggtttggatctatgtccccacccaaatttcatgtctagttgtaatctccagtgttgaaggtagggactggtgggatgtgattggatcatggaggtggagttctcatgaatggtttagcaccatccccttttggtactgcacagtgagttctcataagatctggttgtttaaaaatgtgtaggccctccccctcactctcctgctcctgctttgccttcctccatgaggaaaacctccctgaggcctccccagaagcctggaagctgctatgcttcctgtacagcctgtggaacctcttttcttttacaattaaacctcttttctttacaaattaccatgagccaattaaacctcttttctttacaaattacccagtctcaggtatttctttatagcagttgagaatggactaatacactgttgatacatgcaacaacttggatgaatctcatggaaattatgttgagtgaaaaaaagccaatcccaaaaggttaggtacagttcaatttttataacattcctaaaatgacaaaattataaaataaagaacggattagtagttgcaacgggttaagaactggggtgaaggaagtgggtatgattataaaggaataacacaaggaagccttatggtgatatgggatggtacaattaagtattttgaccgtgacggtggttacacaaaattacacaaaattttaataaaatgtaattaatgtaaaatatagccaaaaataaagaaacagaaaacatttgagaaaaagtaaaagactcacaagatgataagagtgttttgcatgcctgaggccttgggccacagtgtaccagtttgtccagagagttggcactaacaatgtggtttatggtgaacatctggtttttccctgtggggctggctggtgcttaaacaattgagatgctgcatgcctacataaccgacctttagtaaaaactatacacaatgaagcttgagcaagcttccctggttggcaacactatgcatgtgttgacatatcctcactacagtaagtaagagcatctcatttgactccactggaagaagacacttggaagcctgtgctgaggttcctcaggacttgccccatgccttttccttttgctgattttattctgtatcctttcacagtaatcaaccctaagtctaagtgtaacagcttctgagttctgtgagtcctctagtgaattacagtggctgagggcagtcatgggatccctgacataccttctttcgggaacaagcacttctaccattttcagaaactgcttggactttactattccctatttactttcctaatttgtggtagggtttaaagcacctagtgaattcccaaagatcagttagttacaaaatctgacctggtcaatcatgactaagtggctactgacaccaacatttcaaacagagggctgcacatctggggatatgtctgaccactctatttcatcagtccacttcacccagccccgggaacagacatgggcatgccaggtcttgcctactgcttaaaatggctgagaaagtggcaaggcagcttcagtattttatataccaccacaaccaagctgccaaccacatggggacatatccactcccagtagttttttgctgcaaatctccccatcacctccctctcggaaactgtatacaacactgcacagaggtaatctgccacgtggctacaggagaggagcatttctcttagctaggatgtggctccacttgggaggcatgacacagataattcagtagcagcagtacaaagtaattttgagataaaacatacctgtagagtgaattctctttaaaattcactctcagtcactcatctcctgataagctttcttgagcaggagagaaagagttgcaagtagtatattgtacaccaaaatttacacataacccacagccatcattatatgtgtcaagcatgaaacaactgtttaaactgatgattttgttagccatatgcctatgaaatgctttgatgttctctggctcctgtctgcacacctcaaatctgtgacctattaatttattttctaagaaaaggctttgaggtttcatcactctagagaagtgggtcacacatgtgaaatactatttaagtgatacacattagtcttaaaatggctcagtcatagcactggtaatatgaagttggatgaattctctattttgccatgtcttcaagtaaaatggtgtatttcaaatcagtacagactgtacacttgcactgtacctacaaacacttgttttgttgacacgacacattctgaatccatagctactaaatgcaaaaatttaaaaactattccttccccaacacgtcgccaagtgctgagaacaactctgccaattgtaccaacatgagcggtaactaagataaaggccaaatacccccttacataaagagctaacaggccagtgagaaattttcatcacatattaacacaggaattttatgttcttgagaaaaccatagcatttatttacaagtctctcagatagcttctcatccataaacaactcagagtcattacatgttttgttgaagaccagcaaaagagtcagagaaacagtgcaatagaatctaacggggctgttggctctccctttctcttattaaaacaagcacttattgctctgtgtgtgtgtgtgtgtgtttgtgtgtataatacacatttttttttaaatataaggaacatttccatttgtaagcctatcttctgtaagcgttgataccaatcttattaaatgcatgttaactgcttagaatcccaggcacacatgcaggttcattccctttctcttcaggcagtttccacaatccacaacattctcattttaacagtcctcattactggtatcatttaatacttgagggtttgctcaagtcagtatcaatcttgctgatcctacaaacacttattttgttgacacaacacagtctgaatccatagctactaaatgtaaaaattttaaaactattccttgcccaacacgtcaccaagtcactgttgctgtaacaactgtcagtcacgcagccctgtcaagagccacagcacaggagagacatcaagcacaggccttttggggaatcccactcccttcagtcattggtcctcctgccacccagatgcactgcttcttctcaaagacacttgacaccttaaactcaacattctgaagatggaaatgtttacctgcaaggcactttgttggacccatctgaaatctacttcctcattaacaaatagcccttcaccacaagtaaatcttaactaaccagaagagggagaaacctttccgtcagaaggaacaacaaaaacctattcagaacaaaaatttcctcttcaattaagcttaaatgtctctggacgagtctaaatcaagaaatagaataattctttacctgattggaaaacctcatgctcacgttacgttgatcctttagtgggacatagcgctggacaggatcaatgtctttaggactaataagttcatcagctgaaaaaaagaaggggaatgacattatcgaaaatgcatttgcataacactataaaccaactagacttttagaaaatactccaacaagagaagaatatacatttttctcagtgtacatgaaacatcctccaccaggatataccacatactaggccataaaataagcctcaatatatagaaaaggactgaatcataaaaagtatattgtctgaccacaagggaatggaattaggcatcaataacagaaagaaatcttataaattcacacatatgtggaaatgaaaacatactactaaataactaatgggtcaaataataaatcaaaagggaaatgagaaaatatattctaatatactttctgatgagatgaatgaaaataaagacaaacaccaaaatcaatgggatgtgggtaaaacaatgctcagagaaaaaattatagctataaattcctatattaaacagaagaaaaatctcaaatcaataacctatttttccaccttaagacagtggatgagatggctgggcacagtgggtcacgcctgtaatcccagcactttgggaggctgaggtgggcggatcacaaggtcaggagtttgagaccagcctggccaacatggtgaaactccatctctactaaaaatmcaaaaaaaaaaaaaaaaaaaaaaattagctgggcatggttgtgtgtgcctgtaatcccagctactcaggaggctgaggcaggagaattgcttgaacctgggaggtggaaggtgcagtgagccaagattgtgccactgtactccagcctgggcaacagagagagactccatctcaaaacaaaacaaacaaacaaaaaaagacagtggatgaaaaagagcaaactaaatcaaaagcaacagaaggaaggaaataataaagattagagtggaaattaatgaaacagtatagaaaaacaatacagaatcaagaaaatcaaaagtagtttcttaaaaagctcaataaaacttgcaaacctttagctagattgaccaagaaaagaagaaagaagactcaaattactaaatcaagaattcaagaaagaaacattactacagaactaaaggattataagagaataatatcaacaaatacatgccatcaaattagataacctagatgaaatggatgaattattcccggaaagacacaaactaccaaaactgactcaagaaggaatagaaaatctaaacagcttggtaaaaagtacataaagtgattgaaactttacacacacacacacacacacacacaaacacacacacacatccacacatagttcaggactagatggcgtcactggtgaattctaccaagcagttaaagaaaaattaaaaccaacctttcacaaactgtgccccccccccacccacaaaaaagagggaacacctcccaactcattctaagaggtcagtattattctaataccaaaatcaaagtatcacaagaaaattacaaagcaaaatctgtatgaatatagacacaaaaatcctcaacaaaatactagcaaacccaatccagtaacataaagaagggattacacatcataaccaagtagaatctatcccacaaatgcaaggatggcttaacatcacaaagttaattactaatagaccatatcaacaaaataaaggggaaaacactatgtgatcacttcaacagactgagaaaaagcatttgacaaaattcaacatccttgaataaaaagcattcaacaaagtaggaacagaagaaaatgtattcaacctaataaagggaatctatgaaaaagctacagctaatatcacactcacactcaatggtaaaagactgaatgctttcccccaaggatcaggaataagacaaggatatccactctcaccacttctattcaacattgaactggaggttccagccagggaaattgggaaagaaaaagtaataaaaagtatcagattggaaaggacaaaggctatggtaattaatagtgtggcattagcataaggatagagacagaaatagaatacagagtccaaaaataaacccttgcatgtatagtcaactgatttttgacagggtgccaaaacaattcagtagggagagaaaggatttttctttgttttgttttgagacagagtcttgctctgttgctcaggtggagtgcagtggcacaatcgcaactttcacctcccaagttcaagcaattctggtgcctcagtctcctgagtagctgggattacaggcatttaccaccatgcctggttaatttttgtgttttttgtagagacaaggttttgccatgttggccaggctggtctcaaactcttggcctcaaacctcagcctccaaaagtgttgggattacaggcgtgagccaccatgcccagccaaaaaaagtttttttattgacaaatagtgctgagacaattggatattcaaatgcaaaagaatgaagctggaccttttcctcacaccatatataaaatcaactcaaaatagatcaaagagttaaatgtaagagttaaaactataaaactgttagaagacaatatagaagtaagtctttgtgactgatttagacaaaactatggcatcataacaaaagtgataaaagaagtaaagagataaattggatttcatcaaaattataactttctggtgcctcaaaagatccatcaagaaagtgaaataacagcccaaagaatggtgagaaaacattcacaaatcagatatcttgtaagggatttacacctagaagatataaagaattcataacaacataataataaaaagaaaaaaaaamcccattaaaaaatagccacagtgtctatataggcttttctccaaaggagatatacaaattaccaataagcacatgaaaaaatgcacaacattagtcatttgggaaatgctaatcaaaaccacaatgaggtatcacttcatatccattaggaaggctacaattaaaaaaagaaaataggtaagaacaagtgttggcaaagatgtggagaaacagaaaccctcaaatagtgttgatgggaaagcaaaatgatacagcagctttggaaaacagtctggaagttgctcaaaatgttaaacgtaagacttagcatagacccagcaattacatgcctaggtatacacccaagagaaatgaaaaatatgttaaacaataattttatataaagtttatagcagcattattcataatagctaagaagtgcaaacaacccaaatgttcatctcctgatgaatgggtaaataaaatgtaatgtatatatacaatggaatattgttctgccataaaaaaggaatgaatcgctgaaacatgctacaacatggataaaccttgaaaatattatgttaagtgaaagaagccagacacaaaggtccattatcagtttcgagttacatgaaaggtcccaaataggcaaatctatagaattagagagtaggctagccattgcctagtgctgggggaagagggtgaagtgatgagaaggaaatgaggagtgactactactgggcatgaggttttttggcagggagatgatgaaaacattgtaaaactgatggcagtgatggttgcacaactctataaatataccaaaaatcactgaattgtaaactttaaataggtaaaatatatggtatgtaaatcacatctcaataaagctattttaaaaataataggaaagaagtcagatttctttcagaaaaatcagaaaaataataggaaggaaatcagtttgttaagaaataatgtttcctgatacaaaattctaaaagagatttctgagaaggggcgtttttttatggggcactgaccaacatgaaggcaacatcctcaattgctgttgcactataaaaatggaagcccttttaacatggtagttccttatggcaacttttgataaaatcctagggtataacgaggatggaaatttagagtgagaggcagtggggaggaaggcactaagtctgtggttctctgctgtcttctgctgtaacacacttgaaggataaccatcagcaccagaggctcactcactacagcaggatttctccatgggcctggaagagaacatgcaggggaggggtggtagtggtaggaaaagcccctgaaatgcaattctgcaaaacctccttggagtgcaagttgtcagttatctacacaaatttacagtgagcgtattttccaacccagcaagtccgcatctgtaaagttatcttagttatgctcacacatgtgcaaattaattgaacaaaaacaaaaacaaaaatccaacttctaaagtgagtcggcacacttcttcatttttactgcatgtaagctataaaacatgtttatttcattcttgatctttggctctacactgatcacttaaaaacaatactatgctgagttttgtataaatgtacccatgtataatatttactaaaaagattacagttcattttccatagctatttataaattgcttttaggtagtgaatatgacagagcaaggaaccaatggttataaatttatttgcagttttaggaatatttctatactagatttctatcctggggtatcttccaggcacatctgcattgttatttgagacaaaatcaccaaaggattttagtaactcttggaagatcttttcaataataattaaagtagtattaacagtagaataacaagaaggaggaagagtagaagcagagtctgccagagccaccgctgcctctgcagcagcagcaatacctacacagttattaagctccaggcattgttttaagtatttcacatatattcattcattaatcctcacaacaaccttatcactttatagatgatgaaccagaggcacctgagtgtttaggcaacttcctggtggttggtatagagcaaagctgagacacagtcagtcgactcccagagtctgggctcttaatcacatactaatcctgccctttaagaacactgacattctacataacataggtgaaaataatagcagaaggaggatgaaataaaaaaaactatttagacatgttacatttttcctatcgaaatcaggttgcatattacaaatgttctcctttctctctgaaaaaaaaaatacactttttcaaaatttaaaccaaaccaatgaaagcagatatcgacatataactttaatgtactaatttcagtttagctcatgatacagggttgattagtacactgatattctagataggcagtaaattatttccgtatctcaattgtatgatcactgagatgtgaaaaaatttctaaaacgaacaagttttcactgtcatgctatagaaactaaattctatctttattacagtattttgttatttataaatagtgacagataaattaagaaaccttatatccttgtaaagcataaatgctaatctattaaaattggtaagaattgaatggttaaccaagtcttccaaaagcttatttctttgcatttccttcgtgtttctctttgtgccacacttcatctagcttgatgttcccacttacaccacgtgctcatgtataaactcatagactgtatgcttcttatacatgatgcccagtacctagcagagccaccagcacctagtaggcactcaatacacttactaagcagaataataaattagtcggttagcaaatacagaaacactaattgccataatcattactttaatttccataatggtaaatgtgagaaatatcattaaaaggtcaagtttatgggcacattttttccccactgcattgatttttatcattcaggaggcaaaaatagagttctttattgtgccaattcaatgaaactgattttctggtgaagagtgacaatcctgaaagaacttatatccaacaaactacagaatatttcaaatgaaaataaaagaacgagggtaagagataatggctttctacatttacagtacagcaccacacctccaagataatcaagaatttctacaaaatggagatatctgtctttaaatccttagaaaataggaattaagttaattaatttttttttcacagaaggtttataaaatataccctgggctcaccccaagcaaaaactgtccagcgtaaaaagaaaatattaagaaaaatctgtttctttaatgaaataataatttaaagaaaacttaacagagcaagtattttttgtcataacacaaaaattacataggacatactaaaataggctcagcagatacttacagggtaaaattatgtacttcaaagcctagctgattctcagctgtggtgacacatattagtaacacatgtattatgaaatgagctatttggagaaaaagaaaatgcagatccttaacctcatattataccagaaaattccaaatacatgtgtgtgtgtgtgtgtatgcattttagtcaactgattaacaaggatggactttctaaaattaaatggtaaattccacagcaaaaactaaataggaaaacactggtagatctgagtgtgtaaagattttaacttctgctcatgaaaatatagcaaaagcaaaatttaaaggcaaacaaactaggaaaatatcagagaggttttatacacttaatatataaaacattcatgtaggctgataagaaaaaccataaaaccaagattaaatgggcaaaaaaaattactagacaattcacagaagagtgactaagaaatatgtttctaatagtcagaatataaatgaaaacaagactcaatttattatcttattaggttagcaatgtttttgcttttaataggaatatttaatgccacagaggttacaggtgacacaagcaccctgtagactcctgataaatcaataaactctgctagtcatgagctctgtaaccttgggtgagttgttaaactcttatgggccttagtttcctcacctatgccacatagtacccatctcagagagatgttaggaggattacttaggatgatgtttgtaagaggcagagcacagaatgtgacatataagaaagtcagttattggccaagcgtggtggctcatgcctgtaatcccagcactttgggaggccaaggcgggcagattgcccgagctcaggagttcgagaccagcctgggcaacatggtgaaaccccgcctccaataaaaatacaaaaaattagccgggcgtggtggtgagcacctgtagccccagctacttgggaggctgaggcaggaggattgcttgaaccctggaggcagaggttgcagtgagccgagatagtgccactgcacaccagcctgggcgacacagcgagactccatctccaaaaaaaaaaaaaaaaagaaagtcagttatttatacataaagctaaagaaagtcttcccaggtgaagcctttaaagtaatactacatgtgcttcccgatgtttataatgcctgctgcacagaaatcccactttaggtcactagccatcacatgggtaacatgagaaagataatgaaaatattcttgaagtttcctgaagtgcaacaactgggaaatctcttagcaaccaacatgtaaaaatatacctgtacactcttttctattcattttatcttgaacggagcagtaagaaaaccacgtgctatcctgaagagtcaactgcatttgaagacaacagatcaaagaaaatcaagacctcagtttcttatgtccttatatacatacactaggggacacttgatgaatgattttaagtttaaaaagcattagatttccaggtttactcagtagcttttatatttgagatcaattgggcaagaaatgtcatgaataaaatcaaatgcaaaaggacttatttttgttacatacactggaattaggaagtggtttgtcagaataattaggttgcccttagagagagagagagagacagagagaagtatttcctataactcttgttagtgagctactggatatccatagtcactatcaaagagtaggcctctataaatagaagcagagatcaacaagtagatgaatggtaaagtatgaacagaaagtggaagaaccatttaaacatgtatttgtcccatagtaaatgctttatgtgtatttcsttaccagctaatccttataacataaaaataaaaaattaatgctcatggaagttaagaaaactcagatcacacaggtagtaagtggcagattttacattcaaatcctggactgtctgattcctaagctcataatccacaaactcttcacctttcactacagcacaggaaaaatgtaagaaaagaaaaaaaaaaaaaaaaaaaaggaagagaagctagggagggagaaagtagaagaaaaagatgataatgtcagagaaataatctgtaaccccatggttacaagtttgctgggtgttaataatcatttaaaatataatttctacaggaaaaataaattggcttccaaacaatcacttaccaaagaactttgggaacccaagaaattaagttgggaacttcgtatatatataacactttggatattttaaagtacttctatatccattttatcactttaaaagtagcttgttagtgttccaaggaaattaaataatacccatccccaaaagaaaaagatcctgccaggcatggtgatctgtggccatagtcccagctactcaggaggctgaggtaggaggatcacttgagcccaggagtttgggactccattgagctatgatggtaccactgcactccagcctaggtgacagagtgaaactctcttgtctcttaaaaaaaattctgttgtgagattcaagcaaattttcattaacctgagtattctgggagtttgtgtatattggagagaaagttgtagttaactaaaattgcttaatatttaagtttaccaagagaatatatcttgttttaaccattaatgtttattaatgttttcaaaatatccaccctaaaaaaattattgtattcacctgccttaaattatacaatatgtaaagttctaatctttaatgagctgggataatgtagtagtacctgaatgaagatcatcactatgaatgtctgatgtacaggataagaaaagttagttgcatatatggaaaagacaagctgaagtctagaagtcagttttttttttttttgagatggagtcttgctctgtcacccaggctggagtgcagtggcatgatcttggctcactgcaacctccgcctcccaggttcaagcgattctcctgcctcagcctcctgagtaattgggactacaggtgcgtgccatcatggctggctaattttttgtatttttagtagagatggggtttcactgtgttagccaggatagtcttgatctcctgacctcatgatccgcctgcctcggccttccaaagtgctgggattacaggcatgagccaccacacctggccctagaagtcagatttttaaaagctgatatgttagtatctctttttaggacatagtgaataagaacatatattaaagttatataatggcctttataatggttatctaatggttttagagtaatgttatcattaactttatatttctttagttttctgaatctcaaaaaaaatttcaattcaaacatcaagattttcaagcaattttttgagacagggtctcactctattgcccaggctacagtgcagtggtgcaatcatggctcaccacaaccttgacctccagggctcaggtgatcctctggcctcagcctcctgagtagctgggactacagccatgcaccatcatggctggcgggcagagctcaggagttcgagactagcctgggtaacacggtgaaaccccatctctactaagaatacaaaaaattagccaggcgtggcggcacacacctgtagtcccatctactagcgaggctagtcgcgaactcctgggctcaagccatctgcctgcctcagcctccccaaatgctgggacacaggcgtgagccactgcacccagcctcaagtgatttttaatgcaataaatacaatcatgtgatgatgcataaagatgtcccataagattacaatactgtatcttcatgtatagacatcttcacgtataaacattttctatgtttaaatatgttaggtacacagatacttaccattgtgttacaattgtccacagtactcagtatagtaacatgttctacaagtttatagtctaggagcaataggctatatcatataggctaggtacgtcgtaggctaaaaatcacctaatgacacaattctcagaatgtagccctaccattaagcaatgaatgactgtacttttaaggttatttatttttgcaaatagctcaaaaaggtactctgctttctttagactggtcttacatgaatggtttctaaactttcaaatttgaataacagttgaaagtataactaatgaccattttattctaagacacgtcaaatatatcttaagatacgtcttacggggtttaaagtgtacatgtttataatatatttaccagctatatagaaaatattgattttctaaaagtataaattttataagagaaaaggaaatactgtgaataattaacttattttttaagagcacagtggggagttcaggccttggttcaggaaatagcatactgtgtcttttctttaacaattgaatagaagtcacagagttttgttatataattatttacttaggcatacataaagcaaaatattattagacttcactgagatacaaactggcctgaattagtgaaagtcatatactatatttttaaagattcactgytatattattttcatgtaaaaatagtaaccacaattagctgtccacaaaatgttgtcaagcagagatccagctgaggctcctttaatgaataaagactttttaagtaaatttgtatctggaatcttaatgaaaatccatagaagtctgatggttcttagggctagtatacaacagttaagagcaactaaatgattcaattttctgagatgttatttgtcttaaccagtgggttgttaaccagataacaaagctaggctagactactaatgaatatgcaatatttctttttttcagctggagatatgtatgtggtttcatagtatgcaaaataccttcttcatgttctcactgccttttcagaagatcagcagggaaaagagaaactgactttctttaacggcagctctgcagtatttcttcttctttttggtcatgaaacagaaatggaggcatgacctgtactacttctgttcactctggtcttaatatgagaaaatactatcttcactcaagacctgtctacattcaacacatttattacggaaagttcaatgcttttttactgatactattgtcaatctttttctttttttaaagctcaatttgcttatgtagggtgtagtcaattccaccttctcaattcactagccttgtcaattttatctagaggctttgctcaaacaacattctttctagttgtactaaacccaggctggatatatggcaaaaagcaggataaagaaggttttaatttcatatcccagatcccaggtgccagtttttagcctcagaatcacagaaaaaaattcctcatgctcatttgtaatttccaaatatagaacataaaaacctataattctaatgttaaaattcttatccttacataagttaactagtactctactaaaatatgttttacttaactgtaacaacaaagcttctttgtaattatgctagtgagacggaaataacattctaaccagagataaccttcccaacttgggttgattctaagaaaactatttcatgtgttgatcgaatcgttggcgctgtcagggagggtgtgctgaagaagaccactggccttgtgggattggctgtgtgcaatactccacatgagaggctaagaatattgtacacaaagattcttgacgttcttgaggaaatccctaaaaatgcagcatatagaaagtatacagaacagattacaaatgagaagctggctatggttaaagcggaaccagatgttaaaaaattagaagaccaacttcaaggcagtcaattagaagaggtgattctttaggctgaacatgaactaaatctggcaagaaaaatgagggagtggaaaccatgggcgccattagtggaagagcctcctgccgatcagtggaaatggccaatataattattaagtgactttggtgtgttgatgggaaactgatgtaattaaatattctgctatatcgagggcgtgttcatattactgacattttataatcaagaaaagtgatatagaaaatatgtaggagagtgttaaaattggtgattatggtaatatggtcatgtgaatccatttttgatttataaagtattcacacaggttatttcaaagatgatatttctatgaacagagaggtcatgggaagatttgaaaattattaaagaaaaattcctacagatcttcaatgcagagaccataatcaaaaagtaaagtttctttagtagtatgttcaatacatcatttaatttttcaagttatctggaagaagaaaaggtccttaactattatagtctaaacaaatttatagatcactgtttgaggtaaataatatgagtgaatattttcaaatgtgataaaatagcacaagtggckggtgataaaatttgaaattatggttaacctcagctgtgatcttatgtatgtaaagcaaaatttaaatatataattataggttgattacaaaatccataatgtcattttattttagtcattatttgaattataccatttactctgttttctgatagttttaattttattatattttgttgttactatattatatttgaaaaccttcaaattagaatacattgtacagttgaagaaattgacttggtacttaaaagaaagatttcccattgcacagaggttaytggagaaatttttccttttgttgcatttgtggaagttagttttctggaccgtggcctttaattttcttaacctaattacatcaggatagaggtagagtttctgtaaaagagacattaagagttcctgaaatttatatctggcatacggataggcttatattcaaaacatcttagtcatacgactataaattaaaagcggaatcactaaaaaaaaaaaaaaaaaaagaaaaaagaaaaaagaaaactatttcatgtgtctttcccccccgctttggaaattctaaaaggaaagcctataaataatatcaacaccttgtcaaaaagctgtccctttaaaggaggaagaaaatgtttcttcatgttcttaaattagcattaggtatatatggagacccagaaaatatagttaggaaaggagcaaactgaaaacagcattaacttagttttcacttatttggttagcttctgcctgttcttacatatcattttatgtaaagctcaaattggaaatctgtcctgtgaaatattcttccctaatggaatatttttttaaaaaccgaagatgattactcttacggcacaaatttattagcatttatgcagtaatgctagaaacaacaaaaatcataacagtattttatacagtaggcagttattttagtgcaggtacagtatttacagttagcctatttcaatatattttgccataaaggaattctgactctaaagtgatagcctttttgatgtaaatgctaacaacatttaaaatttgaacaaggaatttgcaggaagaatgcataatgctttttctgtgtttatcaaatttgtcttcatttcaaagtgtccaagagtgctatgattcagttcaagttgtaggagaagatgaaaaataattcttcaaagaataatgaataatggtcctattaaacctccaactaaaattgccaatatatatttattggaaagaaaagaactttgagatgaccaatacattttggcaagtggtctactaaaggtatgaccaagcatgactgttactgttttcttaagtcagaatttttaatatatcatataaaagtaactcaaagtttctataatcttctgcaggaaacctatatagtaagccaaatgcagccccctaaatgatcacaaatggtacccatacctatttcgctttctttccagaaactgtccatcatcattcagtgaaatagatatattaatataccactagatactaggaaactccctaaagacctctcaagaccatgaaacaccacccaaatccaacataaacaccagcaaaggcatatttatttctaatagcttaataacaaggaaaaaaataccattcccaatcttctccacttacccaggagttttgcgatgatataaagtgcttgtccccaaagaaacagttttccatcacggccacagttgctaggaaatcrtttttgactaccagggttatttttttcwtattctacaaagtcagctggcacataatagtactttggtacaacaggatatcctatggagtttaaaaataagtatttaaaatataacaaatctgtattagtccattctcatgctactaataaagatatacccaagactgggtaatttataaaggaaggagttttaatggcctcacagttccacatggctggggaggcctcacaatcatggtggaaggcgaaggaagagcaaaggtacgttttatatggtggcaggcaagagggcttatgcatttacaaaaccatcagatctcctgagacttattcactactatgagaacagtatgggggaaaccgccccccatgattcaattatctccacctggccccacccttgacacatgggaattactgtaattcaagctgagctttgggtggggatacagccgaaccatatcaaaattactgtctttcccaaaatttcccttcaagacactgtaatgattagaaagcagggagagagaattcttatacaggaggcaacagatttgataagctatagaaagctggatattctggttcctttcagatattgccagtgaaaatcatggagaaaaaaattgacttaaaacactaattcaacagcagattgttatgctttggctaacaatgagtacataatctccctcaacaacatttaattttaatacctttaaatgaatcaacaaatacacagtatgcaaatacttagagccacagaggaagctatttttaataggattattctgtagaagcttcacaaatgagatactgtgtaatcttaaatgaagaattataactctgagccattgctagagcaaagaaatccccatttaaacattaagcccattatctaccattcaatatcaccgaagagaaaaagccatctcccccgtgaccatttaaaaatgggttggtaggaactaaaattattatttaatagtagaatctttgtggatgatataatgggaaaataatcaacaatctatgtaggatgctacaggagactttttgcaatattagcccacagtaaacttaatttttctaatgaaattgcacagatttccctaaaattttgcttccttacatatcaatcaacaatatttgtgtctaaaatcagtaagaaggtctatgatatacagataatactttgaacatcactctctgaacatgatgaagcctgaagtgaggtacattaaactactacatctcaatgcatcaaagatctaatactaaatattaaaagatctgcttcaaaggatttcaaatattacatgcattacaaaatttaatacattatttctcacattggacaagtgattatttgtagcataaagacaaagataacttttaaaaattaatattcactttgaaatcaatgtttatccataaacatttcacaacttttaacattacaagcatgttagtgagcatataatattaagtatttactctgagatatctgtggaaaaccccaaagaatatcacaaatttcatgtgagataggaatggggctcactgctgtgattgtcaatactttaaagccccaaagacatctagaacatctcatttggaattcctttgaaaattggttttccagttatacagaaaattcagctatgttttttgagggtccctgctggtgtttgactgaaaccaatatacccttactcctaagactgggccttctgaccatttctcaaatattaaatccatcctcaaaggacgatgttttagcaccatggcagatgttcaaaatacaatgctaaggaccccagaaaaaactccaaagagggggccagaatattctcggcaattctagtgcctttagacaagagcagaacctctccaggtagccctccgcaggaggggcactcacctgactatagcatttttggtgacctgtataaaaactagtcactttctatacagagtaatggagttacatagtaaataacagatgaaggaactcagtccacctgacaaactattttggaatgactattgccatgtccacctagattcatttccatctttgtcttgcttaatcttctttctgatttcatatcagggatcattcatttttttcaatttaatacaaattattgttttttacaaaggactcacttatacatttcaaataaacattcaggaaatgttggtaggaagaatttcttaaaaaaacaactataccttctgtggtatgatgaagtactggagtcaaaagatcctgatattcctgtacttgcttaggattgcctctaaaaactcctaaaatataaaatataaaatccaatagcagctgagcttaataaggatctcaaaaattttaccttagaaaaaatayattagcccagttacaattattttggtaattttctatgccaatggtaaaattaaagtggaaaaaaaatgcaaatctgtgtgatatttttccaagaaattggttttagaaagtcatgttagcatttagaattgaaaactgaattttaattgaattttccctattcctaagtataaatgttacagacattcacattatcatggattacagtattaatgatttctactaataaaaatttttctttgtaaatatgaagaaaatatatatgctatcattttttaaatgcttccaagtgtttttttaattctttaaatgatttagcattcactcagaaagcaaaagagtagtatatacaaatgcagggcaattaacatcactgaagcgcagtctatttttctagctgaaaagagtcataatttatttctgctcttctttaaaccacttaaatcctacagcttaaatttcaggaaaaagcttgcttaaatttcaggaaaaagcttacttaccatcaatcatcatataaaggaaaaatatgggaaattcacattcaatgccatcaaatagctaaaacagaaaataaaacattaaattttacactaacaattaaattattattattattttgagacaagatctcactctgtggcccaggctggagtgcagtggcacaatcacggctctctgcagccttgccctcctgggctcaagggatcctttttcctgcctcagcctcccaagtgggagggctgggactatagacacaaaccactatatctggctatctctgtctctctctctctttctttctttcccttcctccctccctccctccctccttccctctttctttctttctccctctctctctctctccctccctctctctctctccctctccctttcttctttctccttccttcctttctctctctctctctccctcccccccctctttttctttctttctttcttctcagagatgtggtctcctccctctgttgcccaagctgctcaaacccctggcctcaagagatcctcttatcttggcctcccaaagtgctgggattacagacattacaggcatgaaccactgtggccagccactaacaattacattagaagaactatagttaggcgatatgtcaaagatttgtttatagcaataaagttgaactgattttgtaagcagtttccttgtcctttttttaaaaaaatttttcctcagatcttattattcaaaagctcactcattcagtccatcaaactgcagtccttcaataaatatttactgaatacttactaatgcctggaaccaactagacagagagctactaagacaaaagacagagaacttccctcagaggctcacagcctaatagggaggccagcatgtaaataaacaactactatgcagtaggaaatatctacacatggtatgtcaggctcatagggagtggaacacctgagtctgccttggaatcagggaatgtttacaggaaaggagatgtttcagctaacgctggatggaattcactggggagatgagctaaggtaactcaaggcaaaggaagtaacagttacaaaccacagatgcacagaatcacaaagtatgttaaagaatctaccagcaattcagtatttctgcaataagcaaggacgaagtagtgaaaactgaaacccaacagatgggccaggccagccagatcgggaagggccttgcaggtcatgctaagtagctaagactttggtctggaaataaaagagaaccacaggtgaatactcagcaggatcaaatttactcattatatttacttgctagactgagcagctggtaataccgaagagagttgtagggcaaaaaacaggaccagctggaattctgctggagcaaaatccaaagagaaaagatgacaacctaaactgagctttctcaacttcagcactactgacattgtggccaaataattctttgttgttgggctgtcctgtgtggtgcaggaatgtttagtagcattcctagtatctaccttccagatgtcagtagtacctactatattgtgataacccaaaatgtctgcagacattgtcaaatgtctcctggagggcaaaatcgccccagatccactagcctaaaccagggagtaatagagaggaaaaaacagaattttaggatttttaggaggctaaatctgccagccttggtgattgacaaaggtagatgggtgagaaggaagtgcctagaatgactctcaggtatagggctcgggcacaggagtggaagctgaatacaggcaaactgtaagacatctaagcgaggatgttcacaaggcagctgcatacagggggtgggcacttgaggagaggtatg
